(19) United States
(12) Patent Application Publication
(10) Pub. No.: US 2022/0102000 A1
(43) Pub. Date: Mar. 31, 2022

(54) PREDICTING BLOOD METABOLITES

(71) Applicant: Yeda Research and Development Co. Ltd., Rehovot (IL)

(72) Inventors: Eran SEGAL, Ramat-HaSharon (IL); Noam BAR, Rehovot (IL); Tal KOREM, Rehovot (IL)

(73) Assignee: Yeda Research and Development Co. Ltd., Rehovot (IL)

(21) Appl. No.: 17/427,223

(22) PCT Filed: Jan. 30, 2020
(86) PCT No.: PCT/IL2020/050121

§ 371 Date: Jul. 30, 2021

(30) Foreign Application Priority Data
Jan. 31, 2019 (IL) 264581

(51) Int. Cl. G16H 50/20; G16B 10/00; G16B 30/10; G16H 20/60; G16B 40/20; C12Q 1/10

(52) U.S. Cl. CPC G16H 50/20; G16B 10/00; C12Q 1/10; G16H 20/60; G16B 40/20; G16B 30/10

(57) ABSTRACT

A method of predicting the quantity of a metabolite in the blood of a subject, accesses a computer readable medium storing a library of trained machine learning procedures, searches the library for a trained machine learning procedure associated with the metabolite, feeds the selected procedure with amount of a plurality of microbes of a microbiome of the subject, and receives from the selected procedure an output indicative of the quantity of the metabolite in the blood.

### RELATED APPLICATION

[0001] This application claims the benefit of priority Israeli Patent Application No. 264581 filed Jan. 31, 2019, the contents of which are incorporated herein by reference in their entirety.

### SEQUENCE LISTING STATEMENT

[0002] The ASCII file, entitled 80593 Sequence Listing.txt, created on 28 Jan. 2020, comprising 82,571,264 bytes, submitted concurrently with the filing of this application is incorporated herein by reference.

### FIELD AND BACKGROUND OF THE INVENTION

[0003] The present invention, in some embodiments thereof, relates to a non-invasive method of quantifying blood metabolites.

[0004] Blood serves as a liquid conveyor for molecules inside the body by delivering necessary substances to the cells and transporting metabolic waste products. Of particular importance are the thousands of circulating small molecules termed the serum metabolome, which are either naturally produced by the body or taken up from the environment. While the connection of most of these metabolites to human health is yet to be elucidated, some are known to be predictive diagnostic biomarkers or even causal agents in the development of disease. For example, high blood cholesterol leads to buildup of plaque in the blood vessels, termed atherosclerosis, which in turn increases the risk for a major cardiovascular event such as heart attack, stroke, and peripheral artery disease. As a result, blood cholesterol level serves as both a diagnostic biomarker and a therapeutic target for drugs such as statins. As another example, type II diabetes which impacts around 10% of the population, is diagnosed in part by measurements of blood glucose levels, with a recent study suggesting that a new set of metabolites significantly improves diagnosis. These are only examples for the wealth of potential biomarkers and therapeutic targets that could be found in the blood, making blood an attractive source in which to search for novel biomarkers for early detection and treatment of disease.

[0005] Mass spectrometry can accurately identify thousands of metabolites from different biofluids. While some of its identified compounds are well studied and characterized, the determinants of most serum metabolites are still unknown. Studies focusing on human genetics estimated a median heritability of 6.9% for serum metabolites, thereby leaving much of the variation in metabolite levels unaccounted for and suggesting major contributions from environmental factors. Other studies have suggested that the gut microbiome is actively involved in the metabolism of many metabolites which are detectable in human serum, including a diverse set of biochemicals such branched-chain and aromatic amino acids. A notable example is the metabolite trimethylamine N-oxide (TMAO), which is derived from gut microbial metabolism of choline and carnitine, and was reported to act as a marker for cardiovascular disease in humans, with further evidence indicating proatherogenicity and prothromboticity in mouse models. The effect of nutrition on serum metabolites was long established as dietary patterns such as the intake of red meat, whole-grain bread, tea and coffee were linked to changes in a wide range of compounds. Smoking was suggested as impacting serum metabolites, with some of these smoking-related changes in human serum metabolites being reversible after smoking cessation. However, no study to date incorporated all of the above potential determinants within a single human cohort and quantified their relative contribution in explaining serum metabolites.

### SUMMARY OF THE INVENTION

[0006] According to an aspect of some embodiments of the present invention there is provided a method of predicting the quantity of a metabolite in the blood of a subject. The method comprises: accessing a computer readable medium storing a library of trained machine learning procedures, each being associated with a different metabolite; searching the library for a trained machine learning procedure associated with the metabolite; feeding the selected procedure with amount of a plurality of microbes of a microbiome of the subject; and receiving from the selected procedure an output indicative of the quantity of the metabolite in the blood.

[0007] According to some embodiments of the invention the method comprises measuring the amount of microbes of the microbiome of the subject prior to the analyzing.

[0008] According to some embodiments of the invention the microbiome is a fecal microbiome.

[0009] According to some embodiments of the invention the plurality of microbes comprises more than 20 microbes.

[0010] According to some embodiments of the invention the metabolite is set forth in Table 2.

[0011] According to some embodiments of the invention the metabolite is other than glucose and other than cholesterol.

[0012] According to some embodiments of the invention at least some of the trained machine learning procedures in the library comprises a set of decision trees.

[0013] According to some embodiments of the invention the selected machine learning procedure comprises a set of decision trees, each decision tree comprises a plurality of nodes associated with a respective plurality of decision rules, each decision rule relating to at least one microbe of the microbiome, and wherein a number of decision rules relating to microbes listed in Table 1 is larger than a number of decision rules relating to other microbes of the microbiome.

[0014] According to an aspect of some embodiments of the present invention there is provided a method of predicting the quantity of a metabolite set forth in Table 1. The method comprises: accessing a computer readable medium storing a trained machine learning procedure associated with the metabolite; feeding the trained procedure with an amount of N of the corresponding microbes set forth in Table 1, the N being at most 50; and receiving from the procedure an output indicative of the quantity of the metabolite in the blood, thereby predicting the quantity of the metabolite in the blood.

[0015] According to some embodiments of the invention the method comprises measuring the amount of microbes of the fecal microbiome of the subject prior to the analyzing.

[0016] According to some embodiments of the invention the metabolite is other than glucose and other than cholesterol.

[0017] According to an aspect of some embodiments of the present invention there is provided a method of predicting the quantity of a metabolite in the blood of a subject that consumes a diet of a plurality of food types. The method comprises: accessing a computer readable medium storing a library of trained machine learning procedures, each being associated with a different metabolite; searching the library for a trained machine learning procedure associated with the metabolite; feeding the selected procedure with a frequency of consumption of at least 5 of the food types over at least one month and/or a daily mean consumption of at least 5 of the food types; and receiving from the selected procedure an output indicative of the quantity of the metabolite in the blood.

[0018] According to some embodiments of the invention the metabolite is other than glucose and other than cholesterol.

[0019] According to some embodiments of the invention at least some of the trained machine learning procedures in the library comprises a set of decision trees.

[0020] According to some embodiments of the invention each set of decision trees comprises at least 1000 decision trees.

[0021] According to some embodiments of the invention the selected machine learning procedure comprises a set of decision trees, each decision tree comprises a plurality of nodes associated with a respective plurality of decision rules, each decision rule relating to at least one food type, and wherein a number of decision rules relating to food types listed in Table 3 is larger than a number of decision rules relating to other food types.

[0022] According to an aspect of some embodiments of the present invention there is provided a method of predicting the quantity of a metabolite set forth in Table 3. The method comprises: accessing a computer readable medium storing a trained machine learning procedure associated with the metabolite; feeding the selected procedure with a daily mean consumption and/or frequency of consumption over at least one month of N of the corresponding food types set forth in Table 3 of the subject; and receiving from the selected procedure an output indicative of the quantity of the metabolite in the blood, thereby predicting the quantity of the metabolite in the blood.

[0023] According to some embodiments of the invention the N is at most 50.

[0024] According to some embodiments of the invention the metabolite is other than glucose and other than cholesterol.

[0025] According to some embodiments of the invention the method comprises corroborating the quantity of the metabolite by measuring the amount of the metabolite in a blood sample of the subject.

[0026] According to an aspect of some embodiments of the present invention there is provided a method of diagnosing a disease of a subject. The method comprises predicting the quantity of at least one metabolite which is indicative of the disease, wherein the predicting is carried out according to any one of claims 1-21, thereby diagnosing the disease.

[0027] According to some embodiments of the invention the disease is selected from the group consisting of a metabolic disease, a cardiovascular disease and kidney disease.

[0028] According to an aspect of some embodiments of the present invention there is provided a method of altering the quantity of a metabolite in the blood of the subject. The method comprises: predicting the quantity of the metabolite; and administering to the subject at least one agent which specifically increases or decreases at least one microbe, wherein the agent is selected based on the quantity of the metabolite; wherein the predicting the quantity of the metabolite comprises: accessing a computer readable medium storing a library of trained machine learning procedures, each being associated with a different metabolite; searching the library for a trained machine learning procedure associated with the metabolite; feeding the selected procedure with an amount of a plurality of microbes; and receiving from the selected procedure an output indicative of the quantity of the metabolite in the blood.

[0029] According to an aspect of some embodiments of the present invention there is provided a method of altering the amount of a metabolite in the blood of the subject. The method comprises: accessing a computer readable medium storing a library of trained machine learning procedures, each being associated with a different metabolite; searching the library for a trained machine learning procedure associated with the metabolite; feeding the selected procedure with a predetermined quantity of the metabolite; receiving from the selected procedure an output indicative of at least one microbe; and administering to the subject at least one agent which specifically increases or decreases the amount of the at least one microbe, thereby altering the amount of the metabolite in the blood of the subject.

[0030] According to some embodiments of the invention the agent which increases the microbe is a probiotic.

[0031] According to some embodiments of the invention the agent which decreases the microbe is an antibiotic or a phage directed to the microbe.

[0032] According to an aspect of some embodiments of the present invention there is provided a method of providing dietary advice to a subject. The method comprises predicting the quantity of a metabolite in the blood by carrying out the method according to claim 14-22, wherein when the metabolite is above or below the recommended quantity of the metabolite, recommending consumption of at least one food type that alters the quantity of the metabolite.

[0033] According to some embodiments of the invention the metabolite is set forth in Table 4.

[0034] According to some embodiments of the invention the food type is the corresponding food type set forth in Table 4.

[0035] According to an aspect of some embodiments of the present invention there is provided a method of altering the amount of a metabolite set forth in Table 3 in the blood of the subject. The method comprises: accessing a computer readable medium storing a library of trained machine learning procedures, each being associated with a different metabolite; searching the library for a trained machine learning procedure associated with the metabolite; feeding the selected procedure with a predetermined quantity of the metabolite; receiving from the selected procedure an output indicative of a list of food types; and providing dietary advice to the subject, based on the output.

[0036] According to some embodiments of the invention the method comprises predicting the amount of the metabolite using another trained machine learning procedure.

[0037] Unless otherwise defined, all technical and/or scientific terms used herein have the same meaning as commonly understood by one of ordinary skill in the art to which the invention pertains. Although methods and materials similar or equivalent to those described herein can be used in the practice or testing of embodiments of the invention, exemplary methods and/or materials are described below. In case of conflict, the patent specification, including definitions, will control. In addition, the materials, methods, and examples are illustrative only and are not intended to be necessarily limiting.

### BRIEF DESCRIPTION OF THE DRAWINGS

[0038] Some embodiments of the invention are herein described, by way of example only, with reference to the accompanying drawings. With specific reference now to the drawings in detail, it is stressed that the particulars shown are by way of example and for purposes of illustrative discussion of embodiments of the invention. In this regard, the description taken with the drawings makes apparent to those skilled in the art how embodiments of the invention may be practiced.

[0039] In the drawings:

[0040] FIGS. 1A-E. Accurate and reproducible serum metabolomics from a deeply phenotyped human cohort. (A) Illustration of the measurements we obtained from our cohort. (B) Basic characteristics and demographics of our main and replication cohorts. P-values were calculated using Mann-Whitney U test for continuous variables and Fisher's exact test for binary variables. (C) Breakdown of the 1251 measured metabolites by type. (D) Number of samples (y-axis) in which each metabolite (x-axis) was identified, sorted by prevalence. (E) Spearman correlations (y-axis; box—IQR, whiskers—IQR*1.5) between standardized metabolomic profiles (Methods) of different individuals (n=475; median Spearman 0.05, std=0.12) stratified by sex, and between standardized metabolomic profiles of the same participant (n=20; median Spearman 0.68, std=0.06) taken one week apart. C&V, Cofactors and vitamins; std, Standard deviation.

[0041] FIGS. 2A-F. Diet, gut microbiome, genetics and clinical data predict the levels of most serum metabolites. Figure panels refer to results of 5-fold cross validation predictions of the levels of every metabolite based on models derived separately for each feature group. An exception is human genetics for which the EV of each metabolite is determined as that of the single most associated SNP. (A) Box and swarm plots (box, IQR; whiskers, 1.5*IQR) showing the EV (R²) of the top 50 predicted metabolites of each feature group (group names below panel C). Feature groups are sorted by their median EV across these 50 metabolites. (B) Heatmap showing the 95% confidence interval (CI) for EV (color gradient from left to right corresponds to lower and higher CI bounds) predicted for each metabolite (y-axis) by every feature group (x-axis). Only metabolites with significant predictions after strict Bonferonni correction are shown, their number per column shown above panel B. P-values and CIs were estimated using bootstrapping (Methods). (C) Enrichment of metabolite types in the metabolites predicted by each feature group (Mann-Whitney U test; Methods). Only significant enrichments are shown (p<0.05 after 10% FDR correction). Exact p-values are written in each cell. (D) A histogram of the number of metabolites (y-axis) with any value of EV (x-axis) as obtained using the full model. Inset shows the metabolites with EV in the range of 0.3-0.8. (E) Spearman correlations computed between the EV of metabolites for every pair of feature groups. Rows and columns are hierarchically clustered using Euclidean distances between the Spearman correlations. (F) The fraction of total EV (x-axis) of each feature group (y-axis) compared to the total EV of a model with all feature groups excluding genetics (full model). Total EV is the sum of the EV of the first 15 metabolite principal components (PCs) weighted by the EV of each PC (Methods).

[0042] FIGS. 3A-C. Validation of metabolite predictions on an independent cohort. (A) R² multiplied by the sign of the Pearson correlation coefficient (x-axis) between metabolite levels and BMI in our study, versus the mean R² multiplied by the sign of the Pearson correlation coefficient (y-axis) of BMI associated metabolites recently reported by a different group. Shown are 36 (out of 49) BMI associated metabolites that were also measured in this cohort. Line and shaded coloring represent the fitting of a linear model and the 95% confidence interval. (B-C) Dot plots showing the R² of metabolites obtained from prediction models trained on the main cohort (x-axis) and evaluated on the validation cohort (y-axis), for models based on microbiome (B) and diet (C) features. Only metabolites for which we obtained statistically significant predictions with over 5% of their variance explained in the main cohort are presented.

[0043] FIGS. 4A-F. Diet and gut microbiome data independently explain a wide range of biochemicals. (A) Shown is the EV of every metabolite from prediction models based on the gut microbiome (x-axis) versus diet (y-axis). Dashed red line is y=x. (B) Same for prediction models based on both gut microbiome and diet (x-axis) compared to using only diet (y-axis). (C) A histogram of the differences between the axes in B for metabolites whose predictions were statistically significant and over 5% of their variance was explained in at least one of the models. (D) Shown is the EV of every metabolite from prediction models based on all gut microbiome features (x-axis) compared to using only the top predictor of that metabolite, selected as the feature with the largest mean absolute SHAP value (y-axis). Dashed red palette lines mark different y:x ratios. (E) The levels of the unknown compound X-16124 in individuals for which the bacterial taxa from the Eggerthellaceae family was detectable in stool versus individuals for which it was not. *** Mann-Whitney U p<0.001; (F) Heatmap showing the directional mean absolute SHAP values (Methods) of various features (x-axis) computed from 5-fold cross validation models that predict metabolite levels (y-axis) using two separate models, one based on diet and another on gut microbiome data. Positive SHAP values indicate that higher feature values lead, on average, to higher predicted values, while negative SHAP values indicate that lower feature values lead, on average, to lower predicted values. Metabolites are sorted by their type and clustered within each group. Shown are the top 200 predicted metabolites using diet and gut microbiome, and the top 50 features by maximum mean absolute SHAP value across all metabolites. C&V, Cofactors and vitamins; AAs, Amino Acids.

[0044] FIGS. 5A-D. Networks of interactions between phenotypes explain diverse metabolites. Interactions between features from different feature groups predictive of similar metabolites are presented in a graphical layout, in which nodes are either metabolites or features, and edges are the directional mean absolute SHAP values (Methods) computed from models trained only on features from the respective feature group. Circular nodes—metabolites; predictive feature nodes—squares; both colored by relevant categories. Shown are only edges with a mean absolute SHAP value greater than 0.12. (A) Network of associations for the following feature groups: macronutrients, diet, microbiome, lifestyle, drugs and seasonal effects. (B) A large group of metabolites which their predictions are mainly driven by the reported consumption of coffee and the relative abundance of a bacteria from the Clostridiales order. (C) Metabolites explained by seasonal fruit consumption. (D) Selected examples of interactions between metabolites and features in predictive models.

[0045] FIGS. 6A-F. Metabolites explained by bread increase following an intervention that increases bread consumption. (A) Measuring associations between dietary features and metabolite levels using samples from this study. (B) Histogram of directional mean absolute SHAP values of whole-wheat bread consumption for metabolites computed based on held-out samples from our cohort. The top 5% (n=62; blue) positively associated metabolites and the top 5% (n=62; red) negatively associated metabolites are marked and used for further analysis. (C) A randomized controlled trial with 20 healthy subjects comparing the effect of consuming traditionally milled and prepared whole-grain sourdough bread to that of consuming industrial white bread made from refined wheat. We analyzed samples from the first week of the trial, in which 10 subjects increased consumption of sourdough bread and 10 others increased consumption of white bread. (D) Box plots (box, IQR; whiskers, 1.5*IQR) showing the mean fold-change (FC) of the top 5% positively (blue) and negatively (red) associated metabolites, separated by intervention group. Among the group which received the sourdough bread intervention the mean FC of the top 5% positively associated metabolites was significantly higher than the mean FC of the top 5% negatively associated metabolites (p<10⁻¹², Mann-Whitney U). *** Mann-Whitney U p<0.001; n.s., Not significant. (E-F) FC (y-axis) of two metabolites separated by intervention groups. In the sourdough bread group the FC of both betaine (E; Mann-Whitney U p<0.004) and cytosine (F; Mann-Whitney U p<0.002) were higher compared to the same FC in the group having white bread.

[0046] FIGS. 7A and 7B show results of experiments in which the model of the present embodiments was applied, without modification, to an independent cohort demonstrating a cross-cohort prediction ability.

[0047] FIGS. 8A and 8B. Validating metabolomics accuracy by comparing measurements to standard lab tests. Mass-spectrometry measurements (y-axis) versus standardized lab tests results (x-axis; Methods) for creatinine (E; Pearson R=0.87, p<10-20) and cholesterol (F; R=0.79, p<10-20). a.u., Arbitrary units.

[0048] FIGS. 9A-E. Gradient boosting decision trees outperform Lasso regression on diet and microbiome data. (A) Metabolite prediction R2 of GBDT vs Lasso regression models using diet data. Shown are only metabolites for which both models achieved significant predictions with R2 above 0.05. (B) Histogram of the differences between the R2 of GBDT compared to Lasso regression using the diet data. (C) The levels of the metabolite hydroxy-CMPF* vs the monthly consumption of cooked, baked or grilled fish as reported in a food frequency questionnaire. The comparison of Spearman and Pearson correlation coefficients suggests that the relationship between the metabolite and the numerical values of the question are monotonic yet non-linear, which explains why GBDT performs better in predicting the levels of hydroxy-CMPF* from diet data. The x-axis is not in scale. (D-E) Same as A-B for microbiome. GBDT, Gradient Boosting Decision Trees; a.u., arbitrary units.

[0049] FIG. 10. Comparison of explained variance of metabolites for every pair of feature groups. Every panel shows a dot plot of the explained variance of the metabolite groups from models based on every pair of feature groups. Panels on the diagonal shows the marginal distribution of explained variance of metabolite groups for a certain feature group.

[0050] FIG. 11 is a schematic illustration of a computer readable medium storing a library of trained machine learning (ML) procedures, according to some embodiments of the present invention.

[0051] FIG. 12 is a schematic illustration of a method suitable for predicting a quantity of a metabolite using a machine learning procedure which is associated with the metabolite and which is trained using microbiome data, according to some embodiments of the present invention.

[0052] FIG. 13 is a schematic illustration of a method suitable for predicting a quantity of a metabolite using a machine learning procedure which is associated with the metabolite and which is trained using food consumption data, according to some embodiments of the present invention.

[0053] FIG. 14 is a schematic illustration of a method suitable for solving an inverse problem using a machine learning procedure which is trained using microbiome data, according to some embodiments of the present invention.

[0054] FIG. 15 is a schematic illustration of a method suitable for solving an inverse problem using a machine learning procedure which is trained using food consumption data, according to some embodiments of the present invention.

[0055] FIG. 16. Principal component analysis over the metabolomics data. Shown are the proportion of variance explained by each of the first 400 principal components (left y-axis; black) and their cumulative EV (right y-axis; blue).

[0056] FIG. 17. Overall predictive power of gut microbiome and diet data replicates in an independent cohort. The sum of the explained variance (y-axis, R2) for diet and microbiome (x-axis) in the main (blue) and replication (red) cohorts. Shown are only metabolites for which the models achieved significant out-of-sample predictions with R² above 0.05 in the main cohort.

[0057] FIG. 18. Replication of associations between genetic loci and the levels of circulating blood metabolites. Explained variance (R²) of a model based on top significantly associated SNPs in the TwinsUK cohort from a previous study6 (x-axis) vs the explained variance of a model based on a single top associated SNP from this study (y-axis). Shown are results for 301 metabolites which were measured in both studies. Line and shaded coloring represent the fitting of a linear model and the 95% confidence interval.

[0058] FIGS. 19A-F. Specific dietary features and bacterial taxa underlie the accurate prediction of circulating metabolites. (A-F) Predicted (y-axis) vs measured (x-axis) levels (arbitrary units) of X-16124 (A; Pearson R=0.77, p<10-20), phenylacetylglutamine (B; R=0.63, p<10-20), p-cresol-glucuronide (C; R=0.64, p<10-20), caffeine (D; R=0.68, p<10-20), hydroxy-CMPF (E; R=0.72, p<10-20) and stachydrine (F; R=0.5, p<10-20). Predictions of A-C are based only on microbiome data, and colored by the relative abundance of the bacterial taxa having the highest mean absolute SHAP value for each metabolite. Predictions of D-F are based only on diet data, and colored by the reported consumption of the dietary item having the highest mean absolute SHAP value for each metabolite. p-values for prediction were estimated via bootstrapping.

[0059] FIG. 20. Distribution of bacterial phyla in our cohort. Stacked bar plots per sample (x-axis) showing the relative abundance of bacterial phyla (y-axis). Samples are sorted by the relative abundance of the most abundant phylum, Firmicutes. Bacteroidetes is the second most abundant phylum in our cohort. Relative abundance of a phylum is computed as the sum over relative abundances of all bacterial features belonging to that phylum.

### DESCRIPTION OF SPECIFIC EMBODIMENTS OF THE INVENTION

[0060] The present invention, in some embodiments thereof, relates to a non-invasive method of quantifying blood metabolites.

[0061] Before explaining at least one embodiment of the invention in detail, it is to be understood that the invention is not necessarily limited in its application to the details set forth in the following description or exemplified by the Examples. The invention is capable of other embodiments or of being practiced or carried out in various ways.

[0062] The collection of metabolites circulating in the human blood, termed the serum metabolome, contains a plethora of biomarkers and causative agents. Although the origin of specific compounds is known, the understanding of the key determinants of most metabolites is poor.

[0063] The present inventors have now measured the levels of 1251 circulating metabolites in 521 serum samples from a healthy cohort, and devised machine learning algorithms to predict their levels in held-out subjects based on a comprehensive profile consisting of gut microbiome, clinical parameters, diet, lifestyle, anthropometric measurements and medication data. Notably, they obtained significant predictions for over 92% of the profiled metabolites, with diet and microbiome each explaining hundreds of metabolites, and with 64% of the variance of some metabolites explained using only gut microbiome data. To corroborate the causality of these predictions, the present inventors showed that some metabolites that were predicted to be positively associated with bread increased in levels following a randomized clinical trial of bread intervention. Overall, the present results unravel the potential determinants of over 1000 metabolites, paving the way towards mechanistic understanding of the alterations in metabolites under different conditions and to designing interventions for manipulating metabolite levels.

[0064] Thus, according to a first aspect of the present invention there is provided a method of predicting the quantity of a metabolite in the blood of a subject, the method comprising analyzing the amount of a plurality of microbes of a microbiome of the subject so as to reach a confidence level of at least 95% in the significance of the predictions, thereby predicting the quantity of the metabolite in the blood.

[0065] The methods described herein are preferably non-invasive methods. Thus, in one embodiment, the methods described herein are carried out without blood sampling.

[0066] As used herein the term “subject” refers to a mammalian subject (e.g. mouse, cow, dog, cat, horse, monkey, human), preferably human.

[0067] In one embodiment, the subject is a healthy subject.

[0068] As used herein, a “metabolite” is an intermediate or product of metabolism. The term metabolite is generally restricted to small molecules and does not include polymeric compounds such as DNA or proteins greater than 100 amino acids in length. A metabolite may serve as a substrate for an enzyme of a metabolic pathway, an intermediate of such a pathway or the product obtained by the metabolic pathway.

[0069] In preferred embodiments, metabolites include but are not limited to sugars, organic acids, amino acids, fatty acids, hormones, vitamins, as well as ionic fragments thereof. In another embodiment, the metabolite is an oligopeptides (less than about 100 amino acids in length). In still another embodiment, the metabolite is not a peptide or a nucleic acid.

[0070] In particular, the metabolites are less than about 3000 Daltons in molecular weight, and more particularly from about 50 to about 3000 Daltons.

[0071] The metabolite of this aspect of the present invention may be a primary metabolite (i.e. essential to the microbe for growth) or a secondary metabolite (one that does not play a role in growth, development or reproduction, and is formed during the end or near the stationary phase of growth.

[0072] Representative examples of metabolic pathways in which the metabolites of the present invention are involved include, without limitation, citric acid cycle, respiratory chain, photosynthesis, photorespiration, glycolysis, gluconeogenesis, hexose monophosphate pathway, oxidative pentose phosphate pathway, production and β-oxidation of fatty acids, urea cycle, amino acid biosynthesis pathways, protein degradation pathways such as proteasomal degradation, amino acid degrading pathways, biosynthesis or degradation of: lipids, polyketides (including, e.g., flavonoids and isoflavonoids), isoprenoids (including, e.g., terpenes, sterols, steroids, carotenoids, xanthophylls), carbohydrates, phenylpropanoids and derivatives, alkaloids, benzenoids, indoles, indole-sulfur compounds, porphyrines, anthocyans, hormones, vitamins, cofactors such as prosthetic groups or electron carriers, lignin, glucosinolates, purines, pyrimidines, nucleosides, nucleotides and related molecules such as tRNAs, microRNAs (miRNA) or mRNAs.

[0073] Preferably, the metabolite is set forth in the Human Metabolite Database which is available online at wwwdothmdb.ca/metabolites.

[0074] Exemplary metabolites that may be analyzed include, but are not limited to: (N(1)+N(8))-acetylspermidine, “1,2,3-benzenetriol sulfate (1)”, “1,2,3-benzenetriol sulfate (2)”, “1,2-dilinoleoyl-GPC (18:2/18:2)”, “1,2-dilinoleoyl-GPE (18:2/18:2)*”, “1,2-dipalmitoyl-GPC (16:0/16:0)”, “1,3,7-trimethylurate”, “1,3-dimethylurate”, “1,5-anhydroglucitol (1,5-AG)”, “1,7-dimethylurate”, 1-(1-enyl-oleoyl)-GPE (P-18:1)*, 1-(1-enyl-palmitoyl)-2-arachidonoyl-GPC (P-16:0/20:4)*, 1-(1-enyl-palmitoyl)-2-arachidonoyl-GPE (P-16:0/20:4)*, 1-(1-enyl-palmitoyl)-2-linoleoyl-GPC (P-16:0/18:2)*, 1-(1-enyl-palmitoyl)-2-linoleoyl-GPE (P-16:0/18:2)*, 1-(1-enyl-palmitoyl)-2-oleoyl-GPC (P-16:0/18:1)*, 1-(1-enyl-palmitoyl)-2-oleoyl-GPE (P-16:0/18:1)*, 1-(1-enyl-palmitoyl)-2-palmitoleoyl-GPC (P-16:0/16:1)*, 1-(1-enyl-palmitoyl)-2-palmitoyl-GPC (P-16:0/16:0)*, 1-(1-enyl-palmitoyl)-GPC (P-16:0)*, 1-(1-enyl-palmitoyl)-GPE (P-16:0)*, 1-(1-enyl-stearoyl)-2-arachidonoyl-GPE (P-18:0/20:4)*, 1-(1-enyl-stearoyl)-2-linoleoyl-GPE (P-18:0/18:2)*, 1-(1-enyl-stearoyl)-2-oleoyl-GPE (P-18:0/18:1), 1-(1-enyl-stearoyl)-GPE (P-18:0)*, 1-arachidonoyl-GPA (20:4), 1-arachidonoyl-GPC (20:4n6)*, 1-arachidonoyl-GPE (20:4n6)*, 1-arachidonoyl-GPI (20:4)*, 1-arachidonylglycerol (20:4), 1-dihomo-linolenylglycerol (20:3), 1-dihomo-linoleoylglycerol (20:2), 1-docosahexaenoylglycerol (22:6), 1-lignoceroyl-GPC (24:0), 1-linolenoyl-GPC (18:3)*, 1-linolenoylglycerol (18:3), 1-linoleoyl-2-arachidonoyl-GPC (18:2/20:4n6)*, 1-linoleoyl-2-linolenoyl-GPC (18:2/18:3)*, 1-linoleoyl-GPA (18:2)*, 1-linoleoyl-GPC (18:2), 1-linoleoyl-GPE (18:2)*, 1-linoleoyl-GPG (18:2)*, 1-linoleoyl-GPI (18:2)*, 1-linoleoylglycerol (18:2), 1-methylhistidine, 1-methylimidazoleacetate, 1-methylnicotinamide, 1-methylurate, 1-methylxanthine, 1-myristoyl-2-arachidonoyl-GPC (14:0/20:4)*, 1-myristoyl-2-palmitoyl-GPC (14:0/16:0), 1-myristoylglycerol (14:0), 1-oleoyl-2-docosahexaenoyl-GPC (18:1/22:6)*, 1-oleoyl-2-docosahexaenoyl-GPE (18:1/22:6)*, 1-oleoyl-GPC (18:1), 1-oleoyl-GPE (18:1), 1-oleoyl-GPG (18:1)*, 1-oleoyl-GPI (18:1)*, 1-oleoylglycerol (18:1), 1-palmitoleoyl-2-linolenoyl-GPC (16:1/18:3)*, 1-palmitoleoyl-2-linoleoyl-GPC (16:1/18:2)*, 1-palmitoleoyl-GPC (16:1)*, 1-palmitoleoylglycerol (16:1)*, 1-palmitoyl-2-arachidonoyl-GPC (16:0/20:4n6), 1-palmitoyl-2-arachidonoyl-GPE (16:0/20:4)*, 1-palmitoyl-2-arachidonoyl-GPI (16:0/20:4)*, 1-palmitoyl-2-docosahexaenoyl-GPC (16:0/22:6), 1-palmitoyl-2-docosahexaenoyl-GPE (16:0/22:6)*, 1-palmitoyl-2-gamma-linolenoyl-GPC (16:0/18:3n6)*, 1-palmitoyl-2-linoleoyl-GPC (16:0/18:2), 1-palmitoyl-2-linoleoyl-GPE (16:0/18:2), 1-palmitoyl-2-linoleoyl-GPI (16:0/18:2), 1-palmitoyl-2-oleoyl-GPC (16:0/18:1), 1-palmitoyl-2-oleoyl-GPE (16:0/18:1), 1-palmitoyl-2-oleoyl-GPI (16:0/18:1)*, 1-palmitoyl-2-palmitoleoyl-GPC (16:0/16:1)*, 1-palmitoyl-GPA (16:0), 1-palmitoyl-GPC (16:0), 1-palmitoyl-GPE (16:0), 1-palmitoyl-GPG (16:0)*, 1-palmitoyl-GPI (16:0), 1-palmitoylglycerol (16:0), 1-stearoyl-2-arachidonoyl-GPC (18:0/20:4), 1-stearoyl-2-arachidonoyl-GPE (18:0/20:4), 1-stearoyl-2-arachidonoyl-GPI (18:0/20:4), 1-stearoyl-2-docosahexaenoyl-GPC (18:0/22:6), 1-stearoyl-2-docosahexaenoyl-GPE (18:0/22:6)*, 1-stearoyl-2-linoleoyl-GPC (18:0/18:2)*, 1-stearoyl-2-linoleoyl-GPE (18:0/18:2)*, 1-stearoyl-2-linoleoyl-GPI (18:0/18:2), 1-stearoyl-2-oleoyl-GPC (18:0/18:1), 1-stearoyl-2-oleoyl-GPE (18:0/18:1), 1-stearoyl-2-oleoyl-GPI (18:0/18:1)*, 1-stearoyl-2-oleoyl-GPS (18:0/18:1), 1-stearoyl-GPC (18:0), 1-stearoyl-GPE (18:0), 1-stearoyl-GPG (18:0), 1-stearoyl-GPI (18:0), 1-stearoyl-GPS (18:0)*, 10-heptadecenoate (17:1n7), 10-nonadecenoate (19:1n9), 10-undecenoate (11:1n1), “12,13-DiHOME”, 12-HETE, 12-HHTrE, 13-HODE+9-HODE, 13-methylmyristate, 14-HDoHE/17-HDoHE, 15-methylpalmitate, 16a-hydroxy DHEA 3-sulfate, 17-methylstearate, 17alpha-hydroxypregnanolone glucuronide, 17alpha-hydroxypregnenolone 3-sulfate, 1H-indole-7-acetic acid, 2′-deoxyuridine, 2′-O-methylcytidine, 2′-O-methyluridine, “2,3-dihydroxy-2-methylbutyrate”, “2,3-dihydroxyisovalerate”, “2,3-dihydroxypyridine”, 2-acetamidophenol sulfate, 2-aminoadipate, 2-aminobutyrate, 2-aminoheptanoate, 2-aminooctanoate, 2-aminophenol sulfate, 2-arachidonoylglycerol (20:4), 2-docosahexaenoylglycerol (22:6)*, 2-hydroxy-3-methylvalerate, 2-hydroxyacetaminophen sulfate*, 2-hydroxyadipate, 2-hydroxybehenate, 2-hydroxybutyrate/2-hydroxyisobutyrate, 2-hydroxydecanoate, 2-hydroxyglutarate, 2-hydroxyhippurate (salicylurate), 2-hydroxyibuprofen, 2-hydroxylaurate, 2-hydroxynervonate*, 2-hydroxyoctanoate, 2-hydroxypalmitate, 2-hydroxyphenylacetate, 2-hydroxystearate, 2-keto-3-deoxy-gluconate, 2-linoleoylglycerol (18:2), 2-methoxyacetaminophen glucuronide*, 2-methoxyacetaminophen sulfate*, 2-methoxyresorcinol sulfate, 2-methylbutyrylcarnitine (C5), 2-methylcitrate/homocitrate, 2-methylserine, 2-oleoylglycerol (18:1), 2-oxoarginine*, 2-palmitoleoyl-GPC (16:1)*, 2-palmitoyl-GPC (16:0)*, 2-palmitoylglycerol (16:0), 2-piperidinone, 2-pyrrolidinone, 2-stearoyl-GPE (18:0)*, 21-hydroxypregnenolone disulfate, “3,4-methyleneheptanoate”, “3,7-dimethylurate”, 3-(3-hydroxyphenyl)propionate, 3-(3-hydroxyphenyl)propionate sulfate, 3-(4-hydroxyphenyl)lactate, 3-(cystein-S-yl)acetaminophen*, 3-(N-acetyl-L-cystein-S-yl) acetaminophen, 3-acetylphenol sulfate, 3-aminoisobutyrate, 3-carboxy-4-methyl-5-propyl-2-furanpropanoate (CMPF), 3-hydroxy-2-ethylpropionate, 3-hydroxy-3-methylglutarate, 3-hydroxybutyrate (BHBA), 3-hydroxybutyrylcarnitine (1),3-hydroxybutyrylcarnitine (2),3-hydroxycotinine glucuronide, 3-hydroxydecanoate, 3-hydroxyhexanoate, 3-hydroxyhippurate, 3-hydroxyisobutyrate, 3-hydroxylaurate, 3-hydroxyoctanoate, 3-hydroxypyridine sulfate, 3-hydroxyquinine, 3-indoxyl sulfate, 3-methoxycatechol sulfate (1),3-methoxycatechol sulfate (2),3-methoxytyramine sulfate, 3-methoxytyrosine, 3-methyl catechol sulfate (1),3-methyl catechol sulfate (2), 3-methyl-2-oxobutyrate, 3-methyl-2-oxovalerate, 3-methyladipate, 3-methylcytidine, 3-methylglutaconate, 3-methylglutarylcarnitine (2),3-methylhistidine, 3-methylxanthine, 3-phenylpropionate (hydrocinnamate), 3-sulfo-L-alanine, 3-ureidopropionate, 3b-hydroxy-5-cholenoic acid, 3beta-hydroxy-5-cholestenoate, 4-acetamidobenzoate, 4-acetamidobutanoate, 4-acetamidophenol, 4-acetamidophenylglucuronide, 4-acetaminophen sulfate, 4-acetylphenol sulfate, 4-allylphenol sulfate, 4-ethylphenylsulfate, 4-guanidinobutanoate, 4-hydroxybenzoate, 4-hydroxychlorothalonil, 4-hydroxycinnamate sulfate, 4-hydroxycoumarin, 4-hydroxyhippurate, 4-hydroxyphenylacetate, 4-hydroxyphenylpyruvate, 4-imidazoleacetate, 4-methyl-2-oxopentanoate, 4-methylcatechol sulfate, 4-vinylguaiacol sulfate, 4-vinylphenol sulfate, “5,6-dihydrothymine”, 5-(galactosylhydroxy)-L-lysine, 5-acetylamino-6-amino-3-methyluracil, 5-acetylamino-6-formylamino-3-methyluracil, 5-bromotryptophan, 5-dodecenoate (12:1n7), 5-hydroxyhexanoate, 5-hydroxyindoleacetate, 5-hydroxylysine, 5-hydroxymethyl-2-furoic acid, 5-methylthioadenosine (MTA), 5-methyluridine (ribothymidine), 5-oxoproline, “5alpha-androstan-3alpha,17alpha-diol monosulfate”, “5 alpha-androstan-3 alpha,17beta-diol disulfate”, “5alpha-androstan-3alpha,17beta-diol monosulfate (1)”, “5 alpha-androstan-3alpha,17beta-diol monosulfate (2)”, “5alpha-androstan-3beta,17alpha-diol disulfate”, “5alpha-androstan-3beta,17beta-diol disulfate”, “5alpha-androstan-3beta,17beta-diol monosulfate (2)”, “5alpha-pregnan-3 (alpha or beta),20beta-diol disulfate”, “5alpha-pregnan-3beta,20alpha-diol disulfate”, “5alpha-pregnan-3beta,20alpha-diol monosulfate (1)”, “5alpha-pregnan-3beta,20alpha-diol monosulfate (2)”, “5alpha-pregnan-3beta,20beta-diol monosulfate (1)”, “5alpha-pregnan-3beta-ol,20-one sulfate”, 6-hydroxyindole sulfate, 6-oxopiperidine-2-carboxylate, 7-alpha-hydroxy-3-oxo-4-cholestenoate (7-Hoca), 7-methylguanine, 7-methylurate, 7-methylxanthine, “9,10-DiHOME”, 9-hydroxystearate, acesulfame, acetoacetate, acetylcarnitine (C2), acisoga, aconitate [cis or trans], adenine, adenosine, adenosine 5′-monophosphate (AMP), adipate, adipoylcarnitine (C6-DC), ADpSGEGDFXAEGGGVR*, adrenate (22:4n6), ADSGEGDFXAEGGGVR*, alanine, allantoin, alliin, alpha-hydroxyisocaproate, alpha-hydroxyisovalerate, alpha-ketobutyrate, alpha-ketoglutarate, alpha-tocopherol, andro steroid monosulfate C19H28O6S (1)*, “androstenediol (3alpha, 17alpha) monosulfate (2)”, “androstenediol (3alpha, 17alpha) monosulfate (3)”, “androstenediol (3beta,17beta) disulfate (1)”, “androstenediol (3beta,17beta) disulfate (2)”, “androstenediol (3beta,17beta) monosulfate (1)”, “androstenediol (3beta,17beta) monosulfate (2)”, androsterone sulfate, anthranilate, arabinose, arabitol/xylitol, arabonate/xylonate, arachidate (20:0), arachidonate (20:4n6), arachidonoylcarnitine (C20:4), arachidonoylcholine, arachidoylcarnitine (C20)*, argininate*, arginine, asparagine, aspartate, atenolol, azelate (nonanedioate), behenoyl dihydrosphingomyelin (d18:0/22:0)*, behenoyl sphingomyelin (d18:1/22:0)*, benzoate, benzoylcarnitine*, beta-alanine, beta-citrylglutamate, beta-cryptoxanthin, beta-hydroxyisovalerate, betaine, “bilirubin (E,E)*”, “bilirubin (E,Z or Z,E)*”, “bilirubin (Z,Z)”, biliverdin, “bradykinin, des-arg(9)”, butyrylcarnitine (C4), C-glycosyltryptophan, caffeic acid sulfate, caffeine, caprate (10:0), caproate (6:0), caprylate (8:0), carboxyethyl-GABA, carboxyibuprofen, carnitine, carotene diol (1), carotene diol (2), carotene diol (3), catechol glucuronide, catechol sulfate, “ceramide (d16:1/24:1, d18:1/22:1)*”, “ceramide (d18:1/14:0, d16:1/16:0)*”, “ceramide (d18:1/20:0, d16:1/22:0, d20:1/18:0)*”, “ceramide (d18:2/24:1, d18:1/24:2)*”, cerotoylcarnitine (C26)*, cetirizine, chenodeoxycholate, chiro-inositol, cholate, cholesterol, choline, choline phosphate, cinnamoylglycine, cis-4-decenoylcarnitine (C10:1), citraconate/glutaconate, citrate, citrulline, corticosterone, cortisol, cortisone, cotinine, cotinine N-oxide, creatine, creatinine, “cys-gly, oxidized”, cystathionine, cysteine, cysteine s-sulfate, cysteine sulfinic acid, cysteine-glutathione disulfide, cysteinylglycine, cystine, cytidine, cytosine, daidzein sulfate (2), decanoylcarnitine (C10), dehydroisoandrosterone sulfate (DHEA-S), deoxycarnitine, deoxycholate, desmethylnaproxen sulfate, dexlansoprazole, dihomo-linoleate (20:2n6), dihomo-linolenate (20:3n3 or n6), dihomo-linolenoyl-choline, dihomo-linolenoylcarnitine (20:3n3 or 6)*, dihomo-linoleoylcarnitine (C20:2)*, dihydroferulic acid, dihydroorotate, dimethyl sulfone, dimethyl sulfoxide (DMSO), dimethylarginine (SDMA+ADMA), dimethylglycine, docosadienoate (22:2n6), docosadioate, docosahexaenoate (DHA; 22:6n3), docosahexaenoylcarnitine (C22:6)*, docosahexaenoylcholine, docosapentaenoate (n3 DPA; 22:5n3), docosapentaenoate (n6 DPA; 22:5n6), docosatrienoate (22:3n3), dodecanedioate, dopamine 3-O-sulfate, dopamine 4-sulfate, DSGEGDFXAEGGGVR*, ectoine, eicosanodioate, eicosapentaenoate (EPA; 20:5n3), eicosapentaenoylcholine, eicosenoate (20:1), eicosenoylcarnitine (C20:1)*, epiandrosterone sulfate, ergothioneine, erucate (22:1n9), erythritol, erythronate*, escitalopram, estrone 3-sulfate, ethyl glucuronide, ethylmalonate, etiocholanolone glucuronide, eugenol sulfate, ferulic acid 4-sulfate, ferulylglycine (1), fexofenadine, fluoxetine, formiminoglutamate, fructose, fumarate, furaneol sulfate, gabapentin, galactonate, gamma-CEHC, gamma-CEHC glucuronide*, gamma-glutamyl-2-aminobutyrate, gamma-glutamyl-alpha-lysine, gamma-glutamyl-epsilon-lysine, gamma-glutamylalanine, gamma-glutamylglutamate, gamma-glutamylglutamine, gamma-glutamylglycine, gamma-glutamylhistidine, gamma-glutamylisoleucine*, gamma-glutamylleucine, gamma-glutamylmethionine, gamma-glutamylphenylalanine, gamma-glutamylthreonine, gamma-glutamyltryptophan, gamma-glutamyltyrosine, gamma-glutamylvaline, gamma-tocopherol/beta-tocopherol, gentisate, gentisic acid-5-glucoside, gluconate, glucose, glucuronate, glutamate, glutamine, glutarate (pentanedioate), glutarylcarnitine (C5-DC), glycerate, glycerol, glycerol 3-phosphate, glycerophosphoethanolamine, glycerophosphoinositol*, glycerophosphorylcholine (GPC), glycine, glycochenodeoxycholate, glycochenodeoxycholate glucuronide (1), glycochenodeoxycholate sulfate, glycocholate, glycocholate glucuronide (1), glycocholenate sulfate*, glycodeoxycholate, glycodeoxycholate glucuronide (1), glycodeoxycholate sulfate, glycohyocholate, glycolithocholate, glycolithocholate sulfate*, “glycosyl ceramide (d18:1/20:0, d16:1/22:0)*”, “glycosyl ceramide (d18:2/24:1, d18:1/24:2)*”, glycosyl-N-(2-hydroxynervonoyl)-sphingosine (d18:1/24:1(2OH))*, glycosyl-N-behenoyl-sphingadienine (d18:2/22:0)*, glycosyl-N-palmitoyl-sphingosine (d18:1/16:0), glycosyl-N-stearoyl-sphingosine (d18:1/18:0), glycoursodeoxycholate, glycylvaline, guanidinoacetate, guanidinosuccinate, guanosine, gulonate*, heneicosapentaenoate (21:5n3), HEPES, heptanoate (7:0), hexadecadienoate (16:2n6), hexadecanedioate, hexanoylcarnitine (C6), hexanoylglutamine, hippurate, histidine, histidylalanine, homoarginine, homocitrulline, homostachydrine*, HWESASXX*, hydantoin-5-propionic acid, hydrochlorothiazide, hydroquinone sulfate, hydroxybupropion, hydroxycotinine, hypotaurine, hypoxanthine, I-urobilinogen, ibuprofen, ibuprofen acyl glucuronide, imidazole lactate, imidazole propionate, indole-3-carboxylic acid, indoleacetate, indoleacetylglutamine, indolelactate, indolepropionate, indolin-2-one, inosine, isobutyrylcarnitine (C4), isocitrate, isoeugenol sulfate, isoleucine, isoursodeoxycholate, isovalerate, isovalerylcarnitine (C5), isovalerylglycine, kynurenate, kynurenine, L-urobilin, lactate, lactose, lactosyl-N-behenoyl-sphingosine (d18:1/22:0)*, lactosyl-N-nervonoyl-sphingosine (d18:1/24:1)*, lactosyl-N-palmitoyl-sphingosine (d18:1/16:0), lanthionine, laurate (12:0), laurylcarnitine (C12), leucine, leucylalanine, leucylglycine, lignoceroyl sphingomyelin (d18:1/24:0), lignoceroylcarnitine (C24)*, linoleamide (18:2n6), linoleate (18:2n6), linolenate [alpha or gamma; (18:3n3 or 6)], linolenoylcarnitine (C18:3)*, linoleoyl ethanolamide, linoleoyl-arachidonoyl-glycerol (18:2/20:4) [1]*, linoleoyl-arachidonoyl-glycerol (18:2/20:4) [2]*, linoleoyl-linoleoyl-glycerol (18:2/18:2) [1]*, linoleoylcarnitine (C18:2)*, linoleoylcholine*, lysine, malate, maleate, malonate, mannitol/sorbitol, mannose, margarate (17:0), margaroylcarnitine*, metformin, methionine, methionine sulfone, methionine sulfoxide, methyl glucopyranoside (alpha+beta),methyl-4-hydroxybenzoate sulfate, methylphosphate, methylsuccinate, methylsuccinoylcarnitine (1), myo-inositol, myristate (14:0), myristoleate (14:1n5), myristoleoylcarnitine (C14:1)*, myristoyl dihydrosphingomyelin (d18:0/14:0)*, myristoylcarnitine (C14), “N,O-didesmethylvenlafaxine glucuronide”, N-(2-furoyl)glycine, N-acetyl-1-methylhistidine*, N-acetyl-3-methylhistidine*, N-acetyl-aspartyl-glutamate (NAAG), N-acetyl-beta-alanine, N-acetyl-cadaverine, N-acetyl-S-allyl-L-cysteine, N-acetylalanine, N-acetylalliin, N-acetylarginine, N-acetylasparagine, N-acetylaspartate (NAA), N-acetylcarnosine, N-acetylcitrulline, N-acetylglucosamine/N-acetylgalactosamine, N-acetylglucosaminylasparagine, N-acetylglutamate, N-acetylglutamine, N-acetylglycine, N-acetylhistidine, N-acetylisoleucine, N-acetylkynurenine (2), N-acetylleucine, N-acetylmethionine, N-acetylmethionine sulfoxide, N-acetylneuraminate, N-acetylphenylalanine, N-acetylproline, N-acetylputrescine, N-acetylserine, N-acetyltaurine, N-acetylthreonine, N-acetyltryptophan, N-acetyltyrosine, N-acetylvaline, N-behenoyl-sphingadienine (d18:2/22:0)*, N-delta-acetylornithine, N-formylanthranilic acid, N-formylmethionine, N-formylphenylalanine, N-methylpipecolate, N-methylproline, N-methyltaurine, N-oleoylserine, N-oleoyltaurine, N-palmitoyl-heptadecasphingosine (d17:1/16:0)*, N-palmitoyl-sphingadienine (d18:2/16:0)*, N-palmitoyl-sphinganine (d18:0/16:0), N-palmitoyl-sphingosine (d18:1/16:0), N-palmitoylglycine, N-palmitoylserine, N-palmitoyltaurine, N-stearoyl-sphingosine (d18:1/18:0)*, N-stearoyltaurine, N-trimethyl 5-aminovalerate, N1-Methyl-2-pyridone-5-carboxamide, N1-methyladenosine, N1-methylinosine, “N2,N2-dimethylguanosine”, “N2,N5-diacetylornithine”, N2-acetyllysine, N4-acetylcytidine, “N6,N6,N6-trimethyllysine”, N6-acetyllysine, N6-carbamoylthreonyladenosine, N6-succinyladenosine, naproxen, naringenin, naringenin 7-glucuronide, nervonoylcarnitine (C24:1)*, nicotinamide, nisinate (24:6n3), nonadecanoate (19:0), norcotinine, norfluoxetine, o-cresol sulfate, O-desmethylvenlafaxine, O-methylcatechol sulfate, O-sulfo-L-tyrosine, octadecanedioate, octanoylcarnitine (C8), oleamide, oleate/vaccenate (18:1), oleoyl ethanolamide, oleoyl-linoleoyl-glycerol (18:1/18:2) [1], oleoyl-linoleoyl-glycerol (18:1/18:2) [2], oleoylcarnitine (C18:1), oleoylcholine, omeprazole, ornithine, orotate, orotidine, oxalate (ethanedioate), oxypurinol, p-cresol sulfate, p-cresol-glucuronide*, palmitate (16:0), palmitic amide, palmitoleate (16:1n7), palmitoleoylcarnitine (C16:1)*, palmitoloelycholine, palmitoyl dihydrosphingomyelin (d18:0/16:0)*, palmitoyl sphingomyelin (d18:1/16:0), palmitoylcarnitine (C16), palmitoylcholine, pantoprazole, pantothenate, paraxanthine, paroxetine, pentadecanoate (15:0), perfluorooctanesulfonic acid (PFOS), phenol glucuronide, phenol sulfate, phenylacetate, phenylacetylcarnitine, phenylacetylglutamine, phenylalanine, phenylalanylglycine, phenyllactate (PLA), phenylpyruvate, phosphate, phosphoethanolamine, phytanate, picolinate, pimeloylcarnitine/3-methyladipoylcarnitine (C7-DC), pipecolate, piperine, pivaloylcarnitine (C5), pregn steroid monosulfate C21H34O5S*, pregnanediol-3-glucuronide, pregnanolone/allopregnanolone sulfate, pregnen-diol disulfate C21H34O8S2*, pregnenolone sulfate, pristanate, pro-hydroxy-pro, proline, prolylglycine, propionylcarnitine (C3), propionylglycine, propyl 4-hydroxybenzoate, propyl 4-hydroxybenzoate sulfate, pseudoephedrine, pseudouridine, pyridostigmine, pyridoxate, pyroglutamine*, pyrraline, pyruvate, quetiapine, quinate, quinine, quinolinate, retinol (Vitamin A), ribitol, riboflavin (Vitamin B2), ribonate, ribose, riluzole, S-1-pyrroline-5-carboxylate, S-adenosylhomocysteine (SAH), S-allylcysteine, S-carboxymethyl-L-cysteine, S-methylcysteine, S-methylcysteine sulfoxide, S-methylmethionine, saccharin, salicylate, salicyluric glucuronide*, sarcosine, sebacate (decanedioate), serine, serotonin, silibinin, sitagliptin, spermidine, sphinganine-1-phosphate, “sphingomyelin (d17:1/16:0, d18:1/15:0, d16:1/17:0)*”, “sphingomyelin (d17:2/16:0, d18:2/15:0)*”, “sphingomyelin (d18:0/18:0, d19:0/17:0)*”, “sphingomyelin (d18:0/20:0, d16:0/22:0)*”, “sphingomyelin (d18:1/14:0, d16:1/16:0)*”, “sphingomyelin (d18:1/17:0, d17:1/18:0, d19:1/16:0)”, “sphingomyelin (d18:1/18:1, d18:2/18:0)”, “sphingomyelin (d18:1/19:0, d19:1/18:0)*”, “sphingomyelin (d18:1/20:0, d16:1/22:0)*”, “sphingomyelin (d18:1/20:1, d18:2/20:0)*”, “sphingomyelin (d18:1/20:2, d18:2/20:1, d16:1/22:2)*”, “sphingomyelin (d18:1/21:0, d17:1/22:0, d16:1/23:0)*”, “sphingomyelin (d18:1/22:1, d18:2/22:0, d16:1/24:1)*”, “sphingomyelin (d18:1/22:2, d18:2/22:1, d16:1/24:2)*”, “sphingomyelin (d18:1/24:1, d18:2/24:0)*”, “sphingomyelin (d18:1/25:0, d19:0/24:1, d20:1/23:0, d19:1/24:0)*”, “sphingomyelin (d18:2/14:0, d18:1/14:1)*”, “sphingomyelin (d18:2/16:0, d18:1/16:1)*”, sphingomyelin (d18:2/18:1)*, “sphingomyelin (d18:2/21:0, d16:2/23:0)*”, “sphingomyelin (d18:2/23:0, d18:1/23:1, d17:1/24:1)*”, sphingomyelin (d18:2/23:1)*, “sphingomyelin (d18:2/24:1, d18:1/24:2)*”, sphingomyelin (d18:2/24:2)*, sphingosine, sphingosine 1-phosphate, stachydrine, stearate (18:0), stearidonate (18:4n3), stearoyl sphingomyelin (d18:1/18:0), stearoylcarnitine (C18), stearoylcholine*, suberate (octanedioate), suberoylcarnitine (C8-DC), succinate, succinylcarnitine (C4-DC), sucrose, sulfate*, syringol sulfate, tartarate, tartronate (hydroxymalonate), taurine, tauro-beta-muricholate, taurochenodeoxycholate, taurocholate, taurocholenate sulfate, taurodeoxycholate, taurolithocholate 3-sulfate, tauroursodeoxycholate, tetradecanedioate, theanine, theobromine, theophylline, thioproline, threonate, threonine, threonylphenylalanine, thymol sulfate, thyroxine, tiglylcarnitine (C5:1-DC), trans-4-hydroxyproline, trans-urocanate, tricosanoyl sphingomyelin (d18:1/23:0)*, triethanolamine, trigonelline (N′-methylnicotinate), trimethylamine N-oxide, tryptophan, tryptophan betaine, tyramine O-sulfate, tyrosine, umbelliferone sulfate, undecanedioate, uracil, urate, urea, uridine, ursodeoxycholate, valerate, valine, valsartan, vanillactate, vanillic alcohol sulfate, vanillylmandelate (VMA), venlafaxine, warfarin, xanthine, xanthosine, xanthurenate, ximenoylcarnitine (C26:1)*, xylose, X-01911, X-07765, X-11261, X-11299, X-11308, X-11315, X-11372, X-11378, X-11381, X-11407, X-11441, X-11442, X-11444, X-11470, X-11478, X-11483, X-11485, X-11491, X-11522, X-11530, X-11593, X-11640, X-11787, X-11795, X-11843, X-11847, X-11849, X-11850, X-11852, X-11858, X-11880, X-12007, X-12013, X-12015, X-12026, X-12063, X-12096, X-12100, X-12101, X-12104, X-12112, X-12117, X-12126, X-12127, X-12193, X-12206, X-12212, X-12216, X-12221, 4-ethylcatechol sulfate, X-12261, X-12263, X-12283, X-12306, X-12329, X-12407, X-12410, X-12411, X-12456, X-12462, X-12472, X-12524, X-12543, X-12544, X-12565, X-12680, X-12701, X-12712, X-12714, X-12718, X-12726, X-12729, X-12730, X-12731, X-12738, X-12739, X-12740, X-12753, X-12798, X-12812, X-12816, X-12818, X-12820, X-12822, X-12830, X-12831, X-12837, X-12839, X-12844, X-12846, X-12847, X-12849, X-12851, X-12879, X-12906, X-13007, X-13255, X-13431, X-13435, X-13553, X-13658, X-13684, X-13703, X-13723, X-13728, X-13729, X-13737, X-13835, X-13844, X-13846, X-13866, X-14056, X-14082, X-14095, X-14096, X-14314, X-14364, X-14662, X-14904, X-14939, X-15220, X-15245, X-15461, X-15469, X-15486, X-15492, X-15503, X-15666, X-15674, X-15728, X-16087, X-16124, X-16132, X-16397, X-16570, X-16576, X-16580, X-16654, X-16935, X-16938, X-16944, X-16946, X-16964, X-17010, X-17145, X-17146, X-17185, X-17325, X-17327, X-17328, X-17335, X-17337, X-17340, X-17343, X-17348, X-17351, X-17353, X-17354, X-17357, X-17359, X-17367, X-17438, X-17469, X-17612, X-17653, X-17654, X-17655, X-17673, X-17676, X-17677, X-17685, X-17690, X-17704, X-17765, X-18240, X-18249, X-18345, X-18606, X-18779, X-18886, X-18887, X-18899, X-18901, X-18913, X-18914, X-18921, X-18922, X-19141, X-19183, X-19434, X-19438, X-19561, X-21258, X-21285, X-21286, X-21295, X-21310, X-21312, X-21319, X-21327, X-21339, X-21341, X-21342, X-21353, X-21364, X-21383, X-21410, X-21411, X-21441, X-21442, X-21444, X-21448, X-21467, X-21470, X-21474, X-21607, X-21628, X-21657, X-21659, X-21661, X-21729, X-21736, X-21737, X-21742, X-21752, X-21792, X-21796, X-21803, X-21807, X-21815, X-21816, X-21821, X-21829, X-21834, X-21838, X-21839, X-21842, X-21845, X-21851, X-22143, X-22162, X-22475, X-22509, X-22520, X-22716, X-22764, X-22771, X-22775, X-22834, X-23276, X-23291, X-23294, X-23295, X-23297, X-23314, X-23369, X-23583, X-23585, X-23587, X-23588, X-23593, X-23637, X-23639, X-23644, X-23649, X-23652, X-23654, X-23655, X-23659, X-23666, X-23680, X-23739, X-23780, X-23782, X-23787, X-23974, X-23997, X-24106, X-24243, X-24293, X-24295, X-24309, X-24328, X-24329, X-24337, X-24348, X-24352, X-24410, X-24411, X-24422, X-24425, X-24432, X-24435, X-24455, X-24456, X-24473, X-24475, X-24498, X-24512, X-24518, X-24519, X-24527, X-24542, X-24544, X-24546, X-24549, X-24550, X-24551, X-24552, X-24554, X-24555, X-24556, X-24557, X-24558, X-24560, X-24571, X-24588, X-24637, X-24655, X-24686, X-24693, X-24699, X-24706, X-24728, X-24736, X-24747, X-24748, X-24757, X-24760, X-24765, X-24801, X-24809, X-24811, X-24812, X-24813, X-24831, X-24832, X-24849, X-24932, X-24947, X-24948, X-24949, X-24951, X-24952, X-24972, X-24983, X-25116, 1-carboxyethylisoleucine, 1-carboxyethylleucine, 1-carboxyethylphenylalanine, 1-carboxyethylvaline, 1-methyl-5-imidazoleacetate, 1-ribosyl-imidazoleacetate*, “2,2′-Methylenebis(6-tert-butyl-p-cresol)”, “2,3-dihydroxy-5-methylthio-4-pentenoate (DMTPA)*”, “2,6-dihydroxybenzoic acid”, 2-naphthol sulfate, 3-(methylthio)acetaminophen sulfate*, 3-amino-2-piperidone, 3-carboxy-4-methyl-5-pentyl-2-furanpropionate (3-CMPFP)**, 3-formylindole, 3-hydroxyhippurate sulfate, 3-hydroxystachydrine*, “5,6-dihydrouridine”, 5-dodecenoylcarnitine (C12:1), 5-methylthioribose**, androsterone glucuronide, cis-4-decenoate (10:1n6)*, cysteinylglycine disulfide*, dihydrocaffeate sulfate (2), dodecadienoate (12:2)*, dodecenedioate (C12:1-DC)*, eicosenedioate (C20:1-DC)*, Fibrinopeptide A (2-15)**, Fibrinopeptide A (3-15)**, Fibrinopeptide A (3-16)**, Fibrinopeptide A (4-15)**, Fibrinopeptide A (5-16)*, Fibrinopeptide A (7-16)*, Fibrinopeptide B (1-11)**, Fibrinopeptide B (1-12)**, Fibrinopeptide B (1-13)**, gamma-glutamylcitrulline*, glu-gly-asn-val**, glucuronide of C10H18O2 (1)*, glucuronide of C10H18O2 (7)*, glucuronide of C10H18O2 (8)*, glycine conjugate of C10H14O2 (1)*, glyco-beta-muricholate**, hexadecenedioate (C16:1-DC)*, hydroxy-CMPF*, “hydroxy-N6,N6,N6-trimethyllysine*”, hydroxyasparagine**, hydroxypalmitoyl sphingomyelin (d18:1/16:0(OH))**, “N,N,N-trimethyl-alanylproline betaine (TMAP)”, “N,N-dimethyl-5-aminovalerate”, N-acetyl-2-aminooctanoate*, N-acetyl-isoputreanine*, N-methylhydroxyproline**, nonanoylcarnitine (C9), octadecadienedioate (C18:2-DC)*, octadecenedioate (C18:1-DC)*, octadecenedioylcarnitine (C18:1-DC)*, perfluorooctanoate (PFOA), picolinoylglycine, pregnenetriol disulfate*, sulfate of piperine metabolite C16H19NO3 (2)*, sulfate of piperine metabolite C16H19NO3 (3)*, taurochenodeoxycholic acid 3-sulfate, taurodeoxycholic acid 3-sulfate, tetradecadienoate (14:2)*, tridecenedioate (C13:1-DC)*

[0075] According to a particular embodiment, the metabolite is not glucose and not cholesterol. According to a particular embodiment the metabolite is set forth in Table 1 and more preferably in Table 2. Sequence identifier for the metagenomic sequences of the unknown bacteria recited in Tables 1 and 2 are provided in Table 10.

Lengthy table referenced here
US20220102000A1-20220331-T00001
Please refer to the end of the specification for access instructions.

Lengthy table referenced here
US20220102000A1-20220331-T00002
Please refer to the end of the specification for access instructions.

[0076] As used herein, the term “microbiome” refers to the totality of microbes (bacteria, fungae, protists), their genetic elements (genomes) in a defined environment.

[0077] According to a particular embodiment, the microbiome is a gut microbiome (i.e. microbiota of the digestive track). In one embodiment, the environment is the small intestine. In another embodiment the environment is the large intestine. The microbiome may be of the lumen or the mucosa of the small intestine or large intestine. In still another embodiment, the gut microbiome is a fecal microbiome.

[0078] In some embodiments, a microbiota sample is collected by any means that allows recovery of the microbes and without disturbing the relative amounts of microbes or components or products thereof of a microbiome. In some embodiments, the microbiota sample is a fecal sample. In other embodiments, the microbiota sample is retrieved directly from the gut—e.g. by endoscopy from the lower gastrointestinal (GI) tract or from the upper GI tract. The microbiota sample may be of the lumen of the GI tract or the mucosa of the GI tract.

[0079] According to one embodiment the microbiome sample (e.g. fecal sample) is frozen and/or lyophilized prior to analysis. According to another embodiment, the sample may be subjected to solid phase extraction methods.

[0080] In some embodiments, the presence, level, and/or activity of between 5 and 10 species of microbes are measured. In some embodiments, the presence, level, and/or activity of between 5 and 20 species of microbes are measured. In some embodiments, the presence, level, and/or activity of between 5 and 50 species of microbes are measured. In some embodiments, the presence, level, and/or activity of between 5 and 100 species of microbes are measured. In some embodiments, the presence, level, and/or activity of between 5 and 500 species of microbes are measured. In some embodiments, the presence, level, and/or activity of between 5 and 1000 species of microbes are measured. In some embodiments, the presence, level, and/or activity of between 50 and 500 species of microbes (e.g. bacteria) are measured. In some embodiments, the presence, level, and/or activity of substantially all species/classes/families of bacteria within the microbiome are measured. In still more embodiments, the presence, level, and/or activity of substantially all the bacteria within the microbiome are measured.

[0081] Measuring a level or presence of a microbe may be effected by analyzing for the presence of microbial component or a microbial by-product. Thus, for example the level or presence of a microbe may be effected by measuring the level of a DNA sequence. In some embodiments, the level or presence of a microbe may be effected by measuring 16S rRNA gene sequences or 18S rRNA gene sequences. In other embodiments, the level or presence of a microbe may be effected by measuring RNA transcripts. In still other embodiments the level or presence of a microbe may be effected by measuring proteins. In still other embodiments, the level or presence of a microbe may be effected by measuring metabolites present in the microbiome sample.

[0082] Quantifying Microbial Levels:

[0083] It will be appreciated that determining the abundance of microbes may be affected by taking into account any feature of the microbiome. Thus, the abundance of microbes may be affected by taking into account the abundance at different phylogenetic levels; at the level of gene abundance; gene metabolic pathway abundances; sub-species strain identification; SNPs and insertions and deletions in specific bacterial regions; growth rates of bacteria, the diversity of the microbes of the microbiome, as further described herein below.

[0084] In some embodiments, determining a level or set of levels of one or more types of microbes or components or products thereof comprises determining a level or set of levels of one or more DNA sequences. In some embodiments, one or more DNA sequences comprises any DNA sequence that can be used to differentiate between different microbial types. In certain embodiments, one or more DNA sequences comprises 16S rRNA gene sequences. In certain embodiments, one or more DNA sequences comprises 18S rRNA gene sequences. In some embodiments, 1, 2, 3, 4, 5, 10, 15, 20, 25, 50, 100, 1,000, 5,000 or more sequences are amplified.

[0085] 16S and 18S rRNA gene sequences encode small subunit components of prokaryotic and eukaryotic ribosomes respectively. rRNA genes are particularly useful in distinguishing between types of microbes because, although sequences of these genes differs between microbial species, the genes have highly conserved regions for primer binding. This specificity between conserved primer binding regions allows the rRNA genes of many different types of microbes to be amplified with a single set of primers and then to be distinguished by amplified sequences.

[0086] In some embodiments, a microbiota sample (e.g. fecal sample) is directly assayed for a level or set of levels of one or more DNA sequences. In some embodiments, DNA is isolated from a microbiota sample and isolated DNA is assayed for a level or set of levels of one or more DNA sequences. Methods of isolating microbial DNA are well known in the art. Examples include but are not limited to phenol-chloroform extraction and a wide variety of commercially available kits, including QIAamp DNA Stool Mini Kit (Qiagen, Valencia, Calif.).

[0087] In some embodiments, a level or set of levels of one or more DNA sequences is determined by amplifying DNA sequences using PCR (e.g., standard PCR, semi-quantitative, or quantitative PCR) and then sequencing. In some embodiments, a level or set of levels of one or more DNA sequences is determined by amplifying DNA sequences using quantitative PCR. These and other basic DNA amplification procedures are well known to practitioners in the art and are described in Ausebel et al. (Ausubel F M, Brent R, Kingston R E, Moore D, Seidman J G, Smith J A, Struhl K (eds). 1998. Current Protocols in Molecular Biology. Wiley: New York).

[0088] In some embodiments, DNA sequences are amplified using primers specific for one or more sequence that differentiate(s) individual microbial types from other, different microbial types. In some embodiments, 16S rRNA gene sequences or fragments thereof are amplified using primers specific for 16S rRNA gene sequences. In some embodiments, 18S DNA sequences are amplified using primers specific for 18S DNA sequences.

[0089] In some embodiments, a level or set of levels of one or more 16S rRNA gene sequences is determined using phylochip technology. Use of phylochips is well known in the art and is described in Hazen et al. (“Deep-sea oil plume enriches indigenous oil-degrading bacteria.” Science, 330, 204-208, 2010), the entirety of which is incorporated by reference. Briefly, 16S rRNA genes sequences are amplified and labeled from DNA extracted from a microbiota sample. Amplified DNA is then hybridized to an array containing probes for microbial 16S rRNA genes. Level of binding to each probe is then quantified providing a sample level of microbial type corresponding to 16S rRNA gene sequence probed. In some embodiments, phylochip analysis is performed by a commercial vendor. Examples include but are not limited to Second Genome Inc. (San Francisco, Calif.).

[0090] In some embodiments, determining a level or set of levels of one or more types of microbes comprises determining a level or set of levels of one or more microbial RNA molecules (e.g., transcripts). Methods of quantifying levels of RNA transcripts are well known in the art and include but are not limited to northern analysis, semi-quantitative reverse transcriptase PCR, quantitative reverse transcriptase PCR, and microarray analysis.

[0091] Methods for sequence determination are generally known to the person skilled in the art. Preferred sequencing methods are next generation sequencing methods or parallel high throughput sequencing methods. For example, a bacterial genomic sequence may be obtained by using Massively Parallel Signature Sequencing (MPSS). An example of an envisaged sequence method is pyrosequencing, in particular 454 pyrosequencing, e.g. based on the Roche 454 Genome Sequencer. This method amplifies DNA inside water droplets in an oil solution with each droplet containing a single DNA template attached to a single primer-coated bead that then forms a clonal colony. Pyrosequencing uses luciferase to generate light for detection of the individual nucleotides added to the nascent DNA, and the combined data are used to generate sequence read-outs. Yet another envisaged example is Illumina or Solexa sequencing, e.g. by using the Illumina Genome Analyzer technology, which is based on reversible dye-terminators. DNA molecules are typically attached to primers on a slide and amplified so that local clonal colonies are formed. Subsequently one type of nucleotide at a time may be added, and non-incorporated nucleotides are washed away. Subsequently, images of the fluorescently labeled nucleotides may be taken and the dye is chemically removed from the DNA, allowing a next cycle. Yet another example is the use of Applied Biosystems' SOLiD technology, which employs sequencing by ligation. This method is based on the use of a pool of all possible oligonucleotides of a fixed length, which are labeled according to the sequenced position. Such oligonucleotides are annealed and ligated. Subsequently, the preferential ligation by DNA ligase for matching sequences typically results in a signal informative of the nucleotide at that position. Since the DNA is typically amplified by emulsion PCR, the resulting bead, each containing only copies of the same DNA molecule, can be deposited on a glass slide resulting in sequences of quantities and lengths comparable to Illumina sequencing. A further method is based on Helicos' Heliscope technology, wherein fragments are captured by polyT oligomers tethered to an array. At each sequencing cycle, polymerase and single fluorescently labeled nucleotides are added and the array is imaged. The fluorescent tag is subsequently removed and the cycle is repeated. Further examples of sequencing techniques encompassed within the methods of the present invention are sequencing by hybridization, sequencing by use of nanopores, microscopy-based sequencing techniques, microfluidic Sanger sequencing, or microchip-based sequencing methods.

[0092] According to one embodiment, the sequencing method allows for quantitating the amount of microbe—e.g. by deep sequencing such as Illumina deep sequencing.

[0093] As used herein, the term “deep sequencing” refers to a sequencing method wherein the target sequence is read multiple times in the single test. A single deep sequencing run is composed of a multitude of sequencing reactions run on the same target sequence and each, generating independent sequence readout.

[0094] In some embodiments, determining a level or set of levels of one or more types of microbes comprises determining a level or set of levels of one or more microbial polypeptides. Methods of quantifying polypeptide levels are well known in the art and include but are not limited to Western analysis and mass spectrometry.

[0095] It will be appreciated that although the abundance of any number of microbes may be measured, a limited number are preferably used in the prediction analysis.

[0096] The present inventors have shown that the number of microbes whose abundance should be analyzed in order to predict the amount of a blood metabolite may be particular to that metabolite. Preferably, the abundance of at least 5 bacterial species are analyzed, at least 10 bacterial species are analyzed, at least 15 bacterial species are analyzed, at least 20 bacterial species are analyzed, at least 25 bacterial species are analyzed or more than 25 bacterial species are analyzed.

[0097] According to another embodiment, in order to classify a microbe as belonging to a particular genus, family, order, class or phylum, it must comprise at least 90% sequence homology, at least 91% sequence homology, at least 92% sequence homology, at least 93% sequence homology, at least 94% sequence homology, at least 95% sequence homology, at least 96% sequence homology, at least 97% sequence homology, at least 98% sequence homology, at least 99% sequence homology to a reference microbe known to belong to the particular genus. According to a particular embodiment, the sequence homology is at least 95%.

[0098] According to another embodiment, in order to classify a microbe as belonging to a particular species, it must comprise at least 90% sequence homology, at least 91% sequence homology, at least 92% sequence homology, at least 93% sequence homology, at least 94% sequence homology, at least 95% sequence homology, at least 96% sequence homology, at least 97% sequence homology, at least 98% sequence homology, at least 99% sequence homology to a reference microbe known to belong to the particular species. According to a particular embodiment, the sequence homology is at least 97%.

[0099] In determining whether a nucleic acid or protein is substantially homologous or shares a certain percentage of sequence identity with a sequence of the invention, sequence similarity may be defined by conventional algorithms, which typically allow introduction of a small number of gaps in order to achieve the best fit. In particular, “percent identity” of two polypeptides or two nucleic acid sequences is determined using the algorithm of Karlin and Altschul (Proc. Natl. Acad. Sci. USA 87:2264-2268, 1993). Such an algorithm is incorporated into the BLASTN and BLASTX programs of Altschul et al. (J. Mol. Biol. 215:403-410, 1990). BLAST nucleotide searches may be performed with the BLASTN program to obtain nucleotide sequences homologous to a nucleic acid molecule of the invention. Equally, BLAST protein searches may be performed with the BLASTX program to obtain amino acid sequences that are homologous to a polypeptide of the invention. To obtain gapped alignments for comparison purposes, Gapped BLAST is utilized as described in Altschul et al. (Nucleic Acids Res. 25:3389-3402, 1997). When utilizing BLAST and Gapped BLAST programs, the default parameters of the respective programs (e.g., BLASTX and BLASTN) are employed. See www(dot)ncbi(dot)nlm(dot)nih(dot)gov for more details.

[0100] In one embodiment, the abundance of no more than 30 bacterial species are analyzed, no more than 40 bacterial species are analyzed or no more than 50 bacterial species are analyzed.

[0101] Preferably, at least one of the bacteria that is analyzed belongs to the Clostridiales order.

[0102] Preferably at least one of the bacteria that is analyzed belongs to the phylum Firmicutes.

[0103] Preferably, at least 20% of the bacteria that are analyzed for the prediction of a single metabolite belong to the phylum Firmicutes. Preferably, at least 30% of the bacteria that are analyzed for the prediction of a single metabolite belong to the phylum Firmicutes. Preferably, at least 40% of the bacteria that are analyzed for the prediction of a single metabolite, belong to the phylum Firmicutes. Preferably, at least 50% of the bacteria that are analyzed for the prediction of a single metabolite belong to the phylum Firmicutes. Preferably, at least 60% of the bacteria that are analyzed for the prediction of a single metabolite belong to the phylum Firmicutes. Preferably, at least 70% of the bacteria that are analyzed for the prediction of a single metabolite belong to the phylum Firmicutes.

[0104] In another embodiment, the bacteria that is analyzed does not belong to the Bacteroidetes phylum. Preferably, less than 50% of the bacteria that are analyzed for the prediction of a single metabolite belong to the Bacteroidetes phylum. Preferably, less than 40% of the bacteria that are analyzed for the prediction of a single metabolite belong to the Bacteroidetes phylum. Preferably, less than 30% of the bacteria that are analyzed for the prediction of a single metabolite belong to the Bacteroidetes phylum. Preferably, less than 20% of the bacteria that are analyzed for the prediction of a single metabolite belong to the Bacteroidetes phylum. Preferably, less than 10% of the bacteria that are analyzed for the prediction of a single metabolite belong to the Bacteroidetes phylum.

[0105] According to a particular embodiment at least one of the bacterial features whose abundance are analyzed includes: (8002) S: Streptococcus thermophiles; (4810) S: Blautia sp CAG 237; (4961) G: Eubacterium; (3957) F: Lachnospiraceae; (4960) G: Eubacterium; (4581) S: Dorea longicatena; (4782) U: Unknown; (14322) S: Eggerthella sp CAG 209; (5190) S: Firmicutes bacterium CAG 102; (4577) S: Coprococcus comes; (6359) F: Clostridiaceae; (14861) U: Unknown; (3926) U: Unknown; (15073) G: Oscillibacter; (4749) S: Clostridium sp CAG 7; (6148) F: Peptostreptococcaceae; (4705) S: Clostridium sp CAG 43; (14397) S: Collinsella sp CAG 289; (15119) F: Clostridiales unclassified; (15041) F: Clostridiales unclassified; (5843) S: Allisonella histaminiformans; (14921) U: Unknown; (14306) S: Clostridium sp CAG 138; (15154) F: Clostridiales unclassified; (14816) F: Eggerthellaceae.

[0106] Table 1 provides a list of preferred bacteria whose abundance may be measured for the quantitative prediction per metabolite.

[0107] According to a particular embodiment, the metabolite which is analyzed is set forth in Table 1 and more preferably in Table 2.

[0108] The analysis of the amounts of the microbes of the microbiome is optionally and preferably by executing a machine learning procedure.

[0109] As used herein the term “machine learning” refers to a procedure embodied as a computer program configured to induce patterns, regularities, or rules from previously collected data to develop an appropriate response to future data, or describe the data in some meaningful way.

[0110] Representative examples of machine learning procedures suitable for the present embodiments, include, without limitation, clustering, association rule algorithms, feature evaluation algorithms, subset selection algorithms, support vector machines, classification rules, cost-sensitive classifiers, vote algorithms, stacking algorithms, Bayesian networks, decision trees, neural networks, instance-based algorithms, linear modeling algorithms, k-nearest neighbors (KNN) analysis, ensemble learning algorithms, probabilistic models, graphical models, logistic regression methods (including multinomial logistic regression methods), gradient ascent methods, singular value decomposition methods and principle component analysis.

[0111] Following is an overview of some machine learning procedures suitable for the present embodiments.

[0112] Support vector machines are algorithms that are based on statistical learning theory. A support vector machine (SVM) according to some embodiments of the present invention can be used for classification purposes and/or for numeric prediction. A support vector machine for classification is referred to herein as “support vector classifier,” support vector machine for numeric prediction is referred to herein as “support vector regression”.

[0113] An SVM is typically characterized by a kernel function, the selection of which determines whether the resulting SVM provides classification, regression or other functions. Through application of the kernel function, the SVM maps input vectors into high dimensional feature space, in which a decision hyper-surface (also known as a separator) can be constructed to provide classification, regression or other decision functions. In the simplest case, the surface is a hyper-plane (also known as linear separator), but more complex separators are also contemplated and can be applied using kernel functions. The data points that define the hyper-surface are referred to as support vectors.

[0114] The support vector classifier selects a separator where the distance of the separator from the closest data points is as large as possible, thereby separating feature vector points associated with objects in a given class from feature vector points associated with objects outside the class. For support vector regression, a high-dimensional tube with a radius of acceptable error is constructed which minimizes the error of the data set while also maximizing the flatness of the associated curve or function. In other words, the tube is an envelope around the fit curve, defined by a collection of data points nearest the curve or surface.

[0115] An advantage of a support vector machine is that once the support vectors have been identified, the remaining observations can be removed from the calculations, thus greatly reducing the computational complexity of the problem. An SVM typically operates in two phases: a training phase and a testing phase. During the training phase, a set of support vectors is generated for use in executing the decision rule. During the testing phase, decisions are made using the decision rule. A support vector algorithm is a method for training an SVM. By execution of the algorithm, a training set of parameters is generated, including the support vectors that characterize the SVM. A representative example of a support vector algorithm suitable for the present embodiments includes, without limitation, sequential minimal optimization.

[0116] In KNN analysis, the affinity or closeness of objects is determined. The affinity is also known as distance in a feature space between objects. Based on the determined distances, the objects are clustered and an outlier is detected. Thus, the KNN analysis is a technique to find distance-based outliers based on the distance of an object from its kth-nearest neighbors in the feature space. Specifically, each object is ranked on the basis of its distance to its kth-nearest neighbors. The farthest away object is declared the outlier. In some cases the farthest objects are declared outliers. That is, an object is an outlier with respect to parameters, such as, a k number of neighbors and a specified distance, if no more than k objects are at the specified distance or less from the object. The KNN analysis is a classification technique that uses supervised learning. An item is presented and compared to a training set with two or more classes. The item is assigned to the class that is most common amongst its k-nearest neighbors. That is, compute the distance to all the items in the training set to find the k nearest, and extract the majority class from the k and assign to item.

[0117] Association rule algorithm is a technique for extracting meaningful association patterns among features.

[0118] The term “association”, in the context of machine learning, refers to any interrelation among features, not just ones that predict a particular class or numeric value. Association includes, but it is not limited to, finding association rules, finding patterns, performing feature evaluation, performing feature subset selection, developing predictive models, and understanding interactions between features.

[0119] The term “association rules” refers to elements that co-occur frequently within the datasets. It includes, but is not limited to association patterns, discriminative patterns, frequent patterns, closed patterns, and colossal patterns.

[0120] A usual primary step of association rule algorithm is to find a set of items or features that are most frequent among all the observations. Once the list is obtained, rules can be extracted from them.

[0121] The aforementioned self-organizing map is an unsupervised learning technique often used for visualization and analysis of high-dimensional data. Typical applications are focused on the visualization of the central dependencies within the data on the map. The map generated by the algorithm can be used to speed up the identification of association rules by other algorithms. The algorithm typically includes a grid of processing units, referred to as “neurons”. Each neuron is associated with a feature vector referred to as observation. The map attempts to represent all the available observations with optimal accuracy using a restricted set of models. At the same time the models become ordered on the grid so that similar models are close to each other and dissimilar models far from each other. This procedure enables the identification as well as the visualization of dependencies or associations between the features in the data.

[0122] Feature evaluation algorithms are directed to the ranking of features or to the ranking followed by the selection of features based on their impact.

[0123] Information gain is one of the machine learning methods suitable for feature evaluation. The definition of information gain requires the definition of entropy, which is a measure of impurity in a collection of training instances. The reduction in entropy of the target feature that occurs by knowing the values of a certain feature is called information gain. Information gain may be used as a parameter to determine the effectiveness of a feature in explaining the response to the treatment. Symmetrical uncertainty is an algorithm that can be used by a feature selection algorithm, according to some embodiments of the present invention. Symmetrical uncertainty compensates for information gain's bias towards features with more values by normalizing features to a [0,1] range.

[0124] Subset selection algorithms rely on a combination of an evaluation algorithm and a search algorithm. Similarly to feature evaluation algorithms, subset selection algorithms rank subsets of features. Unlike feature evaluation algorithms, however, a subset selection algorithm suitable for the present embodiments aims at selecting the subset of features with the highest impact on the metabolite of interest, while accounting for the degree of redundancy between the features included in the subset. The benefits from feature subset selection include facilitating data visualization and understanding, reducing measurement and storage requirements, reducing training and utilization times, and eliminating distracting features to improve classification.

[0125] Two basic approaches to subset selection algorithms are the process of adding features to a working subset (forward selection) and deleting from the current subset of features (backward elimination). In machine learning, forward selection is done differently than the statistical procedure with the same name. The feature to be added to the current subset in machine learning is found by evaluating the performance of the current subset augmented by one new feature using cross-validation. In forward selection, subsets are built up by adding each remaining feature in turn to the current subset while evaluating the expected performance of each new subset using cross-validation. The feature that leads to the best performance when added to the current subset is retained and the process continues. The search ends when none of the remaining available features improves the predictive ability of the current subset. This process finds a local optimum set of features.

[0126] Backward elimination is implemented in a similar fashion. With backward elimination, the search ends when further reduction in the feature set does not improve the predictive ability of the subset. The present embodiments contemplate search algorithms that search forward, backward or in both directions. Representative examples of search algorithms suitable for the present embodiments include, without limitation, exhaustive search, greedy hill-climbing, random perturbations of subsets, wrapper algorithms, probabilistic race search, schemata search, rank race search, and Bayesian classifier.

[0127] A decision tree is a decision support algorithm that forms a logical pathway of steps involved in considering the input to make a decision.

[0128] The term “decision tree” refers to any type of tree-based learning algorithms, including, but not limited to, model trees, classification trees, and regression trees.

[0129] A decision tree can be used to classify the datasets or their relation hierarchically. The decision tree has tree structure that includes branch nodes and leaf nodes. Each branch node specifies an attribute (splitting attribute) and a test (splitting test) to be carried out on the value of the splitting attribute, and branches out to other nodes for all possible outcomes of the splitting test. The branch node that is the root of the decision tree is called the root node. Each leaf node can represent a classification (e.g., whether a particular input dataset corresponds to a particular metabolite in the subject's blood) or a value (e.g., the predicted quantity of the particular metabolite in the subject's blood). The leaf nodes can also contain additional information about the represented classification such as a confidence score that measures a confidence level in the represented classification (i.e., the likelihood of the classification being accurate). For example, the confidence score can be a continuous value ranging from 0 to 1, in which a score of 0 indicating a very low confidence (e.g., the indication value of the represented classification is very low) and a score of 1 indicating a very high confidence (e.g., the represented classification is almost certainly accurate).

[0130] Regression techniques which may be used in accordance with some embodiments the present invention include, but are not limited to linear Regression, Multiple Regression, logistic regression, probit regression, ordinal logistic regression ordinal Probit-Regression, Poisson Regression, negative binomial Regression, multinomial logistic Regression (MLR) and truncated regression.

[0131] A logistic regression or logit regression is a type of regression analysis used for predicting the outcome of a categorical dependent variable (a dependent variable that can take on a limited number of values, whose magnitudes are not meaningful but whose ordering of magnitudes may or may not be meaningful) based on one or more predictor variables. Logistic regression may also predict the probability of occurrence for each data point. Logistic regressions also include a multinomial variant. The multinomial logistic regression model is a regression model which generalizes logistic regression by allowing more than two discrete outcomes. That is, it is a model that is used to predict the probabilities of the different possible outcomes of a categorically distributed dependent variable, given a set of independent variables (which may be real-valued, binary-valued, categorical-valued, etc.). For binary-valued variables, a cutoff between the 0 and 1 associations is typically determined using the Yuden Index.

[0132] A Bayesian network is a model that represents variables and conditional interdependencies between variables. In a Bayesian network variables are represented as nodes, and nodes may be connected to one another by one or more links. A link indicates a relationship between two nodes. Nodes typically have corresponding conditional probability tables that are used to determine the probability of a state of a node given the state of other nodes to which the node is connected. In some embodiments, a Bayes optimal classifier algorithm is employed to apply the maximum a posteriori hypothesis to a new record in order to predict the probability of its classification, as well as to calculate the probabilities from each of the other hypotheses obtained from a training set and to use these probabilities as weighting factors for future predictions of the subject's blood contents (particularly the metabolites and optionally and preferably their quantity). An algorithm suitable for a search for the best Bayesian network, includes, without limitation, global score metric-based algorithm. In an alternative approach to building the network, Markov blanket can be employed. The Markov blanket isolates a node from being affected by any node outside its boundary, which is composed of the node's parents, its children, and the parents of its children.

[0133] Instance-based techniques generate a new model for each instance, instead of basing predictions on trees or networks generated (once) from a training set.

[0134] The term “instance”, in the context of machine learning, refers to an example from a dataset.

[0135] Instance-based techniques typically store the entire dataset in memory and build a model from a set of records similar to those being tested. This similarity can be evaluated, for example, through nearest-neighbor or locally weighted methods, e.g., using Euclidian distances. Once a set of records is selected, the final model may be built using several different techniques, such as the naive Bayes.

[0136] Neural networks are a class of algorithms based on a concept of inter-connected “neurons.” In a typical neural network, neurons contain data values, each of which affects the value of a connected neuron according to connections with pre-defined strengths, and whether the sum of connections to each particular neuron meets a pre-defined threshold. By determining proper connection strengths and threshold values (a process also referred to as training), a neural network can achieve efficient recognition of images and characters. Oftentimes, these neurons are grouped into layers in order to make connections between groups more obvious and to each computation of values. Each layer of the network may have differing numbers of neurons, and these may or may not be related to particular qualities of the input data.

[0137] In one implementation, called a fully-connected neural network, each of the neurons in a particular layer is connected to and provides input value to those in the next layer. These input values are then summed and this sum compared to a bias, or threshold. If the value exceeds the threshold for a particular neuron, that neuron then holds a positive value which can be used as input to neurons in the next layer of neurons. This computation continues through the various layers of the neural network, until it reaches a final layer. At this point, the output of the neural network routine can be read from the values in the final layer. Unlike fully-connected neural networks, convolutional neural networks operate by associating an array of values with each neuron, rather than a single value. The transformation of a neuron value for the subsequent layer is generalized from multiplication to convolution.

[0138] The machine learning procedure used according to some embodiments of the present invention is a trained machine learning procedure. A machine learning procedure can be trained according to some embodiments of the present invention by feeding a machine learning training program with microbiome data of a cohort of subjects from which the quantities of the metabolite have been determined by blood tests. Once the data are fed, the machine learning training program generates a trained machine learning procedure of a selected type which can then be used without the need to re-train it.

[0139] For example, when it is desired to employ decision trees, machine learning training program learns the structure of each tree in a plurality of decision trees (e.g., how many nodes there are in each tree, and how these are connected to one another), and also selects the decision rules for split nodes of each tree. At least a portion of the decision rules relate to one or more microbes in the microbiome. A simple decision rule may be a threshold for the amount of a particular microbes, but more complex rules, relating to more than one microbes are also contemplated. The machine learning training program also accumulates data at the leaves of the trees. The structures of the trees, the decision rules for the split nodes, and the data at the leaves are all selected by the machine learning training program, automatically and typically without user intervention, such that the microbiome data at the root of the trees provide the quantities of the metabolite as determined by blood tests at the leaves of the trees. The final result of the machine learning training program in this case is a set of trees for each metabolite, where the structures, the decision rules for split nodes, and leaf data for each trees are defined by the machine learning training program.

[0140] The Examples section that follows describes machine learning training that was used to generate a set of trees for each of a plurality of metabolite, using training data including metabolite quantities and microbiome data collected from a cohort of about 500 subjects.

[0141] While the embodiments below are described with a particular emphasis to decision trees, it is to be understood that other types of machine learning procedures can be employed. The skilled person, provided with training data and the description provided herein would know how to train a different type of machine learning procedure to predict the quantity of the metabolite one fed by a plurality of microbes of the microbiome of the subject.

[0142] A schematic illustration of the analysis technique according to some embodiments of the present invention is illustrated in FIG. 11. Shown in FIG. 11 is a computer readable medium 110 storing a library of trained machine learning (ML) procedures. Shown are N machine learning (ML) procedures. Typically, each trained machine learning procedures being associated with a different metabolite. Thus, for example, the library can include a machine learning procedure for each of the aforementioned metabolites (in which case N equals the number of the aforementioned metabolites), or a machine learning procedure for each of the metabolites set forth in Table 1 (in which case N equals the number of the metabolites set forth in Table 1), or a machine learning procedure for each of the metabolites set forth in Table 2 (in which case N equals the number of the metabolites set forth in Table 2). Also contemplated are embodiments in which the library includes a machine learning procedure for each of a subset of the aforementioned metabolites or of the metabolites in set forth Table 1, or of the metabolites in set forth Table 2.

[0143] The library is accessed and searched for a trained machine learning procedure associated with the metabolite. FIG. 12 illustrates a machine learning procedure 112 which is the Kth (1≤K≤N) procedure in the library, and which is associated with the metabolite of which the quantity in the blood of the subject is to be predicted. The selected trained procedure 112 is fed with the amount of the microbes, and provides an output indicative of the quantity of the metabolite in the blood.

[0144] When machine learning procedure 112 includes a set of decision trees, each of the trees receives amounts of microbes, processes these amounts by the split node decision rules that were defined during the training phase, and provides output values in accordance with the data at the leaves that were also defined during the training phase. The output of all trees is optionally and preferably combined (e.g., summed) to provide the quantity of the respective metabolite.

[0145] Preferably, the number of trees in the set is at least 1000 or at least 2000 or more. It was found by the inventors that the microbes listed in Table 1 dominate the predicting ability of the decision trees. Thus, in some embodiments of the present invention the number of decision rules relating to microbes listed in Table 1 for the respective metabolite is larger than the number of decision rules relating to other microbes of the microbiome.

[0146] According to another aspect of the present invention, there is provided a method of predicting the quantity of a metabolite set forth in Table 1, comprising analyzing the amount of each of the corresponding microbes set forth in Table 1 in the fecal microbiome of the subject, wherein the predicting does not comprise analyzing more than 50 microbes, thereby predicting the quantity of the metabolite in the blood.

[0147] Table 1 provides the top five microbes whose abundance should be analyzed in order to predict the quantity of that metabolite.

[0148] It will be appreciated that in some cases, additional microbes may be analyzed for each metabolite such that a level of confidence is reached such that the outputted quantities are of clinical relevance e.g. a confidence level of at least 90% and more preferably at least 95%.

[0149] As well as using microbial levels to predict the quantity of a blood metabolite, the present inventors further propose using dietary data of the subjects as a proxy for predicting the quantity of a blood metabolite.

[0150] Thus, according to another aspect of the present invention there is provided a method of predicting the quantity of a metabolite in the blood of a subject that consumes a diet of a plurality of food types, the method comprising analyzing the frequency of consumption of at least 5 of said food types over at least one month and/or the daily mean consumption of at least 5 of said food types, wherein said frequency and/or said daily mean consumption is predicative, within a confidence level of at least 95% in the significance of the predictions, of the quantity of the metabolite in the blood of the subject consuming said diet.

[0151] It will be appreciated that for this aspect of the present invention, the level of a particular metabolite can be predicted in a subject so long as he/she has not significantly changed his/her dietary habits at the time of prediction.

[0152] The term “food type” as used herein refers to either a general classification of a food or a particular food product.

[0153] In some embodiments of the present invention the food is a food product (e.g., a specific food product marketed as such by a specific manufacturer, or by two or more manufacturers manufacturing the same food product). In some embodiments of the present invention the food is a food type (e.g., a food which exhibit different modifications, for example, white rice, that may have different species, all of which are referred to as “white rice”, or whole wheat bread that may be backed from various mixtures, etc). In some embodiments of the present invention the food is a family of food types. The family can be categorized according to the main ingredient of the food type, for example, sweets, dairies, fruits, herbs, vegetables, fish, meet, etc. In some embodiments of the present invention the family of food types is a food group, such as, but not limited to, carbohydrates, which is a family encompassing food types rich in carbohydrates, proteins, which is a family encompassing food types rich in protein, and fats, which is a family encompassing food types rich in fats, minerals which is a family encompassing food types rich in minerals, vitamins which is a family encompassing food types rich in vitamins, etc. In some embodiments of the present invention the food is a food combination which comprises a plurality of different food products, and/or different food types and/or different food families. Such a combination is referred to as “a complex meal.” The complex meal can be provided as a list of the food products, food types and/or families of food types that form the combination. The list may or may not include the particular amount of each food product, food type and/or family of food types in the combination.

[0154] Depending on the particular metabolite being predicted, only the long-term consumption (e.g. over the period of one month) of a particular food type is measured. In another embodiment, only the average daily consumption of a particular food type is measured for predicting the amount of particular metabolites. In other embodiments both the long-term consumption and the average daily consumption is measured.

[0155] The information about the subject's food consumption may be obtained by providing the subject with a food questionnaire. The questionnaire may be tailored according to the particular metabolite (or metabolites) which are being investigated. In a particular embodiment, a full survey is obtained from the subject in which the subject is asked to divulge a complete set of food intake per month/per day.

[0156] Irrespective of the level of detail the subject is asked to provide with respect to his/her food intake, at least 5 food types are used to predict the level of metabolite. In a particular embodiment, at least 10 food types are used to predict the level of metabolite, at least 15 food types are used to predict the level of metabolite, at least 20 food types are used to predict the level of metabolite, at least 25 food types are used to predict the level of metabolite, at least 30 food types are used to predict the level of metabolite, at least 4 food types are used to predict the level of metabolite, at least 50 food types are used to predict the level of metabolite, or even more than 50 food types are used to predict the level of metabolite. In one embodiment, no more than 50, 60, 70, 80, 90 or 100 food types are used to predict the quantity of a particular metabolite.

[0157] The number of food types that are used in the prediction are also dependent on the level of confidence required in the prediction. According to a particular embodiment, the level of confidence is such that the predicted level is clinically relevant. In one embodiment, the prediction is within a confidence level of at least 90%. In another embodiment, the prediction is within a confidence level of at least 95%.

[0158] Table 3 herein below, provides exemplary food types that can used to predict particular metabolites.

TABLE 3

| | Top | Directional | Top | Directional | Top | Directional |
|---|---|---|---|---|---|---|
| | predictor | SHAP value | predictor | SHAP value | predictor | SHAP value |
| BIOCHEMICAL | #1 | #1 | #2 | #2 | #3 | #3 |
| X - 16124 | (14816) F: | 0.731921 | (14764) U: | 0.124282 | (14815) F: | 0.120698 |
| | Eggerthellaceae | | Unknown | | Eggerthellaceae | |
| X - 11850 | (14306) S: | 0.377657 | (3926) U: | 0.109301 | (14924) S: | 0.096641 |
| | Clostridium sp | | Unknown | | Firmicutes | |
| | CAG 138 | | | | bacterium | |
| | | | | | CAG 137 | |
| X - 11843 | (14306) S: | 0.354303 | (14924) S: | 0.127773 | (3926) U: | 0.1236 |
| | Clostridium sp | | Firmicutes | | Unknown | |
| | CAG 138 | | bacterium | | | |
| | | | CAG 137 | | | |
| X - 12261 | (3926) U: | 0.165364 | (14306) S: | 0.160851 | (14311) F: | 0.050686 |
| | Unknown | | Clostridium sp | | Clostridiaceae | |
| | | | CAG 138 | | | |
| X - 12013 | (14306) S: | 0.302711 | (3926) U: | 0.138182 | (14924) S: | 0.076535 |
| | Clostridium sp | | Unknown | | Firmicutes | |
| | CAG 138 | | | | bacterium | |
| | | | | | CAG 137 | |
| p-cresol- | (14306) S: | 0.169906 | (15271) S: | 0.110439 | (2328) F: | 0.089761 |
| glucuronide* | Clostridium sp | | Ruthenibacterium | | Rikenellaceae | |
| | CAG 138 | | lactatiformans | | | |
| phenylacetylglutamine | (4951) S: | −0.07214 | (3957) F: | 0.067863 | (15369) S: | 0.048009 |
| | Roseburia | | Lachnospiraceae | | Faecalibacterium sp | |
| | intestinalis | | | | CAG 74 | |
| p-cresol sulfate | (15271) S: | 0.131445 | (14306) S: | 0.092024 | (15236) G: | 0.069206 |
| | Ruthenibacterium | | Clostridium sp | | Firmicutes | |
| | lactatiformans | | CAG 138 | | unclassified | |
| phenylacetate | (3957) F: | 0.083075 | (14306) S: | 0.081132 | (15236) G: | 0.054952 |
| | Lachnospiraceae | | Clostridium sp | | Firmicutes | |
| | | | CAG 138 | | unclassified | |
| X - 12816 | (14921) U: | 0.34516 | (15154) F: | 0.256765 | (15085) F: | 0.075267 |
| | Unknown | | Clostridiales | | Clostridiales | |
| | | | unclassified | | unclassified | |
| quinate | (15154) F: | 0.32007 | (14322) S: | 0.119716 | (4537) S: | −0.06657 |
| | Clostridiales | | Eggerthella sp | | Eubacterium | |
| | unclassified | | CAG 209 | | hallii | |
| 1-methylurate | (15154) F: | 0.354954 | (14921) U: | 0.157361 | (4581) S: | 0.092513 |
| | Clostridiales | | Unknown | | Dorea | |
| | unclassified | | | | longicatena | |
| X - 24811 | (15154) F: | 0.486675 | (14322) S: | 0.13517 | (14921) U: | 0.096585 |
| | Clostridiales | | Eggerthella sp | | Unknown | |
| | unclassified | | CAG 209 | | | |
| 5-acetylamino- | (15154) F: | 0.384464 | (14921) U: | 0.118517 | (4537) S: | −0.07535 |
| 6-amino-3- | Clostridiales | | Unknown | | Eubacterium | |
| methyluracil | unclassified | | | | hallii | |
| 1- | (15154) F: | 0.409986 | (14921) U: | 0.097051 | (4581) S: | 0.072722 |
| methylxanthine | Clostridiales | | Unknown | | Dorea | |
| | unclassified | | | | longicatena | |
| 1,7- | (15154) F: | 0.379716 | (14921) U: | 0.103533 | (4537) S: | −0.07348 |
| dimethylurate | Clostridiales | | Unknown | | Eubacterium | |
| | unclassified | | | | hallii | |
| cinnamoylglycine | (15236) G: | 0.09571 | (15216) F: | 0.071199 | (6140) S: | −0.0711 |
| | Firmicutes | | Clostridiales | | Intestinibacter | |
| | unclassified | | unclassified | | bartlettii | |
| X - 12126 | (15369) S: | 0.116283 | (15234) S: | 0.067535 | (6140) S: | −0.06194 |
| | Faecalibacterium | | Firmicutes | | Intestinibacter | |
| | sp CAG 74 | | bacterium | | bartlettii | |
| | | | CAG 124 | | | |
| 1,3- | (15154) F: | 0.43238 | (14921) U: | 0.085018 | (1861) S: | −0.07465 |
| dimethylurate | Clostridiales | | Unknown | | Bacteroides | |
| | unclassified | | | | thetaiotaomicron | |
| theophylline | (15154) F: | 0.351395 | (14921) U: | 0.105075 | (4537) S: | −0.07713 |
| | Clostridiales | | Unknown | | Eubacterium | |
| | unclassified | | | | hallii | |
| paraxanthine | (15154) F: | 0.48002 | (14322) S: | 0.142044 | (14921) U: | 0.139775 |
| | Clostridiales | | Eggerthella sp | | Unknown | |
| | unclassified | | CAG 209 | | | |
| X - 21442 | (15154) F: | 0.325318 | (14921) U: | 0.149762 | (15295) G: | 0.075169 |
| | Clostridiales | | Unknown | | Gemmiger | |
| | unclassified | | | | | |
| 1,3,7- | (15154) F: | 0.332818 | (14921) U: | 0.100008 | (4537) S: | −0.08922 |
| trimethylurate | Clostridiales | | Unknown | | Eubacterium | |
| | unclassified | | | | hallii | |
| X - 12851 | (4782) U: | 0.141919 | (15346) G: | −0.05185 | (5792) S: | 0.05115 |
| | Unknown | | Faecalibacterium | | Phascolarctobacterium | |
| | | | | | sp CAG | |
| | | | | | 207 | |
| caffeine | (15154) F: | 0.247432 | (4537) S: | −0.08898 | (4960) G: | −0.07476 |
| | Clostridiales | | Eubacterium | | Eubacterium | |
| | unclassified | | hallii | | | |
| X - 12216 | (15369) S: | 0.081022 | (15031) S: | 0.075632 | (3957) F: | 0.060757 |
| | Faecalibacterium | | Firmicutes | | Lachnospiraceae | |
| | sp CAG 74 | | bacterium | | | |
| | | | CAG 110 | | | |
| N-acetyl- | (5843) S: | 0.339842 | (17249) S: | 0.055673 | (15089) S: | 0.042223 |
| cadaverine | Allisonella | | Bifidobacterium | | Firmicutes | |
| | histaminiformans | | longum | | bacterium | |
| | | | | | CAG 83 | |
| 3- | (15236) G: | 0.061088 | (15216) F: | 0.05498 | (15081) F: | 0.042382 |
| phenylpropionate | Firmicutes | | Clostridiales | | Clostridiales | |
| (hydrocinnamate) | unclassified | | unclassified | | unclassified | |
| glycolithocholate | (4552) S: | 0.113145 | (15216) F: | 0.077314 | (4584) S: | −0.06418 |
| sulfate* | Ruminococcus | | Clostridiales | | Ruminococcus | |
| | sp | | unclassified | | gnavus | |
| phenylacetylcarnitine | (14306) S: | 0.10229 | (15356) U: | 0.078615 | (6753) G: | −0.07861 |
| | Clostridium sp | | Unknown | | Clostridium | |
| | CAG 138 | | | | | |
| isoursodeoxycholate | (15265) S: | −0.07283 | (15090) S: | −0.06502 | (15236) G: | −0.06195 |
| | Firmicutes | | Oscillibacter | | Firmicutes | |
| | bacterium | | sp CAG 241 | | unclassified | |
| | CAG 103 | | | | | |
| X - 12837 | (15154) F: | 0.178333 | (6359) F: | 0.162766 | (15106) S: | 0.082873 |
| | Clostridiales | | Clostridiaceae | | Firmicutes | |
| | unclassified | | | | bacterium | |
| | | | | | CAG 176 | |
| X - 24410 | (15119) F: | −0.20813 | (1867) S: | −0.08056 | (1857) S: | −0.05901 |
| | Clostridiales | | Bacteroides | | Bacteroides | |
| | unclassified | | xylanisolvens | | salyersiae | |
| 5alpha- | (14311) F: | 0.099953 | (15244) F: | 0.05353 | (15356) U: | 0.05228 |
| androstan- | Clostridiaceae | | Clostridiales | | Unknown | |
| 3beta,17alpha- | | | unclassified | | | |
| diol disulfate | | | | | | |
| X - 21821 | (4564) S: | −0.06798 | (4940) S: | −0.05164 | (15225) F: | 0.051026 |
| | Ruminococcus | | Roseburia | | Clostridiales | |
| | torques | | inulinivorans | | unclassified | |
| 3-methyl | (15154) F: | 0.195565 | (14861) U: | 0.111519 | (4537) S: | −0.08036 |
| catechol | Clostridiales | | Unknown | | Eubacterium | |
| sulfate (1) | unclassified | | | | hallii | |
| X - 17612 | (3957) F: | 0.086058 | (4940) S: | −0.07886 | (4964) F: | 0.074335 |
| | Lachnospiraceae | | Roseburia | | Eubacteriaceae | |
| | | | inulinivorans | | | |
| 3- | (15154) F: | 0.158727 | (14861) U: | 0.132339 | (4537) S: | −0.06078 |
| hydroxypyridine | Clostridiales | | Unknown | | Eubacterium | |
| sulfate | unclassified | | | | hallii | |
| X - 23655 | (15154) F: | 0.266598 | (14861) U: | 0.135836 | (4961) G: | 0.086895 |
| | Clostridiales | | Unknown | | Eubacterium | |
| | unclassified | | | | | |
| X - 17351 | (4564) S: | −0.08581 | (4940) S: | −0.05069 | (4540) S: | 0.046133 |
| | Ruminococcus | | Roseburia | | Anaerostipes | |
| | torques | | inulinivorans | | hadrus | |
| X - 23997 | (15356) U: | 0.109761 | (15271) S: | 0.097158 | (4951) S: | −0.08016 |
| | Unknown | | Ruthenibacterium | | Roseburia | |
| | | | lactatiformans | | intestinalis | |
| 4- | (14861) U: | 0.13518 | (15154) F: | 0.126693 | (4537) S: | −0.05277 |
| ethylcatechol | Unknown | | Clostridiales | | Eubacterium | |
| sulfate | | | unclassified | | hallii | |
| X - 13729 | (5190) S: | 0.149036 | (3957) F: | 0.116266 | (4571) S: | 0.040898 |
| | Firmicutes | | Lachnospiraceae | | Dorea sp | |
| | bacterium | | | | CAG 105 | |
| | CAG 102 | | | | | |
| ursodeoxycholate | (6148) F: | 0.133438 | (6140) S: | 0.100249 | (4964) F: | −0.09912 |
| | Peptostrep- | | Intestinibacter | | Eubacteriaceae | |
| | tococcaceae | | bartlettii | | | |
| taurolithocholate | (15216) F: | 0.082625 | (14861) U: | 0.050683 | (15356) U: | 0.046204 |
| 3-sulfate | Clostridiales | | Unknown | | Unknown | |
| | unclassified | | | | | |
| X - 17469 | (4552) S: | 0.067777 | (15265) S: | 0.054965 | (4964) F: | 0.054616 |
| | Ruminococcus | | Firmicutes | | Eubacteriaceae | |
| | sp | | bacterium | | | |
| | | | CAG 103 | | | |
| X - 23649 | (15154) F: | 0.214755 | (14861) U: | 0.163407 | (4961) G: | 0.139405 |
| | Clostridiales | | Unknown | | Eubacterium | |
| | unclassified | | | | | |
| 4- | (14397) S: | 0.210295 | (3957) F: | 0.034038 | (15124) F: | 0.028421 |
| methylcatechol | Collinsella sp | | Lachnospiraceae | | Clostridiales | |
| sulfate | CAG 289 | | | | unclassified | |
| indolepropionate | (4810) S: | 0.090297 | (14861) U: | 0.054396 | (4711) F: | 0.049274 |
| | Blautia sp | | Unknown | | Clostridiaceae | |
| | CAG 237 | | | | | |
| citraconate/ | (15154) F: | 0.126893 | (14861) U: | 0.082607 | (4961) G: | 0.078733 |
| glutaconate | Clostridiales | | Unknown | | Eubacterium | |
| | unclassified | | | | | |
| X - 21752 | (6358) S: | 0.070757 | (14311) F: | 0.067583 | (4395) U: | 0.051457 |
| | Clostridium sp | | Clostridiaceae | | Unknown | |
| | CAG 440 | | | | | |
| X - 24243 | (15119) F: | −0.22517 | (4925) S: | 0.057446 | (4771) G: | −0.05377 |
| | Clostridiales | | Roseburia | | Clostridium | |
| | unclassified | | faecis | | | |
| 1-(1-enyl- | (4577) S: | 0.150485 | (6148) F: | 0.074767 | (4960) G: | −0.06689 |
| palmitoyl)-2- | Coprococcus | | Peptostrep- | | Eubacterium | |
| arachidonoyl- | comes | | tococcaceae | | | |
| GPE | | | | | | |
| (P-16:0/20:4)* | | | | | | |
| 5alpha- | (4581) S: | 0.141547 | (4779) S: | 0.105521 | (15120) S: | −0.0944 |
| androstan- | Dorea | | Clostridium sp | | Firmicutes | |
| 3alpha,17beta- | longicatena | | | | bacterium | |
| diol | | | | | CAG 114 | |
| monosulfate | | | | | | |
| (2) | | | | | | |
| hippurate | (14322) S: | 0.086846 | (14861) U: | 0.065422 | (14921) U: | 0.040347 |
| | Eggerthella sp | | Unknown | | Unknown | |
| | CAG 209 | | | | | |
| 5- | (15041) F: | 0.287227 | (15356) U: | 0.110162 | (15042) F: | 0.076708 |
| hydroxyhexanoate | Clostridiales | | Unknown | | Clostridiales | |
| | unclassified | | | | unclassified | |
| indolin-2-one | (3957) F: | 0.085644 | (5190) S: | 0.062315 | (15054) F: | 0.061201 |
| | Lachnospiraceae | | Firmicutes | | Clostridiales | |
| | | | bacterium | | unclassified | |
| | | | CAG 102 | | | |
| X - 17145 | (4564) S: | −0.06692 | (4951) S: | −0.06218 | (15225) F: | 0.051982 |
| | Ruminococcus | | Roseburia | | Clostridiales | |
| | torques | | intestinalis | | unclassified | |
| 2,3- | (15154) F: | 0.289624 | (4537) S: | −0.126 | (14924) S: | −0.1156 |
| dihydroxypyridine | Clostridiales | | Eubacterium | | Firmicutes | |
| | unclassified | | hallii | | bacterium | |
| | | | | | CAG 137 | |
| X - 17354 | (15369) S: | 0.100784 | (4782) U: | 0.089582 | (3940) U: | 0.060603 |
| | Faecalibacterium | | Unknown | | Unknown | |
| | sp CAG 74 | | | | | |
| glycodeoxycholate | (4705) S: | 0.197631 | (4749) S: | 0.173623 | (3957) F: | 0.094735 |
| | Clostridium sp | | Clostridium sp | | Lachnospiraceae | |
| | CAG 43 | | CAG 7 | | | |
| X - 23639 | (15154) F: | 0.162241 | (4714) S: | 0.076215 | (4577) S: | −0.05028 |
| | Clostridiales | | Clostridium sp | | Coprococcus | |
| | unclassified | | | | comes | |
| 6- | (3957) F: | 0.140853 | (5190) S: | 0.077382 | (4581) S: | 0.036247 |
| hydroxyindole | Lachnospiraceae | | Firmicutes | | Dorea | |
| sulfate | | | bacterium | | longicatena | |
| | | | CAG 102 | | | |
| X - 12306 | (4810) S: | 0.135685 | (4960) G: | 0.064322 | (6376) F: | 0.05012 |
| | Blautia sp | | Eubacterium | | Clostridiaceae | |
| | CAG 237 | | | | | |
| phenol sulfate | (4749) S: | 0.062555 | (4788) S: | 0.039635 | (4575) S: | 0.039561 |
| | Clostridium sp | | Firmicutes | | Dorea | |
| | CAG 7 | | bacterium | | formicigenerans | |
| | | | CAG 227 | | | |
| 5-acetylamino- | (15154) F: | 0.299558 | (14322) S: | 0.082648 | (4810) S: | −0.06078 |
| 6-formylamino- | Clostridiales | | Eggerthella sp | | Blautia sp | |
| 3-methyluracil | unclassified | | CAG 209 | | CAG 237 | |
| 1,5- | (15342) S: | 0.096092 | (15154) F: | −0.05172 | (4816) S: | −0.05113 |
| anhydroglucitol | Faecalibacterium | | Clostridiales | | Blautia sp | |
| (1,5-AG) | prausnitzii | | unclassified | | | |
| N- | (4581) S: | 0.086095 | (15216) F: | −0.05304 | (6750) S: | 0.052829 |
| acetylcarnosine | Dorea | | Clostridiales | | Clostridium | |
| | longicatena | | unclassified | | sp | |
| 3-indoxyl | (3957) F: | 0.108384 | (5190) S: | 0.079725 | (4581) S: | 0.042161 |
| sulfate | Lachnospiraceae | | Firmicutes | | Dorea | |
| | | | bacterium | | longicatena | |
| | | | CAG 102 | | | |
| maleate | (14861) U: | 0.080097 | (4961) G: | 0.068112 | (15154) F: | 0.063772 |
| | Unknown | | Eubacterium | | Clostridiales | |
| | | | | | unclassified | |
| L-urobilin | (4425) S: | 0.076548 | (3940) U: | 0.056758 | (15265) S: | 0.051089 |
| | Ruminococcus | | Unknown | | Firmicutes | |
| | sp CAG 254 | | | | bacterium | |
| | | | | | CAG 103 | |
| X - 21286 | (15054) F: | 0.058079 | (4749) S: | −0.05542 | (14252) U: | 0.046933 |
| | Clostridiales | | Clostridium sp | | Unknown | |
| | unclassified | | CAG 7 | | | |
| X - 12718 | (15054) F: | 0.087109 | (3957) F: | 0.056475 | (15089) S: | 0.056144 |
| | Clostridiales | | Lachnospiraceae | | Firmicutes | |
| | unclassified | | | | bacterium | |
| | | | | | CAG 83 | |
| carotene diol | (4810) S: | 0.082594 | (4816) S: | 0.080074 | (4714) S: | 0.062624 |
| (2) | Blautia sp | | Blautia sp | | Clostridium | |
| | CAG 237 | | | | sp | |
| X - 21310 | (3957) F: | 0.104323 | (5190) S: | 0.057593 | (6367) F: | −0.04338 |
| | Lachnospiraceae | | Firmicutes | | Clostridiaceae | |
| | | | bacterium | | | |
| | | | CAG 102 | | | |
| X - 14662 | (6148) F: | 0.055765 | (6140) S: | 0.041721 | (6139) G: | 0.04016 |
| | Peptostrep- | | Intestinibacter | | Intestinibacter | |
| | tococcaceae | | bartlettii | | | |
| glycoursodeoxycholate | (6140) S: | 0.077726 | (15054) F: | −0.05732 | (2325) S: | −0.05048 |
| | Intestinibacter | | Clostridiales | | Alistipes | |
| | bartlettii | | unclassified | | indistinctus | |
| X - 12283 | (4564) S: | −0.08204 | (4608) S: | −0.04699 | (6148) F: | −0.04697 |
| | Ruminococcus | | Ruminococcus | | Peptostrep- | |
| | torques | | torques | | tococcaceae | |
| X - 11315 | (4714) S: | 0.070728 | (4826) S: | −0.04857 | (4810) S: | 0.048092 |
| | Clostridium sp | | Blautia sp | | Blautia sp | |
| | | | | | CAG 237 | |
| trigonelline | (15154) F: | 0.211621 | (14322) S: | 0.083329 | (4961) G: | 0.055074 |
| (N′- | Clostridiales | | Eggerthella sp | | Eubacterium | |
| methylnicotinate) | unclassified | | CAG 209 | | | |
| X - 16654 | (4705) S: | 0.209353 | (4749) S: | 0.121907 | (6962) S: | 0.042728 |
| | Clostridium sp | | Clostridium sp | | Megamonas | |
| | CAG 43 | | CAG 7 | | funiformis | |
| X - 22162 | (15225) F: | 0.080695 | (4867) S: | 0.071521 | (15089) S: | 0.051304 |
| | Clostridiales | | Roseburia sp | | Firmicutes | |
| | unclassified | | CAG 471 | | bacterium | |
| | | | | | CAG 83 | |
| X - 12329 | (14861) U: | 0.108962 | (15154) F: | 0.088758 | (15073) G: | 0.077389 |
| | Unknown | | Clostridiales | | Oscillibacter | |
| | | | unclassified | | | |
| ergothioneine | (4816) S: | 0.062162 | (14991) F: | 0.056879 | (5087) S: | 0.054452 |
| | Blautia sp | | Clostridiaceae | | Eubacterium | |
| | | | | | sp CAG | |
| | | | | | 86 | |
| anthranilate | (3957) F: | 0.097675 | (15369) S: | 0.068549 | (5190) S: | 0.065016 |
| | Lachnospiraceae | | Faecalibacterium | | Firmicutes | |
| | | | sp CAG 74 | | bacterium | |
| | | | | | CAG 102 | |
| cholate | (6148) F: | 0.141591 | (4914) S: | −0.06003 | (6141) F: | 0.055909 |
| | Peptostrep- | | Clostridium sp | | Peptostrep- | |
| | tococcaceae | | | | tococcaceae | |
| 4- | (15369) S: | 0.082561 | (4782) U: | 0.082151 | (2295) S: | 0.058974 |
| hydroxycoumarin | Faecalibacterium | | Unknown | | Alistipes | |
| | sp CAG 74 | | | | shahii | |
| X - 11880 | (17244) S: | 0.125349 | (4940) S: | 0.052936 | (4540) S: | −0.0492 |
| | Bifidobacterium | | Roseburia | | Anaerostipes | |
| | adolescentis | | inulinivorans | | hadrus | |
| X - 22509 | (4782) U: | 0.046536 | (15236) G: | 0.043619 | (4575) S: | −0.03925 |
| | Unknown | | Firmicutes | | Dorea | |
| | | | unclassified | | formicigenerans | |
| 1-lignoceroyl- | (4828) S: | 0.084514 | (4750) G: | −0.05147 | (4705) S: | −0.04686 |
| GPC (24:0) | Blautia sp | | Clostridium | | Clostridium | |
| | | | | | sp CAG | |
| | | | | | 43 | |
| N2,N5- | (4933) S: | −0.06233 | (15132) S: | −0.06226 | (4750) G: | −0.0484 |
| diacetylornithine | Eubacterium | | Flavonifractor | | Clostridium | |
| | rectale | | plautii | | | |
| 3-methyl | (15073) G: | 0.085671 | (15295) G: | 0.082458 | (14861) U: | 0.080126 |
| catechol | Oscillibacter | | Gemmiger | | Unknown | |
| sulfate (2) | | | | | | |
| glutarate | (15119) F: | −0.129 | (4581) S: | 0.043202 | (15154) F: | 0.033058 |
| (pentanedioate) | Clostridiales | | Dorea | | Clostridiales | |
| | unclassified | | longicatena | | unclassified | |
| X - 18249 | (4960) G: | −0.12359 | (8002) S: | 0.08456 | (14861) U: | 0.069294 |
| | Eubacterium | | Streptococcus | | Unknown | |
| | | | thermophilus | | | |
| methyl | (4960) G: | 0.116849 | (4608) S: | −0.05795 | (4867) S: | 0.040669 |
| glucopyranoside | Eubacterium | | Ruminococcus | | Roseburia | |
| (alpha + | | | torques | | sp CAG | |
| beta) | | | | | 471 | |
| 7- | (3957) F: | −0.07918 | (15216) F: | −0.05296 | (17244) S: | 0.052885 |
| methylguanine | Lachnospiraceae | | Clostridiales | | Bifidobacterium | |
| | | | unclassified | | adolescentis | |
| X - 11308 | (4540) S: | −0.06723 | (5736) S: | 0.065334 | (4581) S: | 0.064426 |
| | Anaerostipes | | Acidaminococcus | | Dorea | |
| | hadrus | | intestini | | longicatena | |
| X - 12738 | (4537) S: | −0.09692 | (15073) G: | 0.078229 | (15295) G: | 0.069438 |
| | Eubacterium | | Oscillibacter | | Gemmiger | |
| | hallii | | | | | |
| gentisate | (4957) F: | 0.09566 | (15225) F: | 0.069217 | (4940) S: | −0.06788 |
| | Eubacteriaceae | | Clostridiales | | Roseburia | |
| | | | unclassified | | inulinivorans | |
| carotene diol | (4810) S: | 0.069944 | (15132) S: | −0.06279 | (4714) S: | 0.054082 |
| (1) | Blautia sp | | Flavonifractor | | Clostridium | |
| | CAG 237 | | plautii | | sp | |
| 5alpha- | (4779) S: | 0.12193 | (15120) S: | −0.09663 | (4581) S: | 0.095979 |
| androstan- | Clostridium sp | | Firmicutes | | Dorea | |
| 3alpha,17beta- | | | bacterium | | longicatena | |
| diol disulfate | | | CAG 114 | | | |
| X - 11372 | (17244) S: | 0.100328 | (5736) S: | 0.044797 | (4940) S: | 0.042096 |
| | Bifidobacterium | | Acidaminococcus | | Roseburia | |
| | adolescentis | | intestini | | inulinivorans | |
| X - 17185 | (15154) F: | 0.194347 | (14807) S: | −0.0697 | (1872) S: | −0.06057 |
| | Clostridiales | | Gordonibacter | | Bacteroides | |
| | unclassified | | pamelaeae | | ovatus | |
| X - 23652 | (4577) S: | 0.088679 | (4581) S: | 0.062406 | (6148) F: | 0.05654 |
| | Coprococcus | | Dorea | | Peptostrep- | |
| | comes | | longicatena | | tococcaceae | |
| X - 18240 | (15073) G: | 0.170823 | (1903) S: | 0.059164 | (13982) U: | 0.045312 |
| | Oscillibacter | | Bacteroides | | Unknown | |
| | | | plebeius CAG | | | |
| | | | 211 | | | |
| X - 18914 | (4960) G: | −0.14091 | (8002) S: | 0.133779 | (14921) U: | 0.061579 |
| | Eubacterium | | Streptococcus | | Unknown | |
| | | | thermophilus | | | |
| X - 22520 | (4705) S: | 0.130912 | (4575) S: | 0.070979 | (15265) S: | 0.05918 |
| | Clostridium sp | | Dorea | | Firmicutes | |
| | CAG 43 | | formicigenerans | | bacterium | |
| | | | | | CAG 103 | |
| 3-(3- | (15154) F: | 0.141603 | (15028) G: | −0.06131 | (17248) S: | 0.058498 |
| hydroxyphe- | Clostridiales | | Firmicutes | | Bifidobacterium | |
| nyl)propionate | unclassified | | unclassified | | longum | |
| dimethyl | (4652) S: | 0.064972 | (4940) S: | −0.04917 | (14921) U: | 0.046472 |
| sulfoxide | Clostridium sp | | Roseburia | | Unknown | |
| (DMSO) | CAG 75 | | inulinivorans | | | |
| threonate | (4714) S: | 0.070537 | (4705) S: | −0.0479 | (10068) S: | −0.04741 |
| | Clostridium sp | | Clostridium sp | | Escherichia | |
| | | | CAG 43 | | coli | |
| X - 12730 | (4537) S: | −0.10589 | (14861) U: | 0.086735 | (4961) G: | 0.065742 |
| | Eubacterium | | Unknown | | Eubacterium | |
| | hallii | | | | | |
| X - 19434 | (6148) F: | 0.189861 | (15154) F: | −0.0362 | (4839) G: | 0.033262 |
| | Peptostrep- | | Clostridiales | | Blautia | |
| | tococcaceae | | unclassified | | | |
| X - 24948 | (4940) S: | 0.050366 | (8002) S: | −0.04688 | (4750) G: | 0.044448 |
| | Roseburia | | Streptococcus | | Clostridium | |
| | inulinivorans | | thermophilus | | | |
| 1-(1-enyl- | (4577) S: | 0.120768 | (6148) F: | 0.07976 | (5190) S: | 0.061221 |
| stearoyl)-2- | Coprococcus | | Peptostrep- | | Firmicutes | |
| arachidonoyl- | comes | | tococcaceae | | bacterium | |
| GPE | | | | | CAG 102 | |
| (P-18:0/20:4)* | | | | | | |
| X - 23659 | (4893) S: | 0.07246 | (4816) S: | 0.059256 | (4810) S: | 0.047963 |
| | Clostridium sp | | Blautia sp | | Blautia sp | |
| | | | | | CAG 237 | |
| 5alpha- | (15326) G: | 0.084106 | (4940) S: | 0.064928 | (3964) U: | −0.06018 |
| androstan- | Faecalibacterium | | Roseburia | | Unknown | |
| 3alpha,17alpha- | | | inulinivorans | | | |
| diol | | | | | | |
| monosulfate | | | | | | |
| X - 21339 | (17244) S: | 0.067938 | (4540) S: | −0.06656 | (3964) U: | −0.05966 |
| | Bifidobacterium | | Anaerostipes | | Unknown | |
| | adolescentis | | hadrus | | | |
| 4- | (15370) F: | 0.05494 | (14899) U: | 0.034552 | (4957) F: | 0.031231 |
| ethylphenylsulfate | Ruminococcaceae | | Unknown | | Eubacteriaceae | |
| gamma- | (15078) S: | −0.07302 | (4714) S: | −0.07004 | (4564) S: | 0.065122 |
| glutamylvaline | Oscillibacter | | Clostridium sp | | Ruminococcus | |
| | sp | | | | torques | |
| beta- | (4705) S: | −0.05634 | (15132) S: | −0.0536 | (4575) S: | −0.03664 |
| cryptoxanthin | Clostridium sp | | Flavonifractor | | Dorea | |
| | CAG 43 | | plautii | | formicigenerans | |
| sphingomyelin | (8002) S: | 0.10129 | (14921) U: | 0.052085 | (15271) S: | 0.041212 |
| (d18:1/14:0, | Streptococcus | | Unknown | | Ruthenibacterium | |
| d16:1/16:0)* | thermophilus | | | | lactatiformans | |
| X - 21736 | (4940) S: | 0.054973 | (14823) F: | 0.051274 | (17248) S: | −0.04421 |
| | Roseburia | | Eggerthellaceae | | Bifidobacterium | |
| | inulinivorans | | | | longum | |
| O-methylcatechol | (4537) S: | −0.09144 | (15154) F: | 0.073441 | (14322) S: | 0.057463 |
| sulfate | Eubacterium | | Clostridiales | | Eggerthella | |
| | hallii | | unclassified | | sp CAG | |
| | | | | | 209 | |
| N-(2- | (14861) U: | 0.071344 | (15154) F: | 0.068474 | (15295) G: | 0.066258 |
| furoyl)glycine | Unknown | | Clostridiales | | Gemmiger | |
| | | | unclassified | | | |
| sphingomyelin | (4714) S: | −0.05271 | (5736) S: | −0.05148 | (15373) F: | 0.050773 |
| (d17:2/16:0, | Clostridium sp | | Acidaminococcus | | Ruminococcaceae | |
| d18:2/15:0)* | | | intestini | | | |
| 3- | (4577) S: | 0.098923 | (6148) F: | 0.038941 | (5190) S: | 0.031545 |
| methylhistidine | Coprococcus | | Peptostrep- | | Firmicutes | |
| | comes | | tococcaceae | | bacterium | |
| | | | | | CAG 102 | |
| X - 13835 | (4577) S: | 0.129616 | (4581) S: | 0.086872 | (6148) F: | 0.083047 |
| | Coprococcus | | Dorea | | Peptostrep- | |
| | comes | | longicatena | | tococcaceae | |
| propionylcarnitine | (15286) F: | −0.0589 | (4575) S: | 0.056616 | (6179) G: | 0.05558 |
| (C3) | Ruminococcaceae | | Dorea | | Clostridium | |
| | | | formicigenerans | | | |
| 3- | (15154) F: | 0.097476 | (4537) S: | −0.04878 | (6359) F: | 0.042861 |
| hydroxyhippurate | Clostridiales | | Eubacterium | | Clostridiaceae | |
| | unclassified | | hallii | | | |
| X - 11640 | (4782) U: | 0.065486 | (2295) S: | 0.027253 | (15229) F: | 0.02622 |
| | Unknown | | Alistipes | | Clostridiales | |
| | | | shahii | | unclassified | |
| 3-acetylphenol | (4537) S: | −0.1503 | (4961) G: | 0.10868 | (4953) S: | −0.09756 |
| sulfate | Eubacterium | | Eubacterium | | Roseburia | |
| | hallii | | | | sp CAG | |
| | | | | | 182 | |
| myo-inositol | (3574) U: | 0.058789 | (17244) S: | −0.05649 | (6754) S: | 0.053803 |
| | Unknown | | Bifidobacterium | | Clostridium sp | |
| | | | adolescentis | | | |
| sphingomyelin | (15271) S: | 0.043125 | (4540) S: | 0.040324 | (5803) S: | −0.037 |
| (d18:2/23:1)* | Ruthenibacterium | | Anaerostipes | | Dialister sp | |
| | lactatiformans | | hadrus | | CAG 357 | |
| 2-naphthol | (15350) U: | 0.090311 | (14861) U: | 0.085983 | (15132) S: | 0.055031 |
| sulfate | Unknown | | Unknown | | Flavonifractor | |
| | | | | | plautii | |
| N-delta- | (5087) S: | 0.045935 | (4960) G: | 0.035767 | (9283) S: | 0.027156 |
| acetylornithine | Eubacterium | | Eubacterium | | Sutterella | |
| | sp CAG 86 | | | | wadsworthensis | |
| benzoylcarnitine* | (15081) F: | 0.071059 | (4648) G: | 0.049972 | (14322) S: | 0.048698 |
| | Clostridiales | | Roseburia | | Eggerthella | |
| | unclassified | | | | sp CAG | |
| | | | | | 209 | |
| X - 24473 | (4960) G: | 0.085911 | (4714) S: | 0.069271 | (4269) S: | 0.050226 |
| | Eubacterium | | Clostridium sp | | Clostridium sp | |
| X - 11381 | (8002) S: | 0.055129 | (4714) S: | −0.04985 | (4960) G: | −0.04506 |
| | Streptococcus | | Clostridium sp | | Eubacterium | |
| | thermophilus | | | | | |
| X - 22834 | (4705) S: | 0.159163 | (4824) G: | 0.078445 | (1877) S: | −0.05965 |
| | Clostridium sp | | Blautia | | Bacteroides | |
| | CAG 43 | | | | caccae | |
| oxalate | (4705) S: | −0.06967 | (6754) S: | 0.06754 | (14909) S: | −0.05608 |
| (ethanedioate) | Clostridium sp | | Clostridium sp | | Clostridium | |
| | CAG 43 | | | | sp CAG | |
| | | | | | 169 | |
| alpha- | (4940) S: | 0.060534 | (4951) S: | 0.057954 | (1814) S: | 0.05535 |
| hydroxyisovalerate | Roseburia | | Roseburia | | Bacteroides | |
| | inulinivorans | | intestinalis | | vulgatus | |
| X - 24693 | (4581) S: | −0.05561 | (4810) S: | 0.051504 | (8002) S: | −0.04807 |
| | Dorea | | Blautia sp | | Streptococcus | |
| | longicatena | | CAG 237 | | thermophilus | |
| X - 24736 | (4960) G: | 0.128623 | (14991) F: | 0.089667 | (4810) S: | 0.08736 |
| | Eubacterium | | Clostridiaceae | | Blautia sp | |
| | | | | | CAG 237 | |
| 1H-indole-7- | (4804) S: | 0.076411 | (15225) F: | 0.073963 | (3952) U: | 0.062717 |
| acetic acid | Blautia sp | | Clostridiales | | Unknown | |
| | | | unclassified | | | |
| urate | (9226) S: | −0.04466 | (4540) S: | −0.04131 | (4705) S: | 0.038998 |
| | Akkermansia | | Anaerostipes | | Clostridium | |
| | muciniphila | | hadrus | | sp CAG | |
| | | | | | 43 | |
| taurodeoxycholate | (4705) S: | 0.117422 | (5785) S: | 0.05815 | (6148) F: | −0.05486 |
| | Clostridium sp | | Phascolarctobacterium | | Peptostrep- | |
| | CAG 43 | | sp | | tococcaceae | |
| | | | CAG 266 | | | |
| sphingomyelin | (15373) F: | 0.074581 | (4564) S: | −0.04682 | (5736) S: | −0.0443 |
| (d18:2/14:0, | Ruminococcaceae | | Ruminococcus | | Acidaminococcus | |
| d18:1/14:)* | | | torques | | intestini | |
| glycolithocholate | (6747) S: | −0.09414 | (4425) S: | 0.041059 | (4940) S: | −0.04097 |
| | Clostridium | | Ruminococcus | | Roseburia | |
| | spiroforme | | sp CAG 254 | | inulinivorans | |
| X - 15728 | (15322) S: | 0.063863 | (14311) F: | 0.042364 | (4957) F: | 0.041103 |
| | Faecalibacterium | | Clostridiaceae | | Eubacteriaceae | |
| | prausnitzii | | | | | |
| creatinine | (6750) S: | 0.092459 | (4581) S: | 0.058309 | (4820) S: | −0.04065 |
| | Clostridium sp | | Dorea | | Blautia sp | |
| | | | longicatena | | | |
| X - 15461 | (5843) S: | 0.121367 | (4581) S: | 0.071379 | (1872) S: | −0.03418 |
| | Allisonella | | Dorea | | Bacteroides | |
| | histaminiformans | | longicatena | | ovatus | |
| X - 12822 | (6796) G: | −0.15731 | (6806) S: | −0.08175 | (4871) S: | 0.04609 |
| | Holdemanella | | Holdemanella | | Ruminococcus | |
| | | | biformis | | sp | |
| 4-allylphenol | (6362) S: | −0.05081 | (4781) U: | 0.046877 | (4826) S: | −0.04474 |
| sulfate | Clostridium sp | | Unknown | | Blautia sp | |
| | CAG 343 | | | | | |
| X - 23782 | (14974) U: | 0.063947 | (15154) F: | 0.045085 | (14400) G: | −0.03917 |
| | Unknown | | Clostridiales | | Collinsella | |
| | | | unclassified | | | |
| X - 12212 | (9262) S: | −0.14662 | (4834) G: | 0.03958 | (4810) S: | 0.039211 |
| | Burkholderiales | | Blautia | | Blautia sp | |
| | bacterium | | | | CAG 237 | |
| | 1 1 47 | | | | | |
| tryptophan | (4564) S: | −0.04635 | (4714) S: | 0.039997 | (14861) U: | −0.03518 |
| betaine | Ruminococcus | | Clostridium sp | | Unknown | |
| | torques | | | | | |
| I-urobilinogen | (2318) S: | −0.04726 | (4198) S: | −0.04003 | (15249) S: | −0.03252 |
| | Alistipes | | Eubacterium | | Firmicutes | |
| | putredinis | | siraeum | | bacterium | |
| | | | | | CAG 129 | |
| sphingomyelin | (15154) F: | 0.047126 | (4714) S: | −0.04651 | (8002) S: | 0.033388 |
| (d18:1/19:0, | Clostridiales | | Clostridium sp | | Streptococcus | |
| d19:1/18:0)* | unclassified | | | | thermophilus | |
| 3-carboxy-4- | (4839) G: | 0.080966 | (4828) S: | 0.027953 | (17244) S: | −0.02581 |
| methyl-5- | Blautia | | Blautia sp | | Bifidobacterium | |
| pentyl-2- | | | | | adolescentis | |
| furanpropionate | | | | | | |
| (3-CMPFP)** | | | | | | |
| X - 16935 | (17244) S: | 0.083128 | (3964) U: | −0.0762 | (4581) S: | 0.054756 |
| | Bifidobacterium | | Unknown | | Dorea | |
| | adolescentis | | | | longicatena | |
| sphingomyelin | (14921) U: | 0.064692 | (4714) S: | −0.04131 | (15271) S: | 0.035821 |
| (d17:1/16:0, | Unknown | | Clostridium sp | | Ruthenibacterium | |
| d18:1/15:0, | | | | | lactatiformans | |
| d16:1/17:0)* | | | | | | |
| X - 21829 | (4940) S: | 0.088208 | (14823) F: | 0.058811 | (14993) S: | 0.043001 |
| | Roseburia | | Eggerthellaceae | | Butyricicoccus | |
| | inulinivorans | | | | sp | |
| cystine | (1836) S: | −0.08619 | (6796) G: | 0.046165 | (15216) F: | −0.02599 |
| | Bacteroides | | Holdemanella | | Clostridiales | |
| | uniformis | | | | unclassified | |
| X - 24475 | (4964) F: | 0.092409 | (4810) S: | 0.03616 | (4197) G: | 0.031048 |
| | Eubacteriaceae | | Blautia sp | | Ruminiclostridium | |
| | | | CAG 237 | | | |
| 1-stearoyl-2- | (1862) S: | 0.046774 | (15295) G: | 0.035784 | (4658) S: | 0.029873 |
| docosahexaenoyl-GPC | Bacteroides | | Gemmiger | | Clostridium | |
| (18:0/22:6) | finegoldii | | | | sp CAG | |
| | | | | | 253 | |
| X - 24951 | (4540) S: | −0.04655 | (4581) S: | 0.043836 | (17244) S: | 0.043256 |
| | Anaerostipes | | Dorea | | Bifidobacterium | |
| | hadrus | | longicatena | | adolescentis | |
| X - 24949 | (4936) S: | 0.071924 | (8002) S: | −0.05766 | (14861) U: | −0.05612 |
| | Roseburia | | Streptococcus | | Unknown | |
| | hominis | | thermophilus | | | |
| 2- | (3964) U: | −0.04587 | (4540) S: | −0.04577 | (17244) S: | 0.03493 |
| hydroxylaurate | Unknown | | Anaerostipes | | Bifidobacterium | |
| | | | hadrus | | adolescentis | |
| X - 12063 | (4705) S: | 0.107575 | (4644) S: | −0.06968 | (6376) F: | −0.05699 |
| | Clostridium sp | | Clostridium sp | | Clostridiaceae | |
| | CAG 43 | | CAG 62 | | | |
| 2-hydroxy-3- | (4940) S: | 0.052212 | (1814) S: | 0.035716 | (4564) S: | 0.027496 |
| methylvalerate | Roseburia | | Bacteroides | | Ruminococcus | |
| | inulinivorans | | vulgatus | | torques | |
| argininate* | (15132) S: | −0.06754 | (4953) S: | 0.063846 | (4811) S: | −0.05058 |
| | Flavonifractor | | Roseburia sp | | Blautia | |
| | plautii | | CAG 182 | | obeum | |
| indoleacetate | (3926) U: | 0.092723 | (14899) U: | 0.026394 | (4933) S: | −0.02197 |
| | Unknown | | Unknown | | Eubacterium | |
| | | | | | rectale | |
| ceramide | (8002) S: | 0.122669 | (15154) F: | 0.088126 | (15315) G: | −0.05644 |
| (d18:1/14:0, | Streptococcus | | Clostridiales | | Faecalibacterium | |
| d16:1/16:0)* | thermophilus | | unclassified | | | |
| 5alpha- | (15120) S: | −0.04398 | (4581) S: | 0.042816 | (4303) S: | 0.041358 |
| androstan- | Firmicutes | | Dorea | | Clostridium | |
| 3beta,17beta- | bacterium | | longicatena | | sp CAG | |
| diol disulfate | CAG 114 | | | | 217 | |
| citrulline | (4930) F: | 0.036932 | (5082) S: | −0.03622 | (15272) F: | −0.03503 |
| | Lachnospiraceae | | Eubacterium | | Ruminococcaceae | |
| | | | eligens | | | |
| 1-methyl-5- | (4577) S: | 0.100013 | (4581) S: | 0.05893 | (6148) F: | 0.044928 |
| imidazoleacetate | Coprococcus | | Dorea | | Peptostrep- | |
| | comes | | longicatena | | tococcaceae | |
| X - 12263 | (15154) F: | 0.115405 | (14322) S: | 0.06079 | (1872) S: | −0.05794 |
| | Clostridiales | | Eggerthella sp | | Bacteroides | |
| | unclassified | | CAG 209 | | ovatus | |
| taurodeoxycholic | (6148) F: | −0.0488 | (15143) S: | 0.046284 | (15078) S: | 0.034546 |
| acid 3- | Peptostrep- | | Flavonifractor | | Oscillibacter sp | |
| sulfate | tococcaceae | | sp | | | |
| X - 12543 | (15154) F: | 0.128502 | (15028) G: | −0.05789 | (4771) G: | −0.04424 |
| | Clostridiales | | Firmicutes | | Clostridium | |
| | unclassified | | unclassified | | | |
| sphingomyelin | (15154) F: | 0.047841 | (15373) F: | 0.045007 | (15271) S: | 0.043435 |
| (d18:2/21:0, | Clostridiales | | Ruminococcaceae | | Ruthenibacterium | |
| d16:2/23:0)* | unclassified | | | | lactatiformans | |
| N- | (6179) G: | 0.033585 | (2303) S: | 0.025064 | (6750) S: | 0.015072 |
| acetylmethionine | Clostridium | | Alistipes | | Clostridium sp | |
| | | | finegoldii | | | |
| X - 18901 | (15385) U: | 0.033368 | (4782) U: | 0.023265 | (6422) S: | 0.020133 |
| | Unknown | | Unknown | | Clostridium | |
| | | | | | sp CAG | |
| | | | | | 433 | |
| 1- | (15132) S: | 0.080403 | (5075) S: | 0.071374 | (15216) F: | −0.05975 |
| palmitoylglycerol | Flavonifractor | | Lachnospira | | Clostridiales | |
| (16:0) | plautii | | pectinoschiza | | unclassified | |
| X - 23587 | (4706) F: | 0.052422 | (15031) S: | −0.05126 | (6140) S: | −0.04005 |
| | Clostridiaceae | | Firmicutes | | Intestinibacter | |
| | | | bacterium | | bartlettii | |
| | | | CAG 110 | | | |
| androstenediol | (4581) S: | 0.039049 | (4940) S: | 0.036934 | (5736) S: | 0.027905 |
| (3beta,17beta) | Dorea | | Roseburia | | Acidaminococcus | |
| disulfate (2) | longicatena | | inulinivorans | | intestini | |
| tartronate | (4705) S: | −0.08833 | (6754) S: | 0.059431 | (3988) F: | −0.04224 |
| (hydroxymalonate) | Clostridium sp | | Clostridium sp | | Firmicutes | |
| | CAG 43 | | | | unclassified | |
| X - 24352 | (4964) F: | 0.064927 | (4953) S: | 0.043616 | (4269) S: | 0.03609 |
| | Eubacteriaceae | | Roseburia sp | | Clostridium sp | |
| | | | CAG 182 | | | |
| X - 23654 | (1812) S: | 0.086706 | (15286) F: | −0.08556 | (10068) S: | −0.04185 |
| | Bacteroides | | Ruminococcaceae | | Escherichia | |
| | massiliensis | | | | coli | |
| dihydrocaffeate | (15154) F: | 0.136675 | (15225) F: | −0.0452 | (4029) U: | 0.041803 |
| sulfate (2) | Clostridiales | | Clostridiales | | Unknown | |
| | unclassified | | unclassified | | | |
| sphingomyelin | (15154) F: | 0.054011 | (4714) S: | −0.05102 | (14921) U: | 0.039123 |
| (d18:1/17:0, | Clostridiales | | Clostridium sp | | Unknown | |
| d17:1/18:0, | unclassified | | | | | |
| d19:1/16:0) | | | | | | |
| 3-carboxy-4- | (15332) S: | 0.040653 | (17239) S: | −0.03551 | (4810) S: | 0.033552 |
| methyl-5- | Faecalibacterium | | Bifidobacterium | | Blautia sp | |
| propyl-2- | prausnitzii | | sp N4G05 | | CAG 237 | |
| furanpropanoate | | | | | | |
| (CMPF) | | | | | | |
| X - 18606 | (14991) F: | 0.075629 | (15216) F: | −0.03112 | (6174) S: | 0.029137 |
| | Clostridiaceae | | Clostridiales | | Clostridium | |
| | | | unclassified | | sp CAG | |
| | | | | | 265 | |
| 2,3-dihydroxy- | (4608) S: | −0.07499 | (4810) S: | 0.063775 | (4811) S: | −0.0333 |
| 2-methylbutyrate | Ruminococcus | | Blautia sp | | Blautia | |
| | torques | | CAG 237 | | obeum | |
| X - 12221 | (4960) G: | −0.08349 | (14861) U: | 0.058238 | (6173) S: | 0.052317 |
| | Eubacterium | | Unknown | | Clostridium | |
| | | | | | sp CAG | |
| | | | | | 221 | |
| X - 14082 | (4961) G: | 0.082112 | (15154) F: | 0.066348 | (14861) U: | 0.04638 |
| | Eubacterium | | Clostridiales | | Unknown | |
| | | | unclassified | | | |
| X - 13703 | (14322) S: | 0.05466 | (4961) G: | 0.046668 | (15073) G: | 0.041537 |
| | Eggerthella sp | | Eubacterium | | Oscillibacter | |
| | CAG 209 | | | | | |
| X - 17676 | (14861) U: | 0.11075 | (4537) S: | −0.07179 | (15154) F: | 0.065636 |
| | Unknown | | Eubacterium | | Clostridiales | |
| | | | hallii | | unclassified | |
| X - 24801 | (4705) S: | 0.054674 | (14894) S: | −0.02865 | (2303) S: | −0.0282 |
| | Clostridium sp | | Anaeromassili | | Alistipes | |
| | CAG 43 | | bacillus sp | | finegoldii | |
| | | | An250 | | | |
| N- | (4960) G: | 0.127868 | (4582) S: | −0.03177 | (4581) S: | 0.030253 |
| methylproline | Eubacterium | | Dorea | | Dorea | |
| | | | longicatena | | longicatena | |
| 1-(1-enyl- | (4577) S: | 0.092485 | (5190) S: | 0.068759 | (6148) F: | 0.040227 |
| palmitoyl)-2- | Coprococcus | | Firmicutes | | Peptostrep- | |
| linoleoyl-GPE | comes | | bacterium | | tococcaceae | |
| (P-16:0/18:2)* | | | CAG 102 | | | |
| sphingomyelin | (15373) F: | 0.049768 | (5736) S: | −0.04939 | (15266) G: | −0.04526 |
| (d18:2/23:0, | Ruminococcaceae | | Acidaminococcus | | Firmicutes | |
| d18:1/23:1, | | | intestini | | unclassified | |
| d17:1/24:1)* | | | | | | |
| eicosenedioate | (17244) S: | 0.04508 | (3964) U: | −0.03989 | (4540) S: | −0.03295 |
| (C20:1-DC)* | Bifidobacterium | | Unknown | | Anaerostipes | |
| | adolescentis | | | | hadrus | |
| picolinoylglycine | (8002) S: | 0.071639 | (6179) G: | 0.067192 | (4577) S: | 0.062939 |
| | Streptococcus | | Clostridium | | Coprococcus | |
| | thermophilus | | | | comes | |
| 5alpha- | (4940) S: | 0.067331 | (15326) G: | 0.041349 | (3964) U: | −0.03758 |
| androstan- | Roseburia | | Faecalibacterium | | Unknown | |
| 3alpha,17beta- | inulinivorans | | | | | |
| diol | | | | | | |
| monosulfate | | | | | | |
| (1) | | | | | | |
| S- | (15078) S: | −0.03677 | (5843) S: | −0.03242 | (14594) G: | −0.03007 |
| methylmethionine | Oscillibacter | | Allisonella | | Collinsella | |
| | sp | | histaminiformans | | | |
| glycocholate | (17237) S: | −0.06445 | (15164) F: | 0.060041 | (4782) U: | 0.055125 |
| glucuronide (1) | Bifidobacterium | | Clostridiales | | Unknown | |
| | pseudocatenulatum | | unclassified | | | |
| 1- | (1786) S: | 0.060988 | (15332) S: | 0.059863 | (3957) F: | −0.04925 |
| docosahexaenoylglycerol | Butyricimonas | | Faecalibacterium | | Lachnospiraceae | |
| (22:6) | synergistica | | prausnitzii | | | |
| dodecanedioate | (14921) U: | 0.054548 | (15395) U: | 0.039669 | (15132) S: | 0.034876 |
| | Unknown | | Unknown | | Flavonifractor | |
| | | | | | plautii | |
| androstenediol | (4940) S: | 0.058422 | (3964) U: | −0.0375 | (4564) S: | 0.033429 |
| (3beta,17beta) | Roseburia | | Unknown | | Ruminococcus | |
| monosulfate | inulinivorans | | | | torques | |
| (1) | | | | | | |
| X - 16087 | (4839) G: | 0.082987 | (14400) G: | −0.07288 | (15322) S: | 0.047156 |
| | Blautia | | Collinsella | | Faecalibacterium | |
| | | | | | prausnitzii | |
| S- | (4652) S: | 0.047736 | (6139) G: | 0.025248 | (4584) S: | −0.02511 |
| methylcysteine | Clostridium sp | | Intestinibacter | | Ruminococcus | |
| sulfoxide | CAG 75 | | | | gnavus | |
| X - 23314 | (4960) G: | 0.115378 | (15452) S: | −0.02867 | (4714) S: | 0.025175 |
| | Eubacterium | | Bilophila sp 4 | | Clostridium sp | |
| | | | 1 30 | | | |
| N1- | (4960) G: | −0.10761 | (4644) S: | −0.02687 | (1872) S: | −0.02297 |
| methylinosine | Eubacterium | | Clostridium sp | | Bacteroides | |
| | | | CAG 62 | | ovatus | |
| isobutyrylcarnitine | (9283) S: | −0.05323 | (15356) U: | 0.043612 | (4933) S: | −0.03785 |
| (C4) | Sutterella | | Unknown | | Eubacterium | |
| | wadsworthensis | | | | rectale | |
| X - 12830 | (4577) S: | 0.048621 | (15081) F: | 0.041164 | (15265) S: | 0.029408 |
| | Coprococcus | | Clostridiales | | Firmicutes | |
| | comes | | unclassified | | bacterium | |
| | | | | | CAG 103 | |
| pyroglutamine * | (5785) S: | −0.02204 | (5851) F: | 0.016558 | (15300) S: | 0.015461 |
| | Phascolarctobacterium | | Veillonellaceae | | Gemmiger | |
| | sp | | | | formicilis | |
| | CAG 266 | | | | | |
| X - 11491 | (6148) F: | 0.097771 | (1845) S: | −0.04456 | (9283) S: | −0.03993 |
| | Peptostrep- | | Bacteroides | | Sutterella | |
| | tococcaceae | | intestinalis | | wadsworthensis | |
| | | | CAG 315 | | | |
| N-palmitoyl- | (6140) S: | −0.05902 | (15154) F: | 0.057518 | (2303) S: | −0.04623 |
| sphingosine | Intestinibacter | | Clostridiales | | Alistipes | |
| (d18:1/16:0) | bartlettii | | unclassified | | finegoldii | |
| alpha- | (1814) S: | 0.032839 | (15390) U: | −0.02523 | (6148) F: | 0.024285 |
| hydroxyisocaproate | Bacteroides | | Unknown | | Peptostrep- | |
| | vulgatus | | | | tococcaceae | |
| X - 21410 | (15132) S: | 0.088736 | (1814) S: | 0.079056 | (15332) S: | 0.058448 |
| | Flavonifractor | | Bacteroides | | Faecalibacterium | |
| | plautii | | vulgatus | | prausnitzii | |
| nonadecanoate | (15073) G: | 0.043398 | (6338) F: | 0.028339 | (14974) U: | 0.027807 |
| (19:0) | Oscillibacter | | Clostridiaceae | | Unknown | |
| X - 11478 | (6148) F: | −0.0575 | (6367) F: | −0.03621 | (9226) S: | −0.03547 |
| | Peptostrep- | | Clostridiaceae | | Akkermansia | |
| | tococcaceae | | | | muciniphila | |
| formiminoglutamate | (8002) S: | 0.063505 | (15332) S: | 0.062189 | (6179) G: | 0.050739 |
| | Streptococcus | | Faecalibacterium | | Clostridium | |
| | thermophilus | | prausnitzii | | | |
| X - 11378 | (5736) S: | 0.029329 | (4540) S: | −0.02698 | (2328) F: | −0.02572 |
| | Acidaminococcus | | Anaerostipes | | Rikenellaceae | |
| | intestini | | hadrus | | | |
| erucate | (5075) S: | 0.08554 | (15154) F: | 0.05548 | (4540) S: | −0.04539 |
| (22:1n9) | Lachnospira | | Clostridiales | | Anaerostipes | |
| | pectinoschiza | | unclassified | | hadrus | |
| 7- | (14921) U: | 0.085909 | (4644) S: | −0.04971 | (4537) S: | −0.04821 |
| methylxanthine | Unknown | | Clostridium sp | | Eubacterium | |
| | | | CAG 62 | | hallii | |
| 3- | (4644) S: | −0.0645 | (14921) U: | 0.05496 | (15154) F: | 0.052571 |
| methylxanthine | Clostridium sp | | Unknown | | Clostridiales | |
| | CAG 62 | | | | unclassified | |
| 7-alpha- | (4951) S: | 0.054502 | (1790) S: | −0.04171 | (14909) S: | 0.040551 |
| hydroxy-3-oxo- | Roseburia | | Odoribacter | | Clostridium | |
| 4-cholestenoate | intestinalis | | splanchnicus | | sp CAG | |
| (7-Hoca) | | | | | 169 | |
| 2- | (6179) G: | 0.075033 | (15332) S: | 0.066471 | (4643) S: | −0.05036 |
| aminoadipate | Clostridium | | Faecalibacterium | | Clostridium | |
| | | | prausnitzii | | sp CAG | |
| | | | | | 167 | |
| N- | (15252) F: | 0.035442 | (4608) S: | −0.03347 | (6939) S: | 0.023519 |
| acetylaspartate | Clostridiales | | Ruminococcus | | Veillonella | |
| (NAA) | unclassified | | torques | | parvula | |
| 3- | (14114) S: | 0.057994 | (15256) F: | 0.054033 | (15154) F: | 0.041405 |
| methyladipate | Subdoligranulum | | Clostridiales | | Clostridiales | |
| | sp CAG | | unclassified | | unclassified | |
| | 314 | | | | | |
| gamma- | (6179) G: | 0.047897 | (4714) S: | −0.03889 | (15326) G: | 0.03737 |
| glutamylleucine | Clostridium | | Clostridium sp | | Faecalibacterium | |
| X - 12101 | (6174) S: | 0.041003 | (4652) S: | 0.034255 | (4953) S: | 0.020797 |
| | Clostridium sp | | Clostridium sp | | Roseburia | |
| | CAG 265 | | CAG 75 | | sp CAG | |
| | | | | | 182 | |
| theobromine | (4532) S: | 0.057608 | (4644) S: | −0.05257 | (4537) S: | −0.0471 |
| | Eubacterium | | Clostridium sp | | Eubacterium | |
| | hallii | | CAG 62 | | hallii | |
| 1- | (4577) S: | 0.086446 | (4581) S: | 0.045221 | (4933) S: | −0.0319 |
| methylhistidine | Coprococcus | | Dorea | | Eubacterium | |
| | comes | | longicatena | | rectale | |
| trimethylamine | (17248) S: | −0.03971 | (4721) S: | 0.02819 | (1934) S: | 0.022967 |
| N-oxide | Bifidobacterium | | Clostridium sp | | Parabacteroides | |
| | longum | | CAG 58 | | distasonis | |
| X - 17654 | (17244) S: | 0.053964 | (4581) S: | 0.043974 | (15342) S: | 0.034623 |
| | Bifidobacterium | | Dorea | | Faecalibacterium | |
| | adolescentis | | longicatena | | prausnitzii | |
| ximenoylcarnitine | (1903) S: | 0.10427 | (15346) G: | 0.036248 | (1786) S: | 0.031769 |
| (C26:1)* | Bacteroides | | Faecalibacterium | | Butyricimonas | |
| | plebeius CAG | | | | synergistica | |
| | 211 | | | | | |
| glycosyl | (5843) S: | −0.03897 | (4705) S: | −0.03595 | (4577) S: | −0.02522 |
| ceramide | Allisonella | | Clostridium sp | | Coprococcus | |
| (d18:2/24:1, | histaminiformans | | CAG 43 | | comes | |
| d18:1/24:2)* | | | | | | |
| tiglylcarnitine | (4121) U: | 0.09362 | (8002) S: | 0.045442 | (4577) S: | 0.04075 |
| (C5:1-DC) | Unknown | | Streptococcus | | Coprococcus | |
| | | | thermophilus | | comes | |
| isovalerylglycine | (15339) S: | −0.1054 | (4940) S: | −0.07971 | (14861) U: | 0.074656 |
| | Faecalibacterium | | Roseburia | | Unknown | |
| | prausnitzii | | inulinivorans | | | |
| glutamate | (5075) S: | 0.037256 | (1949) S: | 0.028971 | (9226) S: | −0.02818 |
| | Lachnospira | | Parabacteroides | | Akkermansia | |
| | pectinoschiza | | merdae | | muciniphila | |
| 7-methylurate | (14921) U: | 0.098308 | (15154) F: | 0.092927 | (4537) S: | −0.05381 |
| | Unknown | | Clostridiales | | Eubacterium | |
| | | | unclassified | | hallii | |
| 2- | (4552) S: | 0.055011 | (4933) S: | −0.05078 | (15286) F: | −0.04322 |
| methylbutyrylcarnitine | Ruminococcus | | Eubacterium | | Ruminococcaceae | |
| (C5) | sp | | rectale | | | |
| X - 13844 | (15154) F: | 0.264017 | (14322) S: | 0.105664 | (1872) S: | −0.04441 |
| | Clostridiales | | Eggerthella sp | | Bacteroides | |
| | unclassified | | CAG 209 | | ovatus | |
| X - 12739 | (6140) S: | −0.05159 | (8002) S: | −0.04703 | (1786) S: | 0.024304 |
| | Intestinibacter | | Streptococcus | | Butyricimonas | |
| | bartlettii | | thermophilus | | synergistica | |
| androstenediol | (15154) F: | −0.06373 | (15315) G: | 0.04232 | (9346) S: | −0.03422 |
| (3alpha, | Clostridiales | | Faecalibacterium | | Azospirillum | |
| 17alpha) | unclassified | | | | sp CAG | |
| monosulfate | | | | | 239 | |
| (2) | | | | | | |
| palmitoylcarnitine | (17237) S: | −0.04386 | (6376) F: | −0.03781 | (4804) S: | −0.03548 |
| (C16) | Bifidobacterium | | Clostridiaceae | | Blautia sp | |
| | pseudocatenulatum | | | | | |
| gamma- | (15238) S: | −0.04886 | (15346) G: | 0.04735 | (4951) S: | 0.045291 |
| glutamyl-2- | Firmicutes | | Faecalibacterium | | Roseburia | |
| aminobutyrate | bacterium | | | | intestinalis | |
| | CAG 170 | | | | | |
| acisoga | (4804) S: | −0.0601 | (4749) S: | 0.050771 | (5792) S: | 0.046751 |
| | Blautia sp | | Clostridium sp | | Phascolarctobacterium | |
| | | | CAG 7 | | sp CAG | |
| | | | | | 207 | |
| 1-(1-enyl- | (4705) S: | −0.0961 | (5843) S: | −0.03567 | (4782) U: | 0.0157 |
| palmitoyl)-2- | Clostridium sp | | Allisonella | | Unknown | |
| oleoyl-GPC | CAG 43 | | histaminiformans | | | |
| (P-16:0/18:1)* | | | | | | |
| catechol | (4537) S: | −0.11047 | (14322) S: | 0.056511 | (15154) F: | 0.045195 |
| sulfate | Eubacterium | | Eggerthella sp | | Clostridiales | |
| | hallii | | CAG 209 | | unclassified | |
| 3- | (2290) F: | −0.03072 | (9391) F: | −0.02095 | (15390) U: | −0.01941 |
| methylcytidine | Rikenellaceae | | Oxalobacteraceae | | Unknown | |
| X - 14939 | (17244) S: | 0.07344 | (15271) S: | −0.034 | (8002) S: | −0.03222 |
| | Bifidobacterium | | Ruthenibacterium | | Streptococcus | |
| | adolescentis | | lactatiformans | | thermophilus | |
| pregnenetriol | (8002) S: | −0.04437 | (4940) S: | 0.039132 | (6328) S: | −0.02765 |
| disulfate* | Streptococcus | | Roseburia | | Clostridium | |
| | thermophilus | | inulinivorans | | sp CAG | |
| | | | | | 492 | |
| 1-(1-enyl- | (4577) S: | 0.054186 | (6148) F: | 0.039898 | (17244) S: | −0.03794 |
| stearoyl)-GPE | Coprococcus | | Peptostrep- | | Bifidobacterium | |
| (P-18:0)* | comes | | tococcaceae | | adolescentis | |
| carnitine | (2303) S: | −0.05057 | (4575) S: | 0.042866 | (4933) S: | −0.04003 |
| | Alistipes | | Dorea | | Eubacterium | |
| | finegoldii | | formicigenerans | | rectale | |
| X - 11261 | (4816) S: | −0.03889 | (15216) F: | −0.03588 | (6962) S: | 0.032803 |
| | Blautia sp | | Clostridiales | | Megamonas | |
| | | | unclassified | | funiformis | |
| gamma- | (5082) S: | −0.08064 | (8069) S: | −0.03854 | (14899) U: | 0.035089 |
| glutamylcitrulline* | Eubacterium | | Streptococcus | | Unknown | |
| | eligens | | parasanguinis | | | |
| N-acetyl- | (4960) G: | 0.038558 | (6148) F: | −0.03847 | (4714) S: | 0.028079 |
| isoputreanine* | Eubacterium | | Peptostrep- | | Clostridium sp | |
| | | | tococcaceae | | | |
| 5alpha- | (14252) U: | 0.044691 | (15089) S: | −0.0257 | (4644) S: | 0.024759 |
| pregnan- | Unknown | | Firmicutes | | Clostridium | |
| 3beta,20alpha- | | | bacterium | | sp CAG | |
| diol | | | CAG 83 | | 62 | |
| monosulfate | | | | | | |
| (2) | | | | | | |
| o-cresol sulfate | (15154) F: | 0.11338 | (14993) S: | 0.054371 | (14992) G: | 0.048313 |
| | Clostridiales | | Butyricicoccus | | Butyricicoccus | |
| | unclassified | | sp | | | |
| phenol | (6148) F: | −0.0527 | (4758) S: | 0.036881 | (14861) U: | −0.02897 |
| glucuronide | Peptostrep- | | Clostridium | | Unknown | |
| | tococcaceae | | bolteae | | | |
| leucine | (4714) S: | −0.06304 | (6179) G: | 0.042849 | (15326) G: | −0.03459 |
| | Clostridium sp | | Clostridium | | Faecalibacterium | |
| X - 24544 | (4940) S: | 0.045137 | (8002) S: | −0.04184 | (4750) G: | 0.039685 |
| | Roseburia | | Streptococcus | | Clostridium | |
| | inulinivorans | | thermophilus | | | |
| deoxycholate | (4705) S: | 0.2139 | (14824) F: | 0.084854 | (4749) S: | 0.05729 |
| | Clostridium sp | | Eggerthellaceae | | Clostridium | |
| | CAG 43 | | | | sp CAG | |
| | | | | | 7 | |
| 2-methylserine | (4882) S: | 0.107518 | (14909) S: | −0.09433 | (4933) S: | −0.08823 |
| | Roseburia sp | | Clostridium sp | | Eubacterium | |
| | CAG 100 | | CAG 169 | | rectale | |
| N-stearoyl- | (14253) U: | −0.03739 | (2303) S: | −0.02878 | (8002) S: | 0.024406 |
| sphingosine | Unknown | | Alistipes | | Streptococcus | |
| (d18:1/18:0)* | | | finegoldii | | thermophilus | |
| 2- | (15346) G: | 0.037708 | (4571) S: | 0.027395 | (15238) S: | −0.02494 |
| aminobutyrate | Faecalibacterium | | Dorea sp CAG | | Firmicutes | |
| | | | 105 | | bacterium | |
| | | | | | CAG 170 | |
| imidazole | (15120) S: | −0.03446 | (8076) S: | 0.033378 | (4575) S: | 0.027709 |
| propionate | Firmicutes | | Streptococcus | | Dorea | |
| | bacterium | | parasanguinis | | formicigenerans | |
| | CAG 114 | | | | | |
| sphingomyelin | (15154) F: | 0.044792 | (4670) S: | 0.035114 | (4704) F: | −0.02605 |
| (d18:1/22:1, | Clostridiales | | Coprococcus | | Clostridiaceae | |
| d18:2/22:0, | unclassified | | catus | | | |
| d16:1/24:1)* | | | | | | |
| X - 16944 | (4882) S: | −0.05443 | (4706) F: | −0.02469 | (6340) S: | −0.02445 |
| | Roseburia sp | | Clostridiaceae | | Clostridium | |
| | CAG 100 | | | | sp CAG | |
| | | | | | 269 | |
| X - 24947 | (4940) S: | 0.055102 | (15233) G: | −0.04833 | (4816) S: | −0.03889 |
| | Roseburia | | Firmicutes | | Blautia sp | |
| | inulinivorans | | unclassified | | | |
| indole-3- | (14899) U: | 0.074191 | (14306) S: | 0.022859 | (3996) S: | 0.021827 |
| carboxylic acid | Unknown | | Clostridium sp | | Firmicutes | |
| | | | CAG 138 | | bacterium | |
| | | | | | CAG 145 | |
| perfluorooctanesulfonic | (2303) S: | −0.0692 | (4581) S: | 0.051697 | (4711) F: | −0.04587 |
| acid | Alistipes | | Dorea | | Clostridiaceae | |
| (PFOS) | finegoldii | | longicatena | | | |
| 4- | (14816) F: | 0.090167 | (4705) S: | −0.0882 | (15154) F: | 0.054538 |
| imidazoleacetate | Eggerthellaceae | | Clostridium sp | | Clostridiales | |
| | | | CAG 43 | | unclassified | |
| androstenediol | (4940) S: | 0.042587 | (15326) G: | 0.041594 | (8002) S: | −0.03498 |
| (3alpha,17alpha) | Roseburia | | Faecalibacterium | | Streptococcus | |
| monosulfate | inulinivorans | | | | thermophilus | |
| (3) | | | | | | |
| X - 11444 | (4581) S: | 0.057246 | (5090) S: | −0.03361 | (8007) S: | −0.03187 |
| | Dorea | | Clostridiales | | Streptococcus | |
| | longicatena | | bacterium | | salivarius | |
| | | | KLE1615 | | | |
| N- | (4652) S: | 0.094585 | (15132) S: | −0.09258 | (4957) F: | 0.044323 |
| methyltaurine | Clostridium sp | | Flavonifractor | | Eubacteriaceae | |
| | CAG 75 | | plautii | | | |
| adipoylcarnitine | (15318) S: | 0.076462 | (4552) S: | 0.037269 | (15451) G: | −0.03198 |
| (C6-DC) | Faecalibacterium | | Ruminococcus | | Bilophila | |
| | prausnitzii | | sp | | | |
| X - 18922 | (14861) U: | −0.05743 | (4936) S: | 0.039004 | (14853) S: | −0.03691 |
| | Unknown | | Roseburia | | Clostridium | |
| | | | hominis | | leptum | |
| dehydroisoand | (4940) S: | 0.047967 | (15317) S: | 0.03251 | (4750) G: | 0.030966 |
| rosterone | Roseburia | | Faecalibacterium | | Clostridium | |
| sulfate (DHEA-S) | inulinivorans | | sp CAG 82 | | | |
| perfluorooctanoate | (17256) S: | −0.04541 | (4871) S: | 0.037434 | (5087) S: | 0.033656 |
| (PFOA) | Bifidobacterium | | Ruminococcus | | Eubacterium | |
| | bifidum | | sp | | sp CAG | |
| | | | | | 86 | |
| pregn steroid | (15317) S: | 0.069611 | (9346) S: | −0.0507 | (8002) S: | −0.04222 |
| monosulfate | Faecalibacterium | | Azospirillum | | Streptococcus | |
| C21H34O5S* | sp CAG 82 | | sp CAG 239 | | thermophilus | |
| X - 12798 | (4814) S: | −0.05657 | (4960) G: | −0.03758 | (14921) U: | 0.03569 |
| | Blautia | | Eubacterium | | Unknown | |
| | obeum | | | | | |
| gamma- | (14470) G: | 0.022843 | (4871) S: | 0.022047 | (4553) S: | 0.021627 |
| glutamylglutamate | Collinsella | | Ruminococcus | | Clostridium sp | |
| | | | sp | | | |
| X - 13431 | (4581) S: | 0.073345 | (6750) S: | 0.041298 | (4577) S: | 0.039097 |
| | Dorea | | Clostridium sp | | Coprococcus | |
| | longicatena | | | | comes | |
| caffeic acid | (15154) F: | 0.068272 | (4961) G: | 0.040585 | (4844) S: | −0.02968 |
| sulfate | Clostridiales | | Eubacterium | | Blautia | |
| | unclassified | | | | obeum | |
| 4- | (6308) G: | 0.063085 | (3964) U: | 0.032636 | (4767) U: | −0.03257 |
| hydroxychlorothalonil | Clostridium | | Unknown | | Unknown | |
| X - 17685 | (15154) F: | 0.097833 | (17244) S: | −0.04853 | (15028) G: | −0.04273 |
| | Clostridiales | | Bifidobacterium | | Firmicutes | |
| | unclassified | | adolescentis | | unclassified | |
| thyroxine | (3988) F: | −0.07384 | (15385) U: | −0.04022 | (4721) S: | −0.02471 |
| | Firmicutes | | Unknown | | Clostridium | |
| | unclassified | | | | sp CAG | |
| | | | | | 58 | |
| sphingomyelin | (4540) S: | 0.060424 | (4705) S: | −0.04405 | (6754) S: | 0.02946 |
| (d18:2/24:1, | Anaerostipes | | Clostridium sp | | Clostridium sp | |
| d18:1/24:2)* | hadrus | | CAG 43 | | | |
| Fibrinopeptide | (17241) S: | −0.0508 | (4342) U: | −0.05029 | (9391) F: | −0.04086 |
| A (3-16)** | Bifidobacterium | | Unknown | | Oxalobacteraceae | |
| | catenulatum | | | | | |
| pregnanediol- | (14252) U: | 0.042367 | (15216) F: | 0.034203 | (3957) F: | 0.031372 |
| 3-glucuronide | Unknown | | Clostridiales | | Lachnospiraceae | |
| | | | unclassified | | | |
| N- | (4828) S: | 0.048588 | (15078) S: | −0.0419 | (15265) S: | −0.02874 |
| acetylarginine | Blautia sp | | Oscillibacter | | Firmicutes | |
| | | | sp | | bacterium | |
| | | | | | CAG 103 | |
| pregnen-diol | (8002) S: | −0.04271 | (15317) S: | 0.034709 | (4779) S: | 0.033699 |
| disulfate | Streptococcus | | Faecalibacterium | | Clostridium sp | |
| C21H34O8S2* | thermophilus | | sp CAG 82 | | | |
| 1-oleoyl-2- | (15369) S: | 0.030771 | (4749) S: | −0.02947 | (5076) S: | 0.029252 |
| docosahexaenoyl- | Faecalibacterium | | Clostridium sp | | Eubacterium | |
| GPC | sp CAG 74 | | CAG 7 | | sp CAG | |
| (18:1/22:6)* | | | | | 252 | |
| 3-(4- | (15332) S: | 0.047177 | (15126) S: | −0.04031 | (4425) S: | 0.032587 |
| hydroxyphenyl)lactate | Faecalibacterium | | Intestinimonas | | Ruminococcus | |
| | prausnitzii | | butyriciproducens | | sp CAG | |
| | | | | | 254 | |
| N-acetylglycine | (6754) S: | 0.040646 | (4705) S: | −0.04062 | (15081) F: | −0.03903 |
| | Clostridium sp | | Clostridium sp | | Clostridiales | |
| | | | CAG 43 | | unclassified | |
| propionylglycine | (17241) S: | −0.04787 | (4753) F: | −0.03739 | (4121) U: | 0.034891 |
| | Bifidobacterium | | Lachnospiraceae | | Unknown | |
| | catenulatum | | | | | |
| taurine | (6179) G: | 0.041423 | (1786) S: | 0.03273 | (4537) S: | 0.020686 |
| | Clostridium | | Butyricimonas | | Eubacterium | |
| | | | synergistica | | hallii | |
| glycine | (9226) S: | −0.07967 | (15049) F: | 0.044421 | (4936) S: | 0.041638 |
| conjugate of | Akkermansia | | Clostridiales | | Roseburia | |
| C10H14O2 (1)* | muciniphila | | unclassified | | hominis | |
| sphingomyelin | (4714) S: | −0.03796 | (15154) F: | 0.036928 | (4670) S: | 0.034768 |
| (d18:1/21:0, | Clostridium sp | | Clostridiales | | Coprococcus | |
| d17:1/22:0, | | | unclassified | | catus | |
| d16:1/23:0)* | | | | | | |
| acetylcarnitine | (4940) S: | 0.039533 | (15322) S: | 0.020313 | (4933) S: | −0.01983 |
| (C2) | Roseburia | | Faecalibacterium | | Eubacterium | |
| | inulinivorans | | prausnitzii | | rectale | |
| X - 18899 | (15271) S: | −0.04086 | (14991) F: | 0.026288 | (9391) F: | 0.016897 |
| | Ruthenibacterium | | Clostridiaceae | | Oxalobacteraceae | |
| | lactatiformans | | | | | |
| X - 12906 | (4810) S: | 0.08805 | (4940) S: | −0.05919 | (4705) S: | −0.05477 |
| | Blautia sp | | Roseburia | | Clostridium | |
| | CAG 237 | | inulinivorans | | sp CAG | |
| | | | | | 43 | |
| 3-sulfo-L- | (5076) S: | −0.06914 | (1872) S: | 0.043914 | (1949) S: | 0.042877 |
| alanine | Eubacterium | | Bacteroides | | Parabacteroides | |
| | sp CAG 252 | | ovatus | | merdae | |
| biliverdin | (4842) G: | −0.03558 | (4582) S: | −0.03161 | (4571) S: | 0.030959 |
| | Blautia | | Dorea | | Dorea sp | |
| | | | longicatena | | CAG 105 | |
| 1-linoleoyl- | (5843) S: | −0.05184 | (17248) S: | 0.032153 | (4705) S: | −0.02669 |
| GPA (18:2)* | Allisonella | | Bifidobacterium | | Clostridium | |
| | histaminiformans | | longum | | sp CAG | |
| | | | | | 43 | |
| 3-hydroxy-2- | (14823) F: | 0.057813 | (4552) S: | 0.039847 | (1957) S: | 0.035421 |
| ethylpropionate | Eggerthellaceae | | Ruminococcus | | Bacteroides | |
| | | | sp | | sp CAG | |
| | | | | | 144 | |
| carotene diol | (4705) S: | −0.03301 | (14980) F: | −0.02632 | (4782) U: | 0.025581 |
| (3) | Clostridium sp | | Clostridiaceae | | Unknown | |
| | CAG 43 | | | | | |
| X - 17325 | (14322) S: | 0.061078 | (4537) S: | −0.03802 | (14844) S: | 0.025173 |
| | Eggerthella sp | | Eubacterium | | Firmicutes | |
| | CAG 209 | | hallii | | bacterium | |
| | | | | | CAG 94 | |
| docosahexaenoate | (4905) F: | 0.036171 | (17256) S: | −0.01939 | (1934) S: | 0.018516 |
| (DHA; | Clostridiaceae | | Bifidobacterium | | Parabacteroides | |
| 22:6n3) | | | bifidum | | distasonis | |
| N6,N6,N6- | (6750) S: | 0.041594 | (4828) S: | 0.038495 | (15350) U: | 0.021287 |
| trimethyllysine | Clostridium sp | | Blautia sp | | Unknown | |
| deoxycarnitine | (4575) S: | 0.049704 | (4933) S: | −0.03669 | (4581) S: | 0.031065 |
| | Dorea | | Eubacterium | | Dorea | |
| | formicigenerans | | rectale | | longicatena | |
| 2,3-dihydroxy- | (15236) G: | −0.03061 | (4957) F: | 0.030057 | (4644) S: | −0.02449 |
| 5-methylthio- | Firmicutes | | Eubacteriaceae | | Clostridium | |
| 4-pentenoate | unclassified | | | | sp CAG | |
| (DMTPA)* | | | | | 62 | |
| arabonate/xylonate | (4540) S: | 0.035354 | (1934) S: | 0.029404 | (4648) G: | 0.027639 |
| | Anaerostipes | | Parabacteroides | | Roseburia | |
| | hadrus | | distasonis | | | |
| X - 11852 | (6179) G: | 0.081815 | (4810) S: | 0.054093 | (15260) G: | 0.018769 |
| | Clostridium | | Blautia sp | | Firmicutes | |
| | | | CAG 237 | | unclassified | |
| urea | (4577) S: | 0.079002 | (4121) U: | 0.074149 | (4933) S: | −0.06803 |
| | Coprococcus | | Unknown | | Eubacterium | |
| | comes | | | | rectale | |
| indoleacetylglutamine | (3926) U: | 0.076706 | (13983) U: | 0.035244 | (6754) S: | −0.03479 |
| | Unknown | | Unknown | | Clostridium sp | |
| vanillylmandelate | (4608) S: | −0.06458 | (1872) S: | −0.03822 | (5190) S: | 0.027211 |
| (VMA) | Ruminococcus | | Bacteroides | | Firmicutes | |
| | torques | | ovatus | | bacterium | |
| | | | | | CAG 102 | |
| X - 13255 | (15073) G: | 0.071721 | (15295) G: | 0.063039 | (14322) S: | 0.061006 |
| | Oscillibacter | | Gemmiger | | Eggerthella | |
| | | | | | sp CAG | |
| | | | | | 209 | |
| androstenediol | (4940) S: | 0.051222 | (3964) U: | −0.03788 | (15120) S: | −0.02846 |
| (3beta,17beta) | Roseburia | | Unknown | | Firmicutes | |
| disulfate (1) | inulinivorans | | | | bacterium | |
| | | | | | CAG 114 | |
| valine | (4577) S: | 0.042291 | (4714) S: | −0.03571 | (15339) S: | −0.0347 |
| | Coprococcus | | Clostridium sp | | Faecalibacterium | |
| | comes | | | | prausnitzii | |
| X - 11485 | (1812) S: | 0.095402 | (4953) S: | 0.094858 | (15452) S: | 0.035684 |
| | Bacteroides | | Roseburia sp | | Bilophila | |
| | massiliensis | | CAG 182 | | sp 4 1 30 | |
| X - 24757 | (14322) S: | 0.082937 | (14844) S: | 0.02957 | (8002) S: | 0.022257 |
| | Eggerthella sp | | Firmicutes | | Streptococcus | |
| | CAG 209 | | bacterium | | thermophilus | |
| | | | CAG 94 | | | |
| chenodeoxycholate | (6148) F: | 0.081226 | (2328) F: | −0.05036 | (4914) S: | −0.03421 |
| | Peptostrep- | | Rikenellaceae | | Clostridium sp | |
| | tococcaceae | | | | | |
| 17- | (6174) S: | 0.037474 | (4608) S: | 0.022117 | (6750) S: | 0.021955 |
| methylstearate | Clostridium sp | | Ruminococcus | | Clostridium sp | |
| | CAG 265 | | torques | | | |
| 3- | (4804) S: | −0.07983 | (4940) S: | 0.063162 | (14823) F: | 0.045146 |
| hydroxybutyryl | Blautia sp | | Roseburia | | Eggerthellaceae | |
| carnitine (1) | | | inulinivorans | | | |
| sphingomyelin | (14909) S: | −0.03771 | (4191) S: | 0.019822 | (4705) S: | −0.01832 |
| (d18:2/24:2)* | Clostridium sp | | Eubacterium | | Clostridium | |
| | CAG 169 | | sp CAG 115 | | sp CAG | |
| | | | | | 43 | |
| 5alpha- | (15326) G: | 0.043048 | (4940) S: | 0.042472 | (4198) S: | −0.02814 |
| androstan- | Faecalibacterium | | Roseburia | | Eubacterium | |
| 3beta,17beta- | | | inulinivorans | | siraeum | |
| diol | | | | | | |
| monosulfate | | | | | | |
| (2) | | | | | | |
| stearoyl | (4826) S: | 0.045456 | (4959) S: | 0.038113 | (4670) S: | 0.035029 |
| sphingomyelin | Blautia sp | | Eubacterium | | Coprococcus | |
| (d18:1/18:0) | | | ramulus | | catus | |
| 2- | (8601) S: | −0.05442 | (5068) S: | −0.03666 | (4931) G: | −0.02636 |
| linoleoylglycerol | Candidatus | | Bacteroides | | Lachnospiraceae | |
| (18:2) | Gastranaerophilales | | pectinophilus | | unclassified | |
| | bacterium | | CAG 437 | | | |
| | HUM 10 | | | | | |
| xanthurenate | (8002) S: | 0.121598 | (6140) S: | 0.064645 | (15323) S: | −0.04045 |
| | Streptococcus | | Intestinibacter | | Faecalibacterium | |
| | thermophilus | | bartlettii | | prausnitzii | |
| X - 12411 | (9226) S: | −0.03831 | (6148) F: | 0.022854 | (4577) S: | 0.022152 |
| | Akkermansia | | Peptostrep- | | Coprococcus | |
| | muciniphila | | tococcaceae | | comes | |
| 5-oxoproline | (1786) S: | 0.080071 | (4553) S: | 0.023267 | (5087) S: | 0.019376 |
| | Butyricimonas | | Clostridium sp | | Eubacterium | |
| | synergistica | | | | sp CAG | |
| | | | | | 86 | |
| 1-(1-enyl- | (14921) U: | 0.060526 | (6148) F: | 0.017928 | (14861) U: | 0.016349 |
| palmitoyl)-GPC | Unknown | | Peptostrep- | | Unknown | |
| (P-16:0)* | | | tococcaceae | | | |
| N- | (15154) F: | 0.047969 | (15272) F: | −0.03431 | (4933) S: | −0.02566 |
| acetylglutamate | Clostridiales | | Ruminococcaceae | | Eubacterium | |
| | unclassified | | | | rectale | |
| tetradecanedioate | (1957) S: | 0.075198 | (4874) S: | 0.065262 | (4575) S: | 0.056747 |
| | Bacteroides | | Fusicatenibacter | | Dorea | |
| | sp CAG 144 | | saccharivorans | | formicigenerans | |
| glutarylcarnitine | (9226) S: | −0.02149 | (4564) S: | 0.021473 | (4121) U: | 0.021392 |
| (C5-DC) | Akkermansia | | Ruminococcus | | Unknown | |
| | muciniphila | | torques | | | |
| X - 24337 | (4581) S: | 0.0651 | (2318) S: | −0.04373 | (5082) S: | −0.03891 |
| | Dorea | | Alistipes | | Eubacterium | |
| | longicatena | | putredinis | | eligens | |
| gamma- | (15078) S: | −0.04589 | (6179) G: | 0.038598 | (15326) G: | −0.03007 |
| glutamylisoleucine* | Oscillibacter | | Clostridium | | Faecalibacterium | |
| | sp | | | | | |
| 1-(1-enyl- | (4577) S: | 0.109115 | (14909) S: | 0.052957 | (5792) S: | 0.038317 |
| palmitoyl)-2- | Coprococcus | | Clostridium sp | | Phascolarctobacterium | |
| arachidonoyl- | comes | | CAG 169 | | sp CAG | |
| GPC (P- | | | | | 207 | |
| 16:0/20:4)* | | | | | | |
| 1-(1-enyl- | (4577) S: | 0.083702 | (4960) G: | −0.03791 | (4712) F: | −0.03677 |
| stearoyl)-2- | Coprococcus | | Eubacterium | | Clostridiaceae | |
| oleoyl-GPE | comes | | | | | |
| (P-18:0/18:1) | | | | | | |
| 1-(1-enyl- | (6148) F: | 0.038014 | (4577) S: | 0.035976 | (1862) S: | 0.025325 |
| palmitoyl)-GPE | Peptostrep- | | Coprococcus | | Bacteroides | |
| (P-16:0)* | tococcaceae | | comes | | finegoldii | |
| epiandrosterone | (15315) G: | 0.038067 | (4303) S: | 0.029738 | (3964) U: | −0.02883 |
| sulfate | Faecalibacterium | | Clostridium sp | | Unknown | |
| | | | CAG 217 | | | |
| 2- | (4644) S: | 0.048154 | (5083) G: | 0.034863 | (4547) S: | 0.034632 |
| acetamidophenol | Clostridium sp | | Eubacterium | | Anaerostipes | |
| sulfate | CAG 62 | | | | hadrus | |
| 1-myristoyl-2- | (15326) G: | −0.02009 | (4933) S: | 0.017622 | (15216) F: | −0.01423 |
| arachidonoyl- | Faecalibacterium | | Eubacterium | | Clostridiales | |
| GPC | | | rectale | | unclassified | |
| (14:0/20:4)* | | | | | | |
| N,N,N- | (4581) S: | 0.036467 | (5082) S: | −0.03317 | (4820) S: | −0.0319 |
| trimethyl- | Dorea | | Eubacterium | | Blautia sp | |
| alanylproline | longicatena | | eligens | | | |
| betaine | | | | | | |
| (TMAP) | | | | | | |
| X - 13684 | (1815) S: | −0.0851 | (15106) S: | −0.02385 | (4648) G: | −0.01711 |
| | Bacteroides | | Firmicutes | | Roseburia | |
| | dorei | | bacterium | | | |
| | | | CAG 176 | | | |
| X - 24748 | (5075) S: | 0.024809 | (4933) S: | 0.020641 | (14991) F: | 0.018936 |
| | Lachnospira | | Eubacterium | | Clostridiaceae | |
| | pectinoschiza | | rectale | | | |
| malate | (17249) S: | −0.06347 | (4655) S: | 0.021372 | (15467) S: | 0.018214 |
| | Bifidobacterium | | Clostridium sp | | Desulfovibrio | |
| | longum | | CAG 277 | | piger | |
| isovalerylcarnitine | (6179) G: | 0.048503 | (4581) S: | 0.046117 | (7985) S: | 0.039503 |
| (C5) | Clostridium | | Dorea | | Lactococcus | |
| | | | longicatena | | lactis | |
| 2- | (14924) S: | −0.05728 | (15073) G: | 0.054514 | (2303) S: | −0.04394 |
| hydroxynervonate* | Firmicutes | | Oscillibacter | | Alistipes | |
| | bacterium | | | | finegoldii | |
| | CAG 137 | | | | | |
| X - 11858 | (15078) S: | −0.02592 | (15132) S: | −0.01619 | (15124) F: | −0.01299 |
| | Oscillibacter | | Flavonifractor | | Clostridiales | |
| | sp | | plautii | | unclassified | |
| 3- | (15154) F: | 0.096561 | (2326) S: | −0.03556 | (4537) S: | −0.03231 |
| hydroxyhippurate | Clostridiales | | Faecalibacterium | | Eubacterium | |
| sulfate | unclassified | | prausnitzii | | hallii | |
| lactosyl-N- | (7985) S: | −0.04284 | (4705) S: | −0.04131 | (8002) S: | −0.0391 |
| nervonoyl- | Lactococcus | | Clostridium sp | | Streptococcus | |
| sphingosine | lactis | | CAG 43 | | thermophilus | |
| (d18:1/24:1)* | | | | | | |
| 1-(1-enyl- | (4577) S: | 0.040681 | (5190) S: | 0.031594 | (2311) F: | 0.027897 |
| palmitoyl)-2- | Coprococcus | | Firmicutes | | Rikenellaceae | |
| oleoyl-GPE | comes | | bacterium | | | |
| (P-16:0/18:1)* | | | CAG 102 | | | |
| X - 18886 | (4940) S: | 0.1102 | (14993) S: | 0.030132 | (14823) F: | 0.028101 |
| | Roseburia | | Butyricicoccus | | Eggerthellaceae | |
| | inulinivorans | | sp | | | |
| Fibrinopeptide | (4342) U: | −0.04477 | (9391) F: | −0.03691 | (4553) S: | −0.03651 |
| B (1-13)** | Unknown | | Oxalobacteraceae | | Clostridium sp | |
| taurochenodeoxycholic | (4749) S: | −0.03801 | (4705) S: | −0.01807 | (4367) S: | −0.01552 |
| acid 3- | Clostridium sp | | Clostridium sp | | Ruminococcus | |
| sulfate | CAG 7 | | CAG 43 | | sp CAG | |
| | | | | | 177 | |
| DSGEGDFXAEGGGVR* | (17241) S: | −0.0563 | (4342) U: | −0.05006 | (1786) S: | −0.04787 |
| | Bifidobacterium | | Unknown | | Butyricimonas | |
| | catenulatum | | | | synergistica | |
| tauroursodeoxycholate | (4552) S: | −0.06347 | (14844) S: | 0.034069 | (15154) F: | 0.033536 |
| | Ruminococcus | | Firmicutes | | Clostridiales | |
| | sp | | bacterium | | unclassified | |
| | | | CAG 94 | | | |
| X - 13723 | (15154) F: | 0.099408 | (14322) S: | 0.064691 | (1872) S: | −0.03785 |
| | Clostridiales | | Eggerthella sp | | Bacteroides | |
| | unclassified | | CAG 209 | | ovatus | |
| 1-stearoyl-2- | (15229) F: | −0.03036 | (4448) G: | 0.029146 | (4804) S: | −0.02635 |
| docosahexaenoyl-GPE | Clostridiales | | Eubacterium | | Blautia sp | |
| (18:0/22:6)* | unclassified | | | | | |
| 14-HDoHE/17- | (6179) G: | 0.09176 | (4191) S: | 0.032071 | (15081) F: | 0.027606 |
| HDoHE | Clostridium | | Eubacterium | | Clostridiales | |
| | | | sp CAG 115 | | unclassified | |
| 1- | (15216) F: | −0.01615 | (5090) S: | −0.01475 | (4828) S: | 0.009504 |
| linolenoylglycerol | Clostridiales | | Clostridiales | | Blautia sp | |
| (18:3) | unclassified | | bacterium | | | |
| | | | KLE1615 | | | |
| X - 11299 | (1836) S: | −0.0339 | (14797) G: | 0.031022 | (5785) S: | 0.028369 |
| | Bacteroides | | Adlercreutzia | | Phascolarctobacterium | |
| | uniformis | | | | sp CAG | |
| | | | | | 266 | |
| X - 21285 | (4940) S: | 0.084041 | (15233) G: | −0.04693 | (4581) S: | 0.04181 |
| | Roseburia | | Firmicutes | | Dorea | |
| | inulinivorans | | unclassified | | longicatena | |
| Fibrinopeptide | (17241) S: | −0.04287 | (4342) U: | −0.04129 | (9391) F: | −0.03389 |
| A (5-16)* | Bifidobacterium | | Unknown | | Oxalobacteraceae | |
| | catenulatum | | | | | |
| X - 21661 | (15078) S: | −0.01988 | (15124) F: | −0.01812 | (4582) S: | −0.01351 |
| | Oscillibacter | | Clostridiales | | Dorea | |
| | sp | | unclassified | | longicatena | |
| dodecenedioate | (6465) S: | 0.054859 | (4964) F: | 0.035591 | (4839) G: | −0.0334 |
| (C12:1-DC)* | Mycoplasma | | Eubacteriaceae | | Blautia | |
| | sp CAG 611 | | | | | |
| 3-methyl-2- | (14909) S: | 0.03462 | (4951) S: | 0.027326 | (15089) S: | −0.02103 |
| oxovalerate | Clostridium sp | | Roseburia | | Firmicutes | |
| | CAG 169 | | intestinalis | | bacterium | |
| | | | | | CAG 83 | |
| X - 11847 | (15078) S: | −0.02382 | (4811) S: | −0.02231 | (14542) G: | −0.01526 |
| | Oscillibacter | | Blautia | | Collinsella | |
| | sp | | obeum | | | |
| 1-myristoyl-2- | (15233) G: | −0.04287 | (4936) S: | −0.03127 | (8002) S: | 0.01649 |
| palmitoyl-GPC | Firmicutes | | Roseburia | | Streptococcus | |
| (14:0/16:0) | unclassified | | hominis | | thermophilus | |
| 3-aminoisobutyrate | (4130) U: | 0.048514 | (14992) G: | 0.038371 | (3940) U: | 0.02967 |
| | Unknown | | Butyricicoccus | | Unknown | |
| stachydrine | (4960) G: | 0.111027 | (5089) S: | 0.041966 | (4582) S: | −0.03922 |
| | Eubacterium | | Eubacterium | | Dorea | |
| | | | sp CAG 38 | | longicatena | |
| eicosenoate | (14992) G: | 0.03625 | (15154) F: | 0.03301 | (15073) G: | 0.024107 |
| (20:1) | Butyricicoccus | | Clostridiales | | Oscillibacter | |
| | | | unclassified | | | |
| isocitrate | (6754) S: | 0.092134 | (4714) S: | 0.077375 | (4779) S: | −0.04582 |
| | Clostridium sp | | Clostridium sp | | Clostridium sp | |
| X - 21364 | (4750) G: | 0.040436 | (4581) S: | 0.023042 | (4564) S: | 0.021019 |
| | Clostridium | | Dorea | | Ruminococcus | |
| | | | longicatena | | torques | |
| X - 12007 | (4960) G: | −0.03341 | (4782) U: | 0.02307 | (4532) S: | 0.021818 |
| | Eubacterium | | Unknown | | Eubacterium | |
| | | | | | hallii | |
| N1-Methyl-2- | (4577) S: | 0.067729 | (14999) U: | 0.040532 | (14861) U: | 0.033075 |
| pyridone-5- | Coprococcus | | Unknown | | Unknown | |
| carboxamide | comes | | | | | |
| X - 21659 | (1812) S: | 0.067379 | (4577) S: | 0.053012 | (4964) F: | 0.050115 |
| | Bacteroides | | Coprococcus | | Eubacteriaceae | |
| | massiliensis | | comes | | | |
| gamma- | (4540) S: | −0.03464 | (15124) F: | −0.02828 | (5792) S: | −0.02305 |
| tocopherol/beta- | Anaerostipes | | Clostridiales | | Phascolarctobacterium | |
| tocopherol | hadrus | | unclassified | | sp CAG | |
| | | | | | 207 | |
| X - 12117 | (15326) G: | −0.03722 | (1790) S: | −0.03141 | (4670) S: | −0.02739 |
| | Faecalibacterium | | Odoribacter | | Coprococcus | |
| | | | splanchnicus | | catus | |
| 1- | (15452) S: | 0.03446 | (5190) S: | −0.02729 | (15332) S: | 0.02379 |
| myristoylglycerol | Bilophila sp 4 | | Firmicutes | | Faecalibacterium | |
| (14:0) | 1 30 | | bacterium | | prausnitzii | |
| | | | CAG 102 | | | |
| X - 21845 | (14816) F: | −0.0468 | (4577) S: | 0.038822 | (1812) S: | 0.032944 |
| | Eggerthellaceae | | Coprococcus | | Bacteroides | |
| | | | comes | | massiliensis | |
| N- | (4960) G: | 0.071663 | (4933) S: | −0.03528 | (4871) S: | −0.03173 |
| methylhydroxy | Eubacterium | | Eubacterium | | Ruminococcus | |
| proline** | | | rectale | | sp | |
| stearoylcarnitine | (6750) S: | 0.065403 | (17237) S: | −0.02695 | (4780) G: | −0.02624 |
| (C18) | Clostridium sp | | Bifidobacterium | | Clostridium | |
| | | | pseudocatenulatum | | | |
| X - 24546 | (14991) F: | −0.07482 | (15350) U: | 0.046263 | (4197) G: | −0.03719 |
| | Clostridiaceae | | Unknown | | Ruminiclostridium | |
| 2- | (14921) U: | 0.021881 | (15216) F: | −0.01795 | (1797) S: | 0.017445 |
| hydroxyglutarate | Unknown | | Clostridiales | | Paraprevotella | |
| | | | unclassified | | xylaniphila | |
| X - 23787 | (4940) S: | 0.080894 | (4564) S: | 0.024221 | (15299) G: | 0.021077 |
| | Roseburia | | Ruminococcus | | Gemmiger | |
| | inulinivorans | | torques | | | |
| 4- | (4714) S: | 0.040799 | (14992) G: | 0.037468 | (4940) S: | −0.03035 |
| hydroxyhippurate | Clostridium sp | | Butyricicoccus | | Roseburia | |
| | | | | | inulinivorans | |
| glycylvaline | (1786) S: | 0.056913 | (17241) S: | 0.055379 | (4342) U: | 0.025881 |
| | Butyricimonas | | Bifidobacterium | | Unknown | |
| | synergistica | | catenulatum | | | |
| cerotoylcarnitine | (4828) S: | 0.058453 | (1903) S: | 0.038339 | (4779) S: | 0.03178 |
| (C26)* | Blautia sp | | Bacteroides | | Clostridium sp | |
| | | | plebeius CAG | | | |
| | | | 211 | | | |
| methylsuccinoylcarnitine | (4933) S: | −0.0424 | (9226) S: | 0.020355 | (6173) S: | 0.01984 |
| (1) | Eubacterium | | Akkermansia | | Clostridium | |
| | rectale | | muciniphila | | sp CAG | |
| | | | | | 221 | |
| X - 15492 | (5843) S: | 0.040621 | (14894) S: | −0.03993 | (1815) S: | −0.03886 |
| | Allisonella | | Anaeromassili | | Bacteroides | |
| | histaminiformans | | bacillus sp | | dorei | |
| | | | An250 | | | |
| X - 23585 | (15451) G: | 0.054984 | (15229) F: | 0.049947 | (2311) F: | 0.033186 |
| | Bilophila | | Clostridiales | | Rikenellaceae | |
| | | | unclassified | | | |
| X - 24556 | (1934) S: | 0.048685 | (17244) S: | −0.03436 | (4303) S: | 0.027297 |
| | Parabacteroides | | Bifidobacterium | | Clostridium | |
| | distasonis | | adolescentis | | sp CAG | |
| | | | | | 217 | |
| N1- | (6962) S: | 0.021221 | (15216) F: | −0.01933 | (5043) S: | −0.01892 |
| methyladenosine | Megamonas | | Clostridiales | | Eubacterium | |
| | funiformis | | unclassified | | sp CAG | |
| | | | | | 156 | |
| 1,2,3- | (15154) F: | 0.03668 | (5111) S: | −0.02883 | (14773) F: | −0.02293 |
| benzenetriol | Clostridiales | | Clostridium sp | | Eggerthellaceae | |
| sulfate (2) | unclassified | | CAG 127 | | | |
| 21- | (4882) S: | −0.05051 | (8002) S: | −0.04853 | (6334) F: | −0.04584 |
| hydroxypregnenolone | Roseburia sp | | Streptococcus | | Clostridiaceae | |
| disulfate | CAG 100 | | thermophilus | | | |
| hexanoylglutamine | (2328) F: | 0.054311 | (4940) S: | 0.047796 | (17249) S: | −0.04182 |
| | Rikenellaceae | | Roseburia | | Bifidobacterium | |
| | | | inulinivorans | | longum | |
| X - 17367 | (14322) S: | 0.056771 | (14844) S: | 0.022509 | (15085) F: | 0.015576 |
| | Eggerthella sp | | Firmicutes | | Clostridiales | |
| | CAG 209 | | bacterium | | unclassified | |
| | | | CAG 94 | | | |
| tridecenedioate | (4826) S: | 0.074521 | (14921) U: | 0.053997 | (4714) S: | −0.0487 |
| (C13:1-DC)* | Blautia sp | | Unknown | | Clostridium sp | |
| phytanate | (14974) U: | 0.023498 | (5075) S: | 0.01916 | (4940) S: | 0.017494 |
| | Unknown | | Lachnospira | | Roseburia | |
| | | | pectinoschiza | | inulinivorans | |
| hydroxy- | (1798) S: | −0.0339 | (5803) S: | −0.03266 | (6141) F: | 0.031911 |
| CMPF* | Paraprevotella | | Dialister sp | | Peptostrep- | |
| | clara | | CAG 357 | | tococcaceae | |
| N-palmitoyl- | (4659) S: | 0.032555 | (5062) G: | −0.03093 | (15315) G: | −0.02939 |
| sphinganine | Clostridium sp | | Firmicutes | | Faecalibacterium | |
| (d18:0/16:0) | CAG 122 | | unclassified | | | |
| 4-methyl-2- | (14909) S: | 0.038456 | (4951) S: | 0.025853 | (15390) U: | −0.02486 |
| oxopentanoate | Clostridium sp | | Roseburia | | Unknown | |
| | CAG 169 | | intestinalis | | | |
| cys-gly, | (14020) U: | −0.0333 | (15350) U: | 0.02773 | (15299) G: | 0.02709 |
| oxidized | Unknown | | Unknown | | Gemmiger | |
| glycerate | (4540) S: | 0.054775 | (4714) S: | 0.031525 | (4705) S: | −0.02888 |
| | Anaerostipes | | Clostridium sp | | Clostridium | |
| | hadrus | | | | sp CAG | |
| | | | | | 43 | |
| bradykinin, | (15158) G: | 0.012129 | (5184) U: | 0.011144 | (6140) S: | −0.00955 |
| des-arg(9) | Flavonifractor | | Unknown | | Intestinibacter | |
| | | | | | bartlettii | |
| 15- | (1957) S: | 0.025477 | (14823) F: | 0.021239 | (15132) S: | 0.019465 |
| methylpalmitate | Bacteroides | | Eggerthellaceae | | Flavonifractor | |
| | sp CAG 144 | | | | plautii | |
| X - 11795 | (4608) S: | −0.05172 | (6750) S: | −0.04128 | (17244) S: | 0.037572 |
| | Ruminococcus | | Clostridium sp | | Bifidobacterium | |
| | torques | | | | adolescentis | |
| 16a-hydroxy | (14991) F: | −0.02375 | (4750) G: | 0.021978 | (6334) F: | −0.01932 |
| DHEA 3-sulfate | Clostridiaceae | | Clostridium | | Clostridiaceae | |
| arachidoylcarnitine | (6750) S: | 0.087103 | (1872) S: | −0.06921 | (17249) S: | −0.06082 |
| (C20)* | Clostridium sp | | Bacteroides | | Bifidobacterium | |
| | | | ovatus | | longum | |
| choline | (6179) G: | 0.02188 | (4198) S: | 0.018296 | (14252) U: | 0.015386 |
| | Clostridium | | Eubacterium | | Unknown | |
| | | | siraeum | | | |
| palmitoyl | (4964) F: | 0.054995 | (4834) G: | 0.038795 | (4953) S: | 0.022056 |
| dihydrosphingomyelin | Eubacteriaceae | | Blautia | | Roseburia | |
| (d18:0/16:0)* | | | | | sp CAG | |
| | | | | | 182 | |
| glycosyl-N- | (4961) G: | 0.043081 | (15390) U: | 0.030939 | (4780) G: | 0.022634 |
| behenoyl- | Eubacterium | | Unknown | | Clostridium | |
| sphingadienine | | | | | | |
| (d18:2/22:0)* | | | | | | |
| hydroxy- | (15216) F: | −0.02635 | (15028) G: | −0.01812 | (9226) S: | −0.01758 |
| N6,N6,N6- | Clostridiales | | Firmicutes | | Akkermansia | |
| trimethyllysine * | unclassified | | unclassified | | muciniphila | |
| lysine | (17278) S: | 0.052259 | (15332) S: | 0.045987 | (6179) G: | 0.038203 |
| | Bifidobacterium | | Faecalibacterium | | Clostridium | |
| | animalis | | prausnitzii | | | |
| tyrosine | (4425) S: | 0.056453 | (8002) S: | 0.040884 | (6179) G: | 0.040077 |
| | Ruminococcus | | Streptococcus | | Clostridium | |
| | sp CAG 254 | | thermophilus | | | |
| androsterone | (4940) S: | 0.043759 | (15315) G: | 0.033205 | (3964) U: | −0.02985 |
| sulfate | Roseburia | | Faecalibacterium | | Unknown | |
| | inulinivorans | | | | | |
| glycodeoxycholate | (4705) S: | 0.045146 | (4829) S: | −0.03794 | (4540) S: | −0.03277 |
| sulfate | Clostridium sp | | Blautia sp | | Anaerostipes | |
| | CAG 43 | | | | hadrus | |
| alpha- | (15154) F: | 0.040527 | (1862) S: | 0.035612 | (1934) S: | 0.027055 |
| tocopherol | Clostridiales | | Bacteroides | | Parabacteroides | |
| | unclassified | | finegoldii | | distasonis | |
| 3-(3- | (15154) F: | 0.083726 | (4938) S: | −0.02004 | (2326) S: | −0.01745 |
| hydroxyphenyl)propionate | Clostridiales | | Roseburia sp | | Faecalibacterium | |
| sulfate | unclassified | | | | prausnitzii | |
| linoleate | (15120) S: | −0.02249 | (15073) G: | 0.020876 | (3957) F: | −0.02028 |
| (18:2n6) | Firmicutes | | Oscillibacter | | Lachnospiraceae | |
| | bacterium | | | | | |
| | CAG 114 | | | | | |
| 17alpha- | (15317) S: | 0.055301 | (8002) S: | −0.03468 | (4779) S: | 0.032196 |
| hydroxypregnenolone 3- | Faecalibacterium | | Streptococcus | | Clostridium sp | |
| sulfate | sp CAG 82 | | thermophilus | | | |
| xanthosine | (9712) S: | 0.043563 | (6506) S: | −0.02903 | (4537) S: | −0.02411 |
| | Haemophilus | | Mycoplasma | | Eubacterium | |
| | parainfluenzae | | sp CAG 472 | | hallii | |
| 4- | (8002) S: | 0.075469 | (15090) S: | 0.033012 | (6179) G: | 0.031415 |
| hydroxyphenyl | Streptococcus | | Oscillibacter | | Clostridium | |
| pyruvate | thermophilus | | sp CAG 241 | | | |
| S- | (15132) S: | −0.03076 | (4652) S: | 0.024054 | (1814) S: | −0.01913 |
| methylcysteine | Flavonifractor | | Clostridium sp | | Bacteroides | |
| | plautii | | CAG 75 | | vulgatus | |
| dodecadienoate | (15120) S: | −0.03576 | (6174) S: | 0.012225 | (15073) G: | 0.008508 |
| (12:2)* | Firmicutes | | Clostridium sp | | Oscillibacter | |
| | bacterium | | CAG 265 | | | |
| | CAG 114 | | | | | |
| 1-palmitoyl-2- | (4936) S: | −0.02797 | (15233) G: | −0.02551 | (1790) S: | −0.02175 |
| palmitoleoyl- | Roseburia | | Firmicutes | | Odoribacter | |
| GPC | hominis | | unclassified | | splanchnicus | |
| (16:0/16:1)* | | | | | | |
| 2- | (4582) S: | −0.05742 | (15342) S: | 0.054321 | (9340) F: | −0.03421 |
| arachidonoylglycerol | Dorea | | Faecalibacterium | | Rhodospirillaceae | |
| (20:4) | longicatena | | prausnitzii | | | |
| sphingomyelin | (4714) S: | −0.07138 | (4826) S: | 0.030292 | (6148) F: | 0.027858 |
| (d18:1/25:0, | Clostridium sp | | Blautia sp | | Peptostrep- | |
| d19:0/24:1, | | | | | tococcaceae | |
| d20:1/23:0, | | | | | | |
| d19:1/24:0)* | | | | | | |
| 1-palmitoyl-2- | (1862) S: | 0.03076 | (1786) S: | 0.028072 | (1948) S: | 0.019686 |
| docosahexaenoyl- | Bacteroides | | Butyricimonas | | Parabacteroides | |
| GPC | finegoldii | | synergistica | | johnsonii | |
| (16:0/22:6) | | | | | | |
| Fibrinopeptide | (4342) U: | −0.03571 | (5045) S: | −0.0354 | (17241) S: | −0.03458 |
| A (7-16)* | Unknown | | Eubacterium | | Bifidobacterium | |
| | | | ventriosum | | catenulatum | |
| N6- | (4834) G: | −0.0168 | (15154) F: | −0.01297 | (6750) S: | 0.010781 |
| carbamoylthre- | Blautia | | Clostridiales | | Clostridium sp | |
| onyladenosine | | | unclassified | | | |
| glycohyocholate | (5843) S: | −0.04941 | (15317) S: | 0.048986 | (4705) S: | −0.04526 |
| | Allisonella | | Faecalibacterium | | Clostridium | |
| | histaminiformans | | sp CAG 82 | | sp CAG | |
| | | | | | 43 | |
| N- | (4779) S: | −0.05561 | (6174) S: | 0.037775 | (1790) S: | 0.031518 |
| oleoyltaurine | Clostridium sp | | Clostridium sp | | Odoribacter | |
| | | | CAG 265 | | splanchnicus | |
| X - 11593 | (4644) S: | −0.0252 | (1790) S: | −0.01633 | (8002) S: | 0.013312 |
| | Clostridium sp | | Odoribacter | | Streptococcus | |
| | CAG 62 | | splanchnicus | | thermophilus | |
| phenyllactate | (14424) G: | 0.032886 | (15146) F: | 0.022813 | (2290) F: | −0.02269 |
| (PLA) | Collinsella | | Clostridiales | | Rikenellaceae | |
| | | | unclassified | | | |
| beta- | (5087) S: | 0.026445 | (17256) S: | −0.02453 | (4871) S: | 0.024255 |
| citrylglutamate | Eubacterium | | Bifidobacterium | | Ruminococcus sp | |
| | sp CAG 86 | | bifidum | | | |
| X - 14314 | (14861) U: | 0.018415 | (6179) G: | 0.016682 | (5087) S: | 0.015524 |
| | Unknown | | Clostridium | | Eubacterium | |
| | | | | | sp CAG | |
| | | | | | 86 | |
| creatine | (5785) S: | 0.033942 | (9283) S: | −0.03123 | (15051) F: | −0.01673 |
| | Phascolarctobacterium | | Sutterella | | Clostridiales | |
| | sp | | wadsworthensis | | unclassified | |
| | CAG 266 | | | | | |
| arabitol/xylitol | (4648) G: | 0.040273 | (4532) S: | 0.0356 | (15054) F: | −0.0352 |
| | Roseburia | | Eubacterium | | Clostridiales | |
| | | | hallii | | unclassified | |
| uridine | (4714) S: | 0.051311 | (5045) S: | 0.049398 | (4261) G: | 0.045529 |
| | Clostridium sp | | Eubacterium | | Blautia | |
| | | | ventriosum | | | |
| ectoine | (15019) F: | 0.043657 | (4577) S: | 0.030343 | (15078) S: | −0.01206 |
| | Clostridiales | | Coprococcus | | Oscillibacter sp | |
| | unclassified | | comes | | | |
| X - 17653 | (17244) S: | 0.042806 | (15266) G: | 0.016781 | (17237) S: | −0.01493 |
| | Bifidobacterium | | Firmicutes | | Bifidobacterium | |
| | adolescentis | | unclassified | | pseudocatenulatum | |
| catechol | (14322) S: | 0.070021 | (4537) S: | −0.03782 | (1877) S: | −0.02423 |
| glucuronide | Eggerthella sp | | Eubacterium | | Bacteroides | |
| | CAG 209 | | hallii | | caccae | |
| X - 18887 | (15318) S: | 0.061995 | (15315) G: | 0.042437 | (15132) S: | −0.02926 |
| | Faecalibacterium | | Faecalibacterium | | Flavonifractor | |
| | prausnitzii | | | | plautii | |
| eicosapentaenoylcholine | (9226) S: | 0.139858 | (4782) U: | −0.06037 | (4771) G: | 0.051517 |
| | Akkermansia | | Unknown | | Clostridium | |
| | muciniphila | | | | | |
| oleate/vaccenate | (15073) G: | 0.02365 | (4804) S: | −0.01695 | (13982) U: | 0.015379 |
| (18:1) | Oscillibacter | | Blautia sp | | Unknown | |
| N- | (8007) S: | 0.021658 | (15318) S: | 0.019103 | (4804) S: | −0.0164 |
| acetylneuraminate | Streptococcus | | Faecalibacterium | | Blautia sp | |
| | salivarius | | prausnitzii | | | |
| X - 16576 | (4842) G: | 0.027401 | (1830) S: | 0.020524 | (14507) G: | 0.01622 |
| | Blautia | | Bacteroides | | Collinsella | |
| | | | stercoris | | | |
| X - 21839 | (4953) S: | 0.035652 | (1812) S: | 0.028987 | (15369) S: | 0.024946 |
| | Roseburia sp | | Bacteroides | | Faecalibacterium | |
| | CAG 182 | | massiliensis | | sp | |
| | | | | | CAG 74 | |
| 1-palmitoyl-2- | (15216) F: | −0.05724 | (4422) S: | −0.03299 | (1790) S: | −0.03035 |
| gamma- | Clostridiales | | Ruminococcus | | Odoribacter | |
| linolenoyl-GPC | unclassified | | callidus | | splanchnicus | |
| (16:0/18:3n6)* | | | | | | |
| 2- | (1965) S: | −0.02435 | (5803) S: | 0.017444 | (5089) S: | 0.01367 |
| aminoheptanoate | Bacteroides | | Dialister sp | | Eubacterium | |
| | sp CAG 20 | | CAG 357 | | sp CAG | |
| | | | | | 38 | |
| palmitoyl | (15395) U: | 0.024214 | (4670) S: | 0.018061 | (15154) F: | 0.017628 |
| sphingomyelin | Unknown | | Coprococcus | | Clostridiales | |
| (d18:1/16:0) | | | catus | | unclassified | |
| nervonoylcarnitine | (4828) S: | 0.076953 | (6139) G: | 0.063631 | (15373) F: | −0.04745 |
| (C24:1)* | Blautia sp | | Intestinibacter | | Ruminococcaceae | |
| X - 24812 | (15154) F: | 0.060738 | (15332) S: | 0.046498 | (15322) S: | 0.040435 |
| | Clostridiales | | Faecalibacterium | | Faecalibacterium | |
| | unclassified | | prausnitzii | | prausnitzii | |
| piperine | (4953) S: | 0.04313 | (4577) S: | 0.022051 | (1812) S: | 0.02156 |
| | Roseburia sp | | Coprococcus | | Bacteroides | |
| | CAG 182 | | comes | | massiliensis | |
| chiro-inositol | (4960) G: | 0.08841 | (4961) G: | 0.030103 | (4714) S: | 0.026816 |
| | Eubacterium | | Eubacterium | | Clostridium sp | |
| X - 23974 | (5082) S: | 0.079081 | (4882) S: | 0.042061 | (5045) S: | −0.03954 |
| | Eubacterium | | Roseburia sp | | Eubacterium | |
| | eligens | | CAG 100 | | ventriosum | |
| 3- | (15154) F: | 0.047145 | (15028) G: | −0.02601 | (14773) F: | −0.02444 |
| methoxycatechol | Clostridiales | | Firmicutes | | Eggerthellaceae | |
| sulfate (1) | unclassified | | unclassified | | | |
| N-trimethyl 5- | (1626) S: | −0.03739 | (8002) S: | 0.034481 | (17278) S: | 0.02913 |
| aminovalerate | Prevotella | | Streptococcus | | Bifidobacterium | |
| | copri | | thermophilus | | animalis | |
| glycochenodeoxycholate | (4829) S: | −0.03975 | (4540) S: | −0.0345 | (1867) S: | −0.03082 |
| glucuronide (1) | Blautia sp | | Anaerostipes | | Bacteroides | |
| | | | hadrus | | xylanisolvens | |
| sphingomyelin | (14894) S: | 0.037895 | (5843) S: | −0.02739 | (5082) S: | 0.023923 |
| (d18:1/20:1, | Anaeromassili | | Allisonella | | Eubacterium | |
| d18:2/20:0)* | bacillus sp | | histaminiformans | | eligens | |
| | An250 | | | | | |
| X - 11470 | (6750) S: | 0.042303 | (14894) S: | −0.03208 | (17237) S: | −0.02299 |
| | Clostridium sp | | Anaeromassili | | Bifidobacterium | |
| | | | bacillus sp | | pseudocatenulatum | |
| | | | An250 | | | |
| X - 21353 | (4940) S: | 0.027706 | (14993) S: | 0.016742 | (15271) S: | −0.01657 |
| | Roseburia | | Butyricicoccus | | Ruthenibacterium | |
| | inulinivorans | | sp | | lactatiformans | |
| X - 12472 | (15073) G: | 0.04229 | (14992) G: | 0.036848 | (15089) S: | −0.02617 |
| | Oscillibacter | | Butyricicoccus | | Firmicutes | |
| | | | | | bacterium | |
| | | | | | CAG 83 | |
| X - 12456 | (1782) G: | 0.035023 | (15265) S: | 0.029642 | (4447) S: | 0.025897 |
| | Butyricimonas | | Firmicutes | | Eubacterium | |
| | | | bacterium | | sp CAG | |
| | | | CAG 103 | | 274 | |
| X - 13866 | (17244) S: | −0.0256 | (17256) S: | −0.0203 | (17248) S: | −0.01956 |
| | Bifidobacterium | | Bifidobacterium | | Bifidobacterium | |
| | adolescentis | | bifidum | | longum | |
| vanillactate | (15318) S: | 0.116428 | (4820) S: | −0.10834 | (9283) S: | −0.0534 |
| | Faecalibacterium | | Blautia sp | | Sutterella | |
| | prausnitzii | | | | wadsworthensis | |
| X - 16580 | (15236) G: | −0.04338 | (14974) U: | 0.035757 | (14823) F: | 0.032492 |
| | Firmicutes | | Unknown | | Eggerthellaceae | |
| | unclassified | | | | | |
| X - 24329 | (9226) S: | −0.03553 | (8601) S: | −0.03325 | (15342) S: | 0.030059 |
| | Akkermansia | | Candidatus | | Faecalibacterium | |
| | muciniphila | | Gastranaerophi- | | prausnitzii | |
| | | | lalesbacterium | | | |
| | | | HUM 10 | | | |
| androsterone | (3964) U: | −0.02893 | (4581) S: | 0.026443 | (4540) S: | −0.02591 |
| glucuronide | Unknown | | Dorea | | Anaerostipes | |
| | | | longicatena | | hadrus | |
| hydroxyasparagine** | (15286) F: | −0.01919 | (14894) S: | −0.0183 | (4644) S: | −0.00988 |
| | Ruminococcaceae | | Anaeromassili | | Clostridium | |
| | | | bacillus sp | | sp CAG | |
| | | | An250 | | 62 | |
| X - 23680 | (4816) S: | −0.05875 | (15049) F: | 0.037889 | (4644) S: | −0.02805 |
| | Blautia sp | | Clostridiales | | Clostridium | |
| | | | unclassified | | sp CAG | |
| | | | | | 62 | |
| 1- | (4871) S: | 0.035893 | (15216) F: | −0.03174 | (1785) S: | 0.028502 |
| oleoylglycerol | Ruminococcus | | Clostridiales | | Butyricimonas | |
| (18:1) | sp | | unclassified | | sp | |
| | | | | | An62 | |
| 1-(1-enyl- | (5843) S: | −0.04398 | (4782) U: | 0.01852 | (4540) S: | 0.017006 |
| palmitoyl)-2- | Allisonella | | Unknown | | Anaerostipes | |
| palmitoleoyl- | histaminiformans | | | | hadrus | |
| GPC | | | | | | |
| (P-16:0/16:1)* | | | | | | |
| heneicosapentaenoate | (1862) S: | 0.028959 | (1830) S: | 0.028546 | (1934) S: | 0.027349 |
| (21:5n3) | Bacteroides | | Bacteroides | | Parabacteroides | |
| | finegoldii | | stercoris | | distasonis | |
| N-palmitoyl- | (15267) G: | −0.07432 | (4577) S: | 0.043384 | (15315) G: | −0.03035 |
| heptadecasphingosine | Firmicutes | | Coprococcus | | Faecalibacterium | |
| (d17:1/16:0)* | unclassified | | comes | | | |
| beta-alanine | (6179) G: | 0.036483 | (4303) S: | 0.030644 | (4868) S: | 0.021474 |
| | Clostridium | | Clostridium sp | | Blautia sp | |
| | | | CAG 217 | | | |
| X - 21474 | (4577) S: | 0.071572 | (1812) S: | 0.070945 | (4964) F: | 0.06871 |
| | Coprococcus | | Bacteroides | | Eubacteriaceae | |
| | comes | | massiliensis | | | |
| 2- | (3957) F: | −0.08473 | (4782) U: | −0.07791 | (15332) S: | 0.065545 |
| docosahexaenoylglycerol | Lachnospiraceae | | Unknown | | Faecalibacterium | |
| (22:6)* | | | | | prausnitzii | |
| margarate | (6174) S: | 0.031011 | (5111) S: | 0.018587 | (14823) F: | 0.016009 |
| (17:0) | Clostridium sp | | Clostridium sp | | Eggerthellaceae | |
| | CAG 265 | | CAG 127 | | | |
| 1-ribosyl- | (4532) S: | 0.033469 | (10068) S: | −0.02988 | (15299) G: | 0.027021 |
| imidazoleacetate* | Eubacterium | | Escherichia | | Gemmiger | |
| | hallii | | coli | | | |
| X - 21295 | (15124) F: | −0.03467 | (14963) S: | −0.03408 | (15317) S: | −0.02242 |
| | Clostridiales | | Anaerotruncus | | Faecalibacterium | |
| | unclassified | | colihominis | | sp | |
| | | | | | CAG 82 | |
| cysteinylglycine | (4705) S: | 0.050438 | (4820) S: | −0.03788 | (17256) S: | −0.02435 |
| disulfide* | Clostridium sp | | Blautia sp | | Bifidobacterium | |
| | CAG 43 | | | | bifidum | |
| tryptophan | (7044) S: | 0.024669 | (6148) F: | 0.024094 | (6179) G: | 0.014877 |
| | Lactobacillus | | Peptostrep- | | Clostridium | |
| | acidophilus | | tococcaceae | | | |
| 1-palmitoyl-2- | (4448) G: | 0.024707 | (4804) S: | −0.02467 | (15385) U: | −0.02404 |
| docosahexaenoyl- | Eubacterium | | Blautia sp | | Unknown | |
| GPE | | | | | | |
| (16:0/22:6)* | | | | | | |
| S- | (4780) G: | −0.06198 | (9226) S: | −0.06129 | (5087) S: | 0.049888 |
| adenosylhomocysteine | Clostridium | | Akkermansia | | Eubacterium | |
| (SAH) | | | muciniphila | | sp CAG | |
| | | | | | 86 | |
| X - 12206 | (6754) S: | 0.045905 | (4804) S: | −0.04158 | (14542) G: | −0.02963 |
| | Clostridium sp | | Blautia sp | | Collinsella | |
| X - 18345 | (6750) S: | 0.04425 | (4581) S: | 0.0225 | (6340) S: | 0.021425 |
| | Clostridium sp | | Dorea | | Clostridium | |
| | | | longicatena | | sp CAG | |
| | | | | | 269 | |
| tauro-beta- | (4198) S: | 0.059583 | (6376) F: | 0.044695 | (4988) S: | 0.037286 |
| muricholate | Eubacterium | | Clostridiaceae | | Eisenbergiella | |
| | siraeum | | | | tayi | |
| phenylpyruvate | (14797) G: | −0.0131 | (4829) S: | −0.00948 | (14250) U: | −0.00898 |
| | Adlercreutzia | | Blautia sp | | Unknown | |
| oleoyl | (1861) S: | 0.025815 | (17244) S: | −0.02307 | (6174) S: | 0.020522 |
| ethanolamide | Bacteroides | | Bifidobacterium | | Clostridium | |
| | thetaiotaomicron | | adolescentis | | sp CAG | |
| | | | | | 265 | |
| 2,3- | (5121) S: | 0.032593 | (6179) G: | 0.028257 | (4940) S: | −0.0211 |
| dihydroxyisovalerate | Clostridium sp | | Clostridium | | Roseburia | |
| | CAG 264 | | | | inulinivorans | |
| X - 16964 | (6367) F: | 0.144376 | (2318) S: | −0.08445 | (15154) F: | 0.067187 |
| | Clostridiaceae | | Alistipes | | Clostridiales | |
| | | | putredinis | | unclassified | |
| X - 12544 | (14816) F: | 0.070887 | (14815) F: | 0.028234 | (1815) S: | −0.01229 |
| | Eggerthellaceae | | Eggerthellaceae | | Bacteroides | |
| | | | | | dorei | |
| arachidate | (14974) U: | 0.034997 | (15073) G: | 0.034994 | (4826) S: | −0.02028 |
| (20:0) | Unknown | | Oscillibacter | | Blautia sp | |
| X - 17655 | (14991) F: | 0.028822 | (1934) S: | −0.01445 | (14853) S: | −0.01095 |
| | Clostridiaceae | | Parabacteroides | | Clostridium | |
| | | | distasonis | | leptum | |
| 5alpha- | (15089) S: | −0.0453 | (15216) F: | 0.037816 | (15106) S: | 0.026238 |
| pregnan- | Firmicutes | | Clostridiales | | Firmicutes | |
| 3beta,20alpha- | bacterium | | unclassified | | bacterium | |
| diol disulfate | CAG 83 | | | | CAG 176 | |
| X - 15486 | (4816) S: | −0.0387 | (4540) S: | −0.03523 | (4564) S: | 0.022071 |
| | Blautia sp | | Anaerostipes | | Ruminococcus | |
| | | | hadrus | | torques | |
| 3,7- | (14921) U: | 0.072531 | (4644) S: | −0.03999 | (7044) S: | 0.018543 |
| dimethylurate | Unknown | | Clostridium sp | | Lactobacillus | |
| | | | CAG 62 | | acidophilus | |

| | Top | Directional | Top | Directional | | |
|---|---|---|---|---|---|---|
| | predictor | SHAP value | predictor | SHAP value | Microbiome | Microbiome |
| BIOCHEMICAL | #4 | #4 | #5 | #5 | Pearson R | p-value |
| X - 16124 | (14807) S: | −0.02307 | (1832) S: | −0.02073 | 0.797711 | 5.83E−106 |
| | Gordonibacter | | Bacteroides | | | |
| | pamelaeae | | clarus | | | |
| X - 11850 | (15091) G: | 0.074793 | (15356) U: | 0.050296 | 0.710316 | 3.80E−74 |
| | Oscillibacter | | Unknown | | | |
| X - 11843 | (15356) U: | 0.082472 | (15091) G: | 0.054271 | 0.666618 | 2.39E−62 |
| | Unknown | | Oscillibacter | | | |
| X - 12261 | (14924) S: | 0.040316 | (15403) U: | 0.022024 | 0.652153 | 7.18E−59 |
| | Firmicutes | | Unknown | | | |
| | bacterium | | | | | |
| | CAG 137 | | | | | |
| X - 12013 | (15356) U: | 0.076366 | (15090) S: | 0.054881 | 0.648938 | 4.01E−58 |
| | Unknown | | Oscillibacter | | | |
| | | | sp CAG | | | |
| | | | 241 | | | |
| p-cresol- | (15216) F: | 0.064128 | (15236) G: | 0.05707 | 0.634979 | 5.55E−55 |
| glucuronide* | Clostridiales | | Firmicutes | | | |
| | unclassified | | unclassified | | | |
| phenylacetylglutamine | (15271) S: | 0.044504 | (15236) G: | 0.043223 | 0.605077 | 9.03E−49 |
| | Ruthenibacterium | | Firmicutes | | | |
| | lactatiformans | | unclassified | | | |
| p-cresol sulfate | (15078) S: | 0.050134 | (15234) S: | 0.048424 | 0.588586 | 1.28E−45 |
| | Oscillibacter | | Firmicutes | | | |
| | sp | | bacterium | | | |
| | | | CAG 124 | | | |
| phenylacetate | (15216) F: | 0.051491 | (15271) S: | 0.03868 | 0.564933 | 2.12E−41 |
| | Clostridiales | | Ruthenibacterium | | | |
| | unclassified | | lactatiformans | | | |
| X - 12816 | (4648) G: | 0.064364 | (4933) S: | −0.06138 | 0.557555 | 3.75E−40 |
| | Roseburia | | Eubacterium | | | |
| | | | rectale | | | |
| quinate | (15295) G: | 0.050549 | (14921) U: | 0.039571 | 0.550659 | 5.16E−39 |
| | Gemmiger | | Unknown | | | |
| 1-methylurate | (14322) S: | 0.079084 | (1861) S: | −0.06844 | 0.543234 | 8.11E−38 |
| | Eggerthella sp | | Bacteroides | | | |
| | CAG 209 | | thetaiotaomicron | | | |
| X - 24811 | (4537) S: | −0.08525 | (4961) G: | 0.072597 | 0.538398 | 4.70E−37 |
| | Eubacterium | | Eubacterium | | | |
| | hallii | | | | | |
| 5-acetylamino- | (14322) S: | 0.073067 | (4714) S: | −0.05909 | 0.525784 | 4.03E−35 |
| 6-amino-3- | Eggerthella sp | | Clostridium | | | |
| methyluracil | CAG 209 | | sp | | | |
| 1- | (14322) S: | 0.067591 | (14993) S: | 0.066044 | 0.522308 | 1.33E−34 |
| methylxanthine | Eggerthella sp | | Butyricicoccus | | | |
| | CAG 209 | | sp | | | |
| 1,7- | (4781) U: | 0.059593 | (4714) S: | −0.05708 | 0.516272 | 1.03E−33 |
| dimethylurate | Unknown | | Clostridium | | | |
| | | | sp | | | |
| cinnamoylglycine | (15332) S: | −0.06417 | (15234) S: | 0.054896 | 0.507231 | 2.02E−32 |
| | Faecalibacterium | | Firmicutes | | | |
| | prausnitzii | | bacterium | | | |
| | | | CAG 124 | | | |
| X - 12126 | (15031) S: | 0.051916 | (14306) S: | 0.050913 | 0.506864 | 2.28E−32 |
| | Firmicutes | | Clostridium | | | |
| | bacterium | | sp CAG | | | |
| | CAG 110 | | 138 | | | |
| 1,3- | (15300) S: | −0.06312 | (4960) G: | −0.06277 | 0.506154 | 2.87E−32 |
| dimethylurate | Gemmiger | | Eubacterium | | | |
| | formicilis | | | | | |
| theophylline | (1861) S: | −0.06265 | (4960) G: | −0.06141 | 0.500431 | 1.80E−31 |
| | Bacteroides | | Eubacterium | | | |
| | thetaiotaomicron | | | | | |
| paraxanthine | (4581) S: | 0.118133 | (4537) S: | −0.08627 | 0.494815 | 1.05E−30 |
| | Dorea | | Eubacterium | | | |
| | longicatena | | hallii | | | |
| X - 21442 | (15085) F: | 0.072256 | (4828) S: | 0.072119 | 0.48591 | 1.63E−29 |
| | Clostridiales | | Blautia sp | | | |
| | unclassified | | | | | |
| 1,3,7- | (15295) G: | 0.081972 | (1861) S: | −0.07762 | 0.481535 | 6.07E−29 |
| trimethylurate | Gemmiger | | Bacteroides | | | |
| | | | thetaiotaomicron | | | |
| X - 12851 | (6783) S: | −0.05044 | (4659) S: | −0.04491 | 0.479291 | 1.18E−28 |
| | Catenibacterium | | Clostridium | | | |
| | sp CAG | | sp CAG | | | |
| | 290 | | 122 | | | |
| caffeine | (4781) U: | 0.062834 | (14921) U: | 0.043182 | 0.479016 | 1.28E−28 |
| | Unknown | | Unknown | | | |
| X - 12216 | (15356) U: | 0.051318 | (15271) S: | 0.042737 | 0.47398 | 5.63E−28 |
| | Unknown | | Ruthenibacterium | | | |
| | | | lactatiformans | | | |
| N-acetyl- | (5090) S: | −0.0408 | (2301) S: | 0.035489 | 0.464233 | 9.20E−27 |
| cadaverine | Clostridiales | | Alistipes | | | |
| | bacterium | | finegoldii | | | |
| | KLE1615 | | | | | |
| 3- | (4782) U: | 0.042376 | (15234) S: | 0.036809 | 0.463566 | 1.11E−26 |
| phenylpropionate | Unknown | | Firmicutes | | | |
| (hydrocinnamate) | | | bacterium | | | |
| | | | CAG 124 | | | |
| glycolithocholate | (2318) S: | 0.050941 | (14807) S: | 0.047899 | 0.45829 | 4.84E−26 |
| sulfate* | Alistipes | | Gordonibacter | | | |
| | putredinis | | pamelaeae | | | |
| phenylacetylcarnitine | (15244) F: | 0.060642 | (15385) U: | 0.055794 | 0.452403 | 2.43E−25 |
| | Clostridiales | | Unknown | | | |
| | unclassified | | | | | |
| isoursodeoxycholate | (4749) S: | 0.057406 | (15054) F: | −0.0571 | 0.4503 | 4.28E−25 |
| | Clostridium sp | | Clostridiales | | | |
| | CAG 7 | | unclassified | | | |
| X - 12837 | (15395) U: | 0.080074 | (5065) S: | 0.055587 | 0.449837 | 4.85E−25 |
| | Unknown | | Butyrivibrio | | | |
| | | | crossotus | | | |
| X - 24410 | (4882) S: | −0.05591 | (14575) G: | 0.04456 | 0.444238 | 2.16E−24 |
| | Roseburia sp | | Collinsella | | | |
| | CAG 100 | | | | | |
| 5alpha- | (15196) F: | 0.05097 | (1957) S: | 0.049039 | 0.437404 | 1.28E−23 |
| androstan- | Clostridiales | | Bacteroides | | | |
| 3beta,17alpha- | unclassified | | sp CAG | | | |
| diol disulfate | | | 144 | | | |
| X - 21821 | (4608) S: | −0.05078 | (4540) S: | 0.050724 | 0.433422 | 3.56E−23 |
| | Ruminococcus | | Anaerostipes | | | |
| | torques | | hadrus | | | |
| 3-methyl | (14993) S: | 0.044922 | (15315) G: | −0.04294 | 0.430459 | 7.55E−23 |
| catechol | Butyricicoccus | | Faecalibacterium | | | |
| sulfate (1) | sp | | | | | |
| X - 17612 | (15216) F: | 0.057974 | (3940) U: | 0.057185 | 0.42642 | 2.08E−22 |
| | Clostridiales | | Unknown | | | |
| | unclassified | | | | | |
| 3- | (15295) G: | 0.052344 | (4961) G: | 0.047287 | 0.421956 | 6.25E−22 |
| hydroxypyridine | Gemmiger | | Eubacterium | | | |
| sulfate | | | | | | |
| X - 23655 | (4537) S: | −0.08553 | (15295) G: | 0.081629 | 0.419593 | 1.11E−21 |
| | Eubacterium | | Gemmiger | | | |
| | hallii | | | | | |
| X - 17351 | (4608) S: | −0.04254 | (4711) F: | 0.041302 | 0.4165 | 2.35E−21 |
| | Ruminococcus | | Clostridiaceae | | | |
| | torques | | | | | |
| X - 23997 | (3957) F: | 0.079964 | (15078) S: | 0.063895 | 0.41358 | 4.74E−21 |
| | Lachnospiraceae | | Oscillibacter | | | |
| | | | sp | | | |
| 4- | (15315) G: | −0.05002 | (15295) G: | 0.047266 | 0.413294 | 5.07E−21 |
| ethylcatechol | Faecalibacterium | | Gemmiger | | | |
| sulfate | | | | | | |
| X - 13729 | (14921) U: | 0.037359 | (5117) S: | −0.03645 | 0.412317 | 6.40E−21 |
| | Unknown | | Coprococcus | | | |
| | | | eutactus | | | |
| ursodeoxycholate | (6367) F: | −0.07313 | (2325) S: | −0.06835 | 0.412223 | 6.54E−21 |
| | Clostridiaceae | | Alistipes | | | |
| | | | indistinctus | | | |
| taurolithocholate | (6148) F: | −0.03866 | (4552) S: | 0.0376 | 0.409121 | 1.36E−20 |
| 3-sulfate | Peptostrep- | | Ruminococcus | | | |
| | tococcaceae | | sp | | | |
| X - 17469 | (4705) S: | 0.05358 | (4938) S: | 0.050476 | 0.405438 | 3.21E−20 |
| | Clostridium sp | | Roseburia | | | |
| | CAG 43 | | sp | | | |
| X - 23649 | (15073) G: | 0.122182 | (4537) S: | −0.10713 | 0.405318 | 3.30E−20 |
| | Oscillibacter | | Eubacterium | | | |
| | | | hallii | | | |
| 4- | (9226) S: | 0.027671 | (15271) S: | 0.026973 | 0.403773 | 4.72E−20 |
| methylcatechol | Akkermansia | | Ruthenibacterium | | | |
| sulfate | muciniphila | | lactatiformans | | | |
| indolepropionate | (4714) S: | 0.046985 | (4584) S: | −0.04353 | 0.402571 | 6.23E−20 |
| | Clostridium sp | | Ruminococcus | | | |
| | | | gnavus | | | |
| citraconate/ | (4537) S: | −0.05218 | (14322) S: | 0.051828 | 0.397921 | 1.80E−19 |
| glutaconate | Eubacterium | | Eggerthella | | | |
| | hallii | | sp CAG | | | |
| | | | 209 | | | |
| X - 21752 | (4782) U: | 0.051235 | (15467) S: | −0.03926 | 0.397715 | 1.88E−19 |
| | Unknown | | Desulfovibrio | | | |
| | | | piger | | | |
| X - 24243 | (14624) G: | 0.053135 | (1867) S: | −0.05313 | 0.397632 | 1.92E−19 |
| | Collinsella | | Bacteroides | | | |
| | | | xylanisolvens | | | |
| 1-(1-enyl- | (4782) U: | −0.05491 | (15370) F: | −0.05439 | 0.390492 | 9.43E−19 |
| palmitoyl)-2- | Unknown | | Ruminococcaceae | | | |
| arachidonoyl- | | | | | | |
| GPE | | | | | | |
| (P-16:0/20:4)* | | | | | | |
| 5alpha- | (15350) U: | 0.068515 | (4940) S: | 0.058214 | 0.388836 | 1.36E−18 |
| androstan- | Unknown | | Roseburia | | | |
| 3alpha,17beta- | | | inulinivorans | | | |
| diol | | | | | | |
| monosulfate | | | | | | |
| (2) | | | | | | |
| hippurate | (15085) F: | 0.037015 | (4537) S: | −0.03406 | 0.388495 | 1.46E−18 |
| | Clostridiales | | Eubacterium | | | |
| | unclassified | | hallii | | | |
| 5- | (15403) U: | 0.073587 | (15236) G: | 0.058161 | 0.383075 | 4.74E−18 |
| hydroxyhexanoate | Unknown | | Firmicutes | | | |
| | | | unclassified | | | |
| indolin-2-one | (9283) S: | −0.03591 | (14999) U: | 0.033183 | 0.382394 | 5.49E−18 |
| | Sutterella | | Unknown | | | |
| | wadsworthensis | | | | | |
| X - 17145 | (4960) G: | 0.051903 | (4933) S: | −0.0451 | 0.381408 | 6.77E−18 |
| | Eubacterium | | Eubacterium | | | |
| | | | rectale | | | |
| 2,3- | (14921) U: | 0.108246 | (4960) G: | −0.10493 | 0.38057 | 8.10E−18 |
| dihydroxypyridine | Unknown | | Eubacterium | | | |
| X - 17354 | (4575) S: | −0.05936 | (15236) G: | 0.057047 | 0.376788 | 1.80E−17 |
| | Dorea | | Firmicutes | | | |
| | formicigenerans | | unclassified | | | |
| glycodeoxycholate | (4659) S: | −0.08326 | (15143) S: | 0.083256 | 0.376238 | 2.03E−17 |
| | Clostridium sp | | Flavonifractor | | | |
| | CAG 122 | | sp | | | |
| X - 23639 | (14322) S: | 0.047223 | (6962) S: | −0.04332 | 0.373791 | 3.38E−17 |
| | Eggerthella sp | | Megamonas | | | |
| | CAG 209 | | funiformis | | | |
| 6- | (9283) S: | −0.03609 | (14999) U: | 0.035525 | 0.370164 | 7.15E−17 |
| hydroxyindole | Sutterella | | Unknown | | | |
| sulfate | wadsworthensis | | | | | |
| X - 12306 | (6747) S: | −0.04692 | (4581) S: | −0.04658 | 0.365101 | 2.01E−16 |
| | Clostridium | | Dorea | | | |
| | spiroforme | | longicatena | | | |
| phenol sulfate | (15254) F: | −0.03453 | (17244) S: | −0.02993 | 0.363893 | 2.56E−16 |
| | Clostridiales | | Bifidobacterium | | | |
| | unclassified | | adolescentis | | | |
| 5-acetylamino- | (4914) S: | −0.0518 | (4537) S: | −0.04073 | 0.363687 | 2.67E−16 |
| 6-formylamino- | Clostridium sp | | Eubacterium | | | |
| 3-methyluracil | | | hallii | | | |
| 1,5- | (5068) S: | −0.03729 | (4924) G: | −0.03657 | 0.362851 | 3.15E−16 |
| anhydroglucitol | Bacteroides | | Roseburia | | | |
| (1,5-AG) | pectinophilus | | | | | |
| | CAG 437 | | | | | |
| N- | (4779) S: | 0.044408 | (4540) S: | −0.04234 | 0.361999 | 3.74E−16 |
| acetylcarnosine | Clostridium sp | | Anaerostipes | | | |
| | | | hadrus | | | |
| 3-indoxyl | (14999) U: | 0.031692 | (14853) S: | 0.029993 | 0.358283 | 7.82E−16 |
| sulfate | Unknown | | Clostridium | | | |
| | | | leptum | | | |
| maleate | (14807) S: | −0.06106 | (15295) G: | 0.056944 | 0.355938 | 1.24E−15 |
| | Gordonibacter | | Gemmiger | | | |
| | pamelaeae | | | | | |
| L-urobilin | (14311) F: | 0.047228 | (14909) S: | 0.043864 | 0.354595 | 1.61E−15 |
| | Clostridiaceae | | Clostridium | | | |
| | | | sp CAG | | | |
| | | | 169 | | | |
| X - 21286 | (15234) S: | 0.044237 | (6140) S: | −0.0435 | 0.351181 | 3.11E−15 |
| | Firmicutes | | Intestinibacter | | | |
| | bacterium | | bartlettii | | | |
| | CAG 124 | | | | | |
| X - 12718 | (15271) S: | 0.050914 | (5190) S: | 0.049193 | 0.350751 | 3.38E−15 |
| | Ruthenibacterium | | Firmicutes | | | |
| | lactatiformans | | bacterium | | | |
| | | | CAG 102 | | | |
| carotene diol | (4705) S: | −0.06239 | (4581) S: | −0.04134 | 0.350531 | 3.53E−15 |
| (2) | Clostridium sp | | Dorea | | | |
| | CAG 43 | | longicatena | | | |
| X - 21310 | (4581) S: | 0.04046 | (6754) S: | −0.03592 | 0.349667 | 4.16E−15 |
| | Dorea | | Clostridium | | | |
| | longicatena | | sp | | | |
| X - 14662 | (4862) S: | 0.036385 | (4925) S: | 0.036061 | 0.346125 | 8.16E−15 |
| | Blautia sp | | Roseburia | | | |
| | CAG 257 | | faecis | | | |
| glycoursodeoxycholate | (4552) S: | −0.04884 | (9226) S: | −0.0399 | 0.343447 | 1.35E−14 |
| | Ruminococcus | | Akkermansia | | | |
| | sp | | muciniphila | | | |
| X - 12283 | (4940) S: | −0.04039 | (14861) U: | 0.03973 | 0.342573 | 1.59E−14 |
| | Roseburia | | Unknown | | | |
| | inulinivorans | | | | | |
| X - 11315 | (4651) S: | 0.036928 | (4964) F: | 0.03536 | 0.339457 | 2.83E−14 |
| | Clostridium sp | | Eubacteriaceae | | | |
| | CAG 230 | | | | | |
| trigonelline | (1861) S: | −0.0463 | (14921) U: | 0.034628 | 0.338307 | 3.50E−14 |
| (N′- | Bacteroides | | Unknown | | | |
| methylnicotinate) | thetaiotaomicron | | | | | |
| X - 16654 | (9347) S: | 0.037811 | (15322) S: | −0.03683 | 0.338005 | 3.70E−14 |
| | Azospirillum | | Faecalibacterium | | | |
| | sp CAG 260 | | prausnitzii | | | |
| X - 22162 | (15081) F: | 0.046343 | (15369) S: | 0.045969 | 0.336432 | 4.93E−14 |
| | Clostridiales | | Faecalibacterium | | | |
| | unclassified | | sp | | | |
| | | | CAG 74 | | | |
| X - 12329 | (4537) S: | −0.07682 | (4961) G: | 0.066374 | 0.336052 | 5.28E−14 |
| | Eubacterium | | Eubacterium | | | |
| | hallii | | | | | |
| ergothioneine | (4714) S: | 0.04008 | (4581) S: | −0.03351 | 0.333717 | 8.07E−14 |
| | Clostridium sp | | Dorea | | | |
| | | | longicatena | | | |
| anthranilate | (4706) F: | −0.05931 | (1814) S: | −0.04385 | 0.331065 | 1.30E−13 |
| | Clostridiaceae | | Bacteroides | | | |
| | | | vulgatus | | | |
| cholate | (5190) S: | −0.03369 | (6140) S: | 0.026256 | 0.327602 | 2.40E−13 |
| | Firmicutes | | Intestinibacter | | | |
| | bacterium | | bartlettii | | | |
| | CAG 102 | | | | | |
| 4- | (15229) F: | 0.041976 | (4909) G: | 0.041059 | 0.327393 | 2.49E−13 |
| hydroxycoumarin | Clostridiales | | Clostridium | | | |
| | unclassified | | | | | |
| X - 11880 | (4581) S: | 0.046825 | (15271) S: | −0.03851 | 0.326318 | 3.01E−13 |
| | Dorea | | Ruthenibacterium | | | |
| | longicatena | | lactatiformans | | | |
| X - 22509 | (15369) S: | 0.038586 | (15054) F: | 0.034081 | 0.320452 | 8.35E−13 |
| | Faecalibacterium | | Clostridiales | | | |
| | sp CAG 74 | | unclassified | | | |
| 1-lignoceroyl- | (15332) S: | −0.0409 | (14991) F: | 0.040444 | 0.320154 | 8.79E−13 |
| GPC (24:0) | Faecalibacterium | | Clostridiaceae | | | |
| | prausnitzii | | | | | |
| N2,N5- | (14501) S: | −0.04328 | (4714) S: | 0.041264 | 0.318295 | 1.21E−12 |
| diacetylornithine | Collinsella | | Clostridium | | | |
| | aerofaciens | | sp | | | |
| 3-methyl | (4537) S: | −0.07471 | (15154) F: | 0.069279 | 0.314349 | 2.36E−12 |
| catechol | Eubacterium | | Clostridiales | | | |
| sulfate (2) | hallii | | unclassified | | | |
| glutarate | (4564) S: | 0.031254 | (4782) U: | −0.03113 | 0.313428 | 2.75E−12 |
| (pentanedioate) | Ruminococcus | | Unknown | | | |
| | torques | | | | | |
| X - 18249 | (4834) G: | −0.04302 | (4826) S: | 0.042088 | 0.311953 | 3.52E−12 |
| | Blautia | | Blautia sp | | | |
| methyl | (1963) S: | −0.0403 | (15132) S: | −0.03755 | 0.309776 | 5.05E−12 |
| glucopyranoside | Coprobacter | | Flavonifractor | | | |
| (alpha + | fastidiosus | | plautii | | | |
| beta) | | | | | | |
| 7- | (15342) S: | 0.048362 | (2295) S: | −0.04184 | 0.307995 | 6.77E−12 |
| methylguanine | Faecalibacterium | | Alistipes | | | |
| | prausnitzii | | shahii | | | |
| X - 11308 | (17244) S: | 0.05329 | (9226) S: | −0.04105 | 0.307272 | 7.62E−12 |
| | Bifidobacterium | | Akkermansia | | | |
| | adolescentis | | muciniphila | | | |
| X - 12738 | (15154) F: | 0.068911 | (14861) U: | 0.064852 | 0.302725 | 1.59E−11 |
| | Clostridiales | | Unknown | | | |
| | unclassified | | | | | |
| gentisate | (4714) S: | 0.037631 | (15132) S: | −0.03215 | 0.300645 | 2.22E−11 |
| | Clostridium sp | | Flavonifractor | | | |
| | | | plautii | | | |
| carotene diol | (4816) S: | 0.047076 | (4564) S: | −0.04206 | 0.295736 | 4.83E−11 |
| (1) | Blautia sp | | Ruminococcus | | | |
| | | | torques | | | |
| 5alpha- | (15332) S: | 0.068124 | (5736) S: | 0.052653 | 0.291715 | 9.02E−11 |
| androstan- | Faecalibacterium | | Acidaminococcus | | | |
| 3alpha,17beta- | prausnitzii | | intestini | | | |
| diol disulfate | | | | | | |
| X - 11372 | (3964) U: | −0.03458 | (4581) S: | 0.033513 | 0.290936 | 1.02E−10 |
| | Unknown | | Dorea | | | |
| | | | longicatena | | | |
| X - 17185 | (4961) G: | 0.057189 | (14861) U: | 0.046666 | 0.29084 | 1.03E−10 |
| | Eubacterium | | Unknown | | | |
| X - 23652 | (4925) S: | 0.028414 | (2303) S: | −0.02823 | 0.290612 | 1.07E−10 |
| | Roseburia | | Alistipes | | | |
| | faecis | | finegoldii | | | |
| X - 18240 | (1798) S: | 0.041467 | (6140) S: | −0.04124 | 0.289972 | 1.18E−10 |
| | Paraprevotella | | Intestinibacter | | | |
| | clara | | bartlettii | | | |
| X - 18914 | (6139) G: | −0.04465 | (5075) S: | 0.043974 | 0.289125 | 1.34E−10 |
| | Intestinibacter | | Lachnospira | | | |
| | | | pectinoschiza | | | |
| X - 22520 | (6962) S: | 0.057831 | (2295) S: | −0.05649 | 0.287183 | 1.80E−10 |
| | Megamonas | | Alistipes | | | |
| | funiformis | | shahii | | | |
| 3-(3- | (6359) F: | 0.047664 | (4771) G: | −0.0456 | 0.286363 | 2.04E−10 |
| hydroxyphe- | Clostridiaceae | | Clostridium | | | |
| nyl)propionate | | | | | | |
| dimethyl | (4669) G: | 0.043094 | (8010) S: | −0.03642 | 0.286074 | 2.13E−10 |
| sulfoxide | Coprococcus | | Streptococcus | | | |
| (DMSO) | | | salivarius | | | |
| threonate | (6367) F: | 0.042789 | (4564) S: | −0.03099 | 0.283418 | 3.17E−10 |
| | Clostridiaceae | | Ruminococcus | | | |
| | | | torques | | | |
| X - 12730 | (15073) G: | 0.061366 | (15154) F: | 0.058999 | 0.283413 | 3.17E−10 |
| | Oscillibacter | | Clostridiales | | | |
| | | | unclassified | | | |
| X - 19434 | (1845) S: | −0.02893 | (6174) S: | 0.025256 | 0.281736 | 4.07E−10 |
| | Bacteroides | | Clostridium | | | |
| | intestinalis | | sp CAG | | | |
| | CAG 315 | | 265 | | | |
| X - 24948 | (15317) S: | 0.038143 | (3964) U: | −0.03749 | 0.281466 | 4.24E−10 |
| | Faecalibacterium | | Unknown | | | |
| | sp CAG 82 | | | | | |
| 1-(1-enyl- | (4557) S: | 0.057641 | (4712) F: | −0.05646 | 0.280904 | 4.61E−10 |
| stearoyl)-2- | Ruminococcus | | Clostridiaceae | | | |
| arachidonoyl- | lactaris | | | | | |
| GPE | | | | | | |
| (P-18:0/20:4)* | | | | | | |
| X - 23659 | (14992) G: | 0.045353 | (6367) F: | 0.036691 | 0.280788 | 4.69E−10 |
| | Butyricicoccus | | Clostridiaceae | | | |
| 5alpha- | (15315) G: | 0.046046 | (4581) S: | 0.043609 | 0.280509 | 4.88E−10 |
| androstan- | Faecalibacterium | | Dorea | | | |
| 3alpha,17alpha- | | | longicatena | | | |
| diol | | | | | | |
| monosulfate | | | | | | |
| X - 21339 | (5736) S: | 0.031775 | (4581) S: | 0.031682 | 0.280474 | 4.91E−10 |
| | Acidaminococcus | | Dorea | | | |
| | intestini | | longicatena | | | |
| 4- | (3940) U: | 0.024509 | (4964) F: | 0.021158 | 0.277385 | 7.72E−10 |
| ethylphenylsulfate | Unknown | | Eubacteriaceae | | | |
| gamma- | (6754) S: | −0.06004 | (8002) S: | 0.057386 | 0.27641 | 8.89E−10 |
| glutamylvaline | Clostridium sp | | Streptococcus | | | |
| | | | thermophilus | | | |
| beta- | (4714) S: | 0.033087 | (4750) G: | −0.02983 | 0.276078 | 9.33E−10 |
| cryptoxanthin | Clostridium sp | | Clostridium | | | |
| sphingomyelin | (4893) S: | −0.03112 | (15154) F: | 0.025029 | 0.274995 | 1.09E−09 |
| (d18:1/14:0, | Clostridium sp | | Clostridiales | | | |
| d16:1/16:0)* | | | unclassified | | | |
| X - 21736 | (15132) S: | 0.043581 | (15452) S: | 0.036154 | 0.274785 | 1.12E−09 |
| | Flavonifractor | | Bilophila | | | |
| | plautii | | sp 4 1 30 | | | |
| O-methylcatechol | (4957) F: | 0.052341 | (15315) G: | −0.03872 | 0.273918 | 1.27E−09 |
| sulfate | Eubacteriaceae | | Faecalibacterium | | | |
| N-(2- | (4537) S: | −0.05892 | (15073) G: | 0.047175 | 0.272049 | 1.66E−09 |
| furoyl)glycine | Eubacterium | | Oscillibacter | | | |
| | hallii | | | | | |
| sphingomyelin | (15154) F: | 0.043901 | (15271) S: | 0.034396 | 0.270071 | 2.20E−09 |
| (d17:2/16:0, | Clostridiales | | Ruthenibacterium | | | |
| d18:2/15:0)* | unclassified | | lactatiformans | | | |
| 3- | (4925) S: | 0.024555 | (4643) S: | −0.02344 | 0.268147 | 2.89E−09 |
| methylhistidine | Roseburia | | Clostridium | | | |
| | faecis | | sp CAG | | | |
| | | | 167 | | | |
| X - 13835 | (2303) S: | −0.03515 | (4705) S: | 0.031703 | 0.26789 | 2.99E−09 |
| | Alistipes | | Clostridium | | | |
| | finegoldii | | sp CAG | | | |
| | | | 43 | | | |
| propionylcarnitine | (2303) S: | −0.0446 | (1626) S: | 0.041882 | 0.266513 | 3.63E−09 |
| (C3) | Alistipes | | Prevotella | | | |
| | finegoldii | | copri | | | |
| 3- | (15028) G: | −0.04153 | (14322) S: | 0.038473 | 0.26643 | 3.67E−09 |
| hydroxyhippurate | Firmicutes | | Eggerthella | | | |
| | unclassified | | sp CAG | | | |
| | | | 209 | | | |
| X - 11640 | (15196) F: | 0.026176 | (15369) S: | 0.019358 | 0.264807 | 4.60E−09 |
| | Clostridiales | | Faecalibacterium sp | | | |
| | unclassified | | CAG 74 | | | |
| 3-acetylphenol | (14807) S: | −0.08154 | (15154) F: | 0.069366 | 0.259657 | 9.30E−09 |
| sulfate | Gordonibacter | | Clostridiales | | | |
| | pamelaeae | | unclassified | | | |
| myo-inositol | (6367) F: | 0.042731 | (4810) S: | 0.041682 | 0.257234 | 1.29E−08 |
| | Clostridiaceae | | Blautia sp | | | |
| | | | CAG 237 | | | |
| sphingomyelin | (5089) S: | −0.03696 | (5082) S: | 0.035874 | 0.255615 | 1.60E−08 |
| (d18:2/23:1)* | Eubacterium | | Eubacterium | | | |
| | sp CAG 38 | | eligens | | | |
| 2-naphthol | (1949) S: | 0.054633 | (4581) S: | 0.040863 | 0.255159 | 1.70E−08 |
| sulfate | Parabacteroides | | Dorea | | | |
| | merdae | | longicatena | | | |
| N-delta- | (15291) F: | 0.024447 | (4575) S: | −0.02209 | 0.254419 | 1.88E−08 |
| acetylornithine | Ruminococcaceae | | Dorea | | | |
| | | | formicigenerans | | | |
| benzoylcarnitine* | (6376) F: | 0.035481 | (6334) F: | 0.028441 | 0.254127 | 1.95E−08 |
| | Clostridiaceae | | Clostridiaceae | | | |
| X - 24473 | (4964) F: | 0.044069 | (4826) S: | −0.04362 | 0.253631 | 2.08E−08 |
| | Eubacteriaceae | | Blautia sp | | | |
| X - 11381 | (14861) U: | 0.032022 | (4959) S: | 0.031907 | 0.253541 | 2.11E−08 |
| | Unknown | | Eubacterium | | | |
| | | | ramulus | | | |
| X - 22834 | (15286) F: | −0.05354 | (4749) S: | 0.039812 | 0.252464 | 2.43E−08 |
| | Ruminococcaceae | | Clostridium | | | |
| | | | sp CAG | | | |
| | | | 7 | | | |
| oxalate | (6367) F: | 0.044268 | (10068) S: | −0.03791 | 0.252363 | 2.46E−08 |
| (ethanedioate) | Clostridiaceae | | Escherichia | | | |
| | | | coli | | | |
| alpha- | (15373) F: | −0.03805 | (4925) S: | 0.033112 | 0.250964 | 2.95E−08 |
| hydroxyisovalerate | Ruminococcaceae | | Roseburia | | | |
| | | | faecis | | | |
| X - 24693 | (4987) S: | −0.04606 | (1812) S: | 0.043868 | 0.2507 | 3.06E−08 |
| | Clostridium sp | | Bacteroides | | | |
| | KLE 1755 | | massiliensis | | | |
| X - 24736 | (4714) S: | 0.079137 | (4575) S: | −0.07629 | 0.246434 | 5.30E−08 |
| | Clostridium sp | | Dorea | | | |
| | | | formicigenerans | | | |
| 1H-indole-7- | (15091) G: | 0.056908 | (4564) S: | 0.030947 | 0.24595 | 5.64E−08 |
| acetic acid | Oscillibacter | | Ruminococcus | | | |
| | | | torques | | | |
| urate | (1814) S: | 0.034955 | (1815) S: | −0.03475 | 0.244634 | 6.67E−08 |
| | Bacteroides | | Bacteroides | | | |
| | vulgatus | | dorei | | | |
| taurodeoxycholate | (5121) S: | −0.05448 | (15143) S: | 0.043859 | 0.244395 | 6.87E−08 |
| | Clostridium sp | | Flavonifractor | | | |
| | CAG 264 | | sp | | | |
| sphingomyelin | (4581) S: | −0.03447 | (4552) S: | 0.034054 | 0.243856 | 7.36E−08 |
| (d18:2/14:0, | Dorea | | Ruminococcus | | | |
| d18:1/14:)* | longicatena | | sp | | | |
| glycolithocholate | (6328) S: | 0.027553 | (6140) S: | −0.02364 | 0.242929 | 8.27E−08 |
| | Clostridium sp | | Intestinibacter | | | |
| | CAG 492 | | bartlettii | | | |
| X - 15728 | (4828) S: | 0.038362 | (4782) U: | 0.036873 | 0.240255 | 1.16E−07 |
| | Blautia sp | | Unknown | | | |
| creatinine | (5082) S: | −0.03098 | (15216) F: | −0.02912 | 0.239951 | 1.20E−07 |
| | Eubacterium | | Clostridiales | | | |
| | eligens | | unclassified | | | |
| X - 15461 | (14823) F: | 0.032212 | (14999) U: | 0.028796 | 0.239102 | 1.33E−07 |
| | Eggerthellaceae | | Unknown | | | |
| X - 12822 | (15154) F: | 0.032025 | (4706) F: | 0.031506 | 0.238793 | 1.39E−07 |
| | Clostridiales | | Clostridiaceae | | | |
| | unclassified | | | | | |
| 4-allylphenol | (15342) S: | −0.04237 | (4816) S: | 0.039765 | 0.236489 | 1.84E−07 |
| sulfate | Faecalibacterium | | Blautia sp | | | |
| | prausnitzii | | | | | |
| X - 23782 | (15238) S: | −0.03371 | (4905) F: | 0.029554 | 0.23624 | 1.90E−07 |
| | Firmicutes | | Clostridiaceae | | | |
| | bacterium | | | | | |
| | CAG 170 | | | | | |
| X - 12212 | (1934) S: | −0.03851 | (4826) S: | −0.03332 | 0.234166 | 2.44E−07 |
| | Parabacteroides | | Blautia sp | | | |
| | distasonis | | | | | |
| tryptophan | (15342) S: | 0.034674 | (4953) S: | 0.033559 | 0.233846 | 2.54E−07 |
| betaine | Faecalibacterium | | Roseburia | | | |
| | prausnitzii | | sp CAG | | | |
| | | | 182 | | | |
| I-urobilinogen | (15369) S: | −0.02395 | (4882) S: | −0.02222 | 0.232742 | 2.90E−07 |
| | Faecalibacterium | | Roseburia | | | |
| | sp CAG 74 | | sp CAG | | | |
| | | | 100 | | | |
| sphingomyelin | (15271) S: | 0.025408 | (4704) F: | −0.02446 | 0.232659 | 2.93E−07 |
| (d18:1/19:0, | Ruthenibacterium | | Clostridiaceae | | | |
| d19:1/18:0)* | lactatiformans | | | | | |
| 3-carboxy-4- | (17256) S: | −0.02289 | (4303) S: | 0.02171 | 0.232549 | 2.97E−07 |
| methyl-5- | Bifidobacterium | | Clostridium | | | |
| pentyl-2- | bifidum | | sp CAG | | | |
| furanpropionate | | | 217 | | | |
| (3-CMPFP)** | | | | | | |
| X - 16935 | (10130) S: | −0.04385 | (5736) S: | 0.043701 | 0.232166 | 3.11E−07 |
| | Enterobacter | | Acidaminococcus | | | |
| | cloacae | | intestini | | | |
| sphingomyelin | (15154) F: | 0.031681 | (4670) S: | 0.03152 | 0.231765 | 3.26E−07 |
| (d17:1/16:0, | Clostridiales | | Coprococcus | | | |
| d18:1/15:0, | unclassified | | catus | | | |
| d16:1/17:0)* | | | | | | |
| X - 21829 | (14992) G: | 0.038018 | (15236) G: | −0.03395 | 0.231762 | 3.26E−07 |
| | Butyricicoccus | | Firmicutes | | | |
| | | | unclassified | | | |
| cystine | (4810) S: | 0.02337 | (6783) S: | 0.015823 | 0.231219 | 3.48E−07 |
| | Blautia sp | | Catenibacterium | | | |
| | CAG 237 | | sp | | | |
| | | | CAG 290 | | | |
| X - 24475 | (17244) S: | −0.0296 | (4960) G: | 0.026498 | 0.23117 | 3.50E−07 |
| | Bifidobacterium | | Eubacterium | | | |
| | adolescentis | | | | | |
| 1-stearoyl-2- | (15225) F: | −0.02058 | (15332) S: | 0.019803 | 0.229344 | 4.35E−07 |
| docosahexaenoyl-GPC | Clostridiales | | Faecalibacterium | | | |
| (18:0/22:6) | unclassified | | prausnitzii | | | |
| X - 24951 | (4951) S: | 0.03707 | (4940) S: | 0.028743 | 0.229246 | 4.41E−07 |
| | Roseburia | | Roseburia | | | |
| | intestinalis | | inulinivorans | | | |
| X - 24949 | (9226) S: | −0.05326 | (14853) S: | −0.04316 | 0.228719 | 4.69E−07 |
| | Akkermansia | | Clostridium | | | |
| | muciniphila | | leptum | | | |
| 2- | (4951) S: | 0.023966 | (4834) G: | −0.02366 | 0.227499 | 5.41E−07 |
| hydroxylaurate | Roseburia | | Blautia | | | |
| | intestinalis | | | | | |
| X - 12063 | (14027) U: | −0.03582 | (4938) S: | 0.033338 | 0.226197 | 6.31E−07 |
| | Unknown | | Roseburia | | | |
| | | | sp | | | |
| 2-hydroxy-3- | (4951) S: | 0.024429 | (15390) U: | −0.02315 | 0.225874 | 6.55E−07 |
| methylvalerate | Roseburia | | Unknown | | | |
| | intestinalis | | | | | |
| argininate* | (4826) S: | −0.03779 | (14454) G: | −0.02669 | 0.223051 | 9.09E−07 |
| | Blautia sp | | Collinsella | | | |
| indoleacetate | (14909) S: | 0.021906 | (15254) F: | 0.021898 | 0.222408 | 9.78E−07 |
| | Clostridium sp | | Clostridiales | | | |
| | CAG 169 | | unclassified | | | |
| ceramide | (4670) S: | 0.034903 | (1862) S: | 0.031833 | 0.222142 | 1.01E−06 |
| (d18:1/14:0, | Coprococcus | | Bacteroides | | | |
| d16:1/16:0)* | catus | | finegoldii | | | |
| 5alpha- | (4779) S: | 0.039677 | (4940) S: | 0.03937 | 0.220249 | 1.25E−06 |
| androstan- | Clostridium sp | | Roseburia | | | |
| 3beta,17beta- | | | inulinivorans | | | |
| diol disulfate | | | | | | |
| citrulline | (5083) G: | 0.03285 | (14899) U: | 0.028835 | 0.220015 | 1.29E−06 |
| | Eubacterium | | Unknown | | | |
| 1-methyl-5- | (6754) S: | −0.03983 | (15324) G: | 0.032531 | 0.219473 | 1.37E−06 |
| imidazoleacetate | Clostridium sp | | Faecalibacterium | | | |
| X - 12263 | (9333) S: | −0.04652 | (15225) F: | −0.03552 | 0.218947 | 1.45E−06 |
| | Acetobacter | | Clostridiales | | | |
| | sp CAG 267 | | unclassified | | | |
| taurodeoxycholic | (5785) S: | 0.034277 | (15090) S: | 0.033016 | 0.21761 | 1.69E−06 |
| acid 3- | Phascolarctobacterium | | Oscillibacter | | | |
| sulfate | sp | | sp CAG | | | |
| | CAG 266 | | 241 | | | |
| X - 12543 | (15031) S: | −0.03218 | (6359) F: | 0.031796 | 0.216865 | 1.83E−06 |
| | Firmicutes | | Clostridiaceae | | | |
| | bacterium | | | | | |
| | CAG 110 | | | | | |
| sphingomyelin | (5736) S: | −0.04201 | (15229) F: | −0.02633 | 0.215385 | 2.16E−06 |
| (d18:2/21:0, | Acidaminococcus | | Clostridiales | | | |
| d16:2/23:0)* | intestini | | unclassified | | | |
| N- | (15317) S: | 0.013762 | (5843) S: | −0.00948 | 0.215264 | 2.19E−06 |
| acetylmethionine | Faecalibacterium | | Allisonella | | | |
| | sp CAG 82 | | histaminiformans | | | |
| X - 18901 | (15164) F: | 0.018623 | (14575) G: | −0.01604 | 0.213683 | 2.61E−06 |
| | Clostridiales | | Collinsella | | | |
| | unclassified | | | | | |
| 1- | (1862) S: | 0.034608 | (14909) S: | 0.028404 | 0.213441 | 2.68E−06 |
| palmitoylglycerol | Bacteroides | | Clostridium | | | |
| (16:0) | finegoldii | | sp CAG | | | |
| | | | 169 | | | |
| X - 23587 | (4581) S: | 0.038574 | (17248) S: | −0.03613 | 0.212559 | 2.96E−06 |
| | Dorea | | Bifidobacterium | | | |
| | longicatena | | longum | | | |
| androstenediol | (15154) F: | −0.02695 | (3964) U: | −0.02694 | 0.21083 | 3.57E−06 |
| (3beta,17beta) | Clostridiales | | Unknown | | | |
| disulfate (2) | unclassified | | | | | |
| tartronate | (4931) G: | 0.03789 | (14909) S: | −0.032 | 0.210444 | 3.72E−06 |
| (hydroxymalonate) | Lachnospiraceae | | Clostridium | | | |
| | unclassified | | sp CAG | | | |
| | | | 169 | | | |
| X - 24352 | (5087) S: | 0.026932 | (1872) S: | −0.0223 | 0.210313 | 3.78E−06 |
| | Eubacterium | | Bacteroides | | | |
| | sp CAG 86 | | ovatus | | | |
| X - 23654 | (1790) S: | −0.03973 | (4705) S: | 0.038681 | 0.20987 | 3.96E−06 |
| | Odoribacter | | Clostridium | | | |
| | splanchnicus | | sp CAG | | | |
| | | | 43 | | | |
| dihydrocaffeate | (14322) S: | 0.039202 | (1872) S: | −0.03677 | 0.209085 | 4.31E−06 |
| sulfate (2) | Eggerthella sp | | Bacteroides | | | |
| | CAG 209 | | ovatus | | | |
| sphingomyelin | (4670) S: | 0.024397 | (15271) S: | 0.020911 | 0.207739 | 4.98E−06 |
| (d18:1/17:0, | Coprococcus | | Ruthenibacterium | | | |
| d17:1/18:0, | catus | | lactatiformans | | | |
| d19:1/16:0) | | | | | | |
| 3-carboxy-4- | (1798) S: | −0.03169 | (6141) F: | 0.029622 | 0.207713 | 5.00E−06 |
| methyl-5- | Paraprevotella | | Peptostrep- | | | |
| propyl-2- | clara | | tococcaceae | | | |
| furanpropanoate | | | | | | |
| (CMPF) | | | | | | |
| X - 18606 | (15078) S: | −0.02597 | (14993) S: | 0.017171 | 0.207705 | 5.00E−06 |
| | Oscillibacter | | Butyricicoccus sp | | | |
| | sp | | | | | |
| 2,3-dihydroxy- | (1798) S: | 0.033106 | (15131) F: | −0.03174 | 0.207139 | 5.31E−06 |
| 2-methylbutyrate | Paraprevotella | | Clostridiales | | | |
| | clara | | unclassified | | | |
| X - 12221 | (5083) G: | 0.027656 | (4648) G: | 0.026516 | 0.206925 | 5.44E−06 |
| | Eubacterium | | Roseburia | | | |
| X - 14082 | (4957) F: | 0.040458 | (14921) U: | 0.034511 | 0.206394 | 5.75E−06 |
| | Eubacteriaceae | | Unknown | | | |
| X - 13703 | (15295) G: | 0.032892 | (1798) S: | 0.03269 | 0.206145 | 5.91E−06 |
| | Gemmiger | | Paraprevotella | | | |
| | | | clara | | | |
| X - 17676 | (4831) F: | 0.042912 | (14322) S: | 0.030579 | 0.204984 | 6.68E−06 |
| | Lachnospiraceae | | Eggerthella | | | |
| | | | sp CAG | | | |
| | | | 209 | | | |
| X - 24801 | (1862) S: | 0.027108 | (4957) F: | 0.026568 | 0.204124 | 7.31E−06 |
| | Bacteroides | | Eubacteriaceae | | | |
| | finegoldii | | | | | |
| N- | (5089) S: | 0.022055 | (6367) F: | 0.020723 | 0.203976 | 7.43E−06 |
| methylproline | Eubacterium | | Clostridiaceae | | | |
| | sp CAG 38 | | | | | |
| 1-(1-enyl- | (6936) S: | 0.039081 | (6753) G: | −0.03142 | 0.202913 | 8.30E−06 |
| palmitoyl)-2- | Veillonella | | Clostridium | | | |
| linoleoyl-GPE | atypica | | | | | |
| (P-16:0/18:2)* | | | | | | |
| sphingomyelin | (4670) S: | 0.04117 | (15154) F: | 0.040539 | 0.20203 | 9.11E−06 |
| (d18:2/23:0, | Coprococcus | | Clostridiales | | | |
| d18:1/23:1, | catus | | unclassified | | | |
| d17:1/24:1)* | | | | | | |
| eicosenedioate | (7061) S: | 0.028304 | (4581) S: | 0.028238 | 0.200614 | 1.05E−05 |
| (C20:1-DC)* | Lactobacillus | | Dorea | | | |
| | ruminis | | longicatena | | | |
| picolinoylglycine | (14861) U: | 0.056804 | (6939) S: | 0.046771 | 0.200551 | 1.06E−05 |
| | Unknown | | Veillonella | | | |
| | | | parvula | | | |
| 5alpha- | (4810) S: | −0.03418 | (15233) G: | −0.03312 | 0.198992 | 1.25E−05 |
| androstan- | Blautia sp | | Firmicutes | | | |
| 3alpha,17beta- | CAG 237 | | unclassified | | | |
| diol | | | | | | |
| monosulfate | | | | | | |
| (1) | | | | | | |
| S- | (15326) G: | 0.027465 | (5045) S: | −0.02684 | 0.198907 | 1.26E−05 |
| methylmethionine | Faecalibacterium | | Eubacterium | | | |
| | | | ventriosum | | | |
| glycocholate | (1786) S: | 0.047149 | (15271) S: | 0.042933 | 0.198808 | 1.27E−05 |
| glucuronide (1) | Butyricimonas | | Ruthenibacterium | | | |
| | synergistica | | lactatiformans | | | |
| 1- | (1862) S: | 0.048654 | (17256) S: | −0.04802 | 0.198734 | 1.28E−05 |
| docosahexaenoylglycerol | Bacteroides | | Bifidobacterium | | | |
| (22:6) | finegoldii | | bifidum | | | |
| dodecanedioate | (1957) S: | 0.029169 | (15154) F: | 0.022323 | 0.198302 | 1.34E−05 |
| | Bacteroides | | Clostridiales | | | |
| | sp CAG 144 | | unclassified | | | |
| androstenediol | (5082) S: | −0.03177 | (4581) S: | 0.028058 | 0.19818 | 1.35E−05 |
| (3beta,17beta) | Eubacterium | | Dorea | | | |
| monosulfate | eligens | | longicatena | | | |
| (1) | | | | | | |
| X - 16087 | (17256) S: | −0.03623 | (14823) F: | 0.028631 | 0.19514 | 1.84E−05 |
| | Bifidobacterium | | Eggerthellaceae | | | |
| | bifidum | | | | | |
| S- | (5089) S: | 0.023913 | (1872) S: | −0.02383 | 0.195008 | 1.87E−05 |
| methylcysteine | Eubacterium | | Bacteroides | | | |
| sulfoxide | sp CAG 38 | | ovatus | | | |
| X - 23314 | (15326) G: | 0.017728 | (4608) S: | −0.01673 | 0.194917 | 1.89E−05 |
| | Faecalibacterium | | Ruminococcus | | | |
| | | | torques | | | |
| N1- | (6579) S: | −0.02147 | (1784) G: | 0.020539 | 0.19484 | 1.90E−05 |
| methylinosine | Firmicutes | | Butyricimonas | | | |
| | bacterium | | | | | |
| | CAG 313 | | | | | |
| isobutyrylcarnitine | (15244) F: | 0.032305 | (14992) G: | −0.0305 | 0.194473 | 1.97E−05 |
| (C4) | Clostridiales | | Butyricicoccus | | | |
| | unclassified | | | | | |
| X - 12830 | (15049) F: | 0.027834 | (2311) F: | 0.027446 | 0.194473 | 1.97E−05 |
| | Clostridiales | | Rikenellaceae | | | |
| | unclassified | | | | | |
| pyroglutamine * | (4581) S: | 0.013744 | (15333) S: | 0.01361 | 0.193215 | 2.24E−05 |
| | Dorea | | Faecalibacterium | | | |
| | longicatena | | prausnitzii | | | |
| X - 11491 | (15154) F: | −0.02839 | (4914) S: | −0.02491 | 0.192206 | 2.47E−05 |
| | Clostridiales | | Clostridium sp | | | |
| | unclassified | | | | | |
| N-palmitoyl- | (1903) S: | 0.03977 | (15132) S: | 0.033267 | 0.192123 | 2.49E−05 |
| sphingosine | Bacteroides | | Flavonifractor | | | |
| (d18:1/16:0) | plebeius CAG | | plautii | | | |
| | 211 | | | | | |
| alpha- | (4940) S: | 0.023169 | (14909) S: | 0.023168 | 0.1913 | 2.70E−05 |
| hydroxyisocaproate | Roseburia | | Clostridium | | | |
| | inulinivorans | | sp CAG | | | |
| | | | 169 | | | |
| X - 21410 | (6783) S: | 0.057503 | (4844) S: | 0.045175 | 0.191223 | 2.72E−05 |
| | Catenibacterium | | Blautia | | | |
| | sp CAG | | obeum | | | |
| | 290 | | | | | |
| nonadecanoate | (6750) S: | 0.026632 | (15154) F: | 0.015604 | 0.191167 | 2.74E−05 |
| (19:0) | Clostridium sp | | Clostridiales | | | |
| | | | unclassified | | | |
| X - 11478 | (6340) S: | −0.03414 | (4882) S: | −0.03191 | 0.190014 | 3.07E−05 |
| | Clostridium sp | | Roseburia | | | |
| | CAG 269 | | sp CAG | | | |
| | | | 100 | | | |
| formiminoglutamate | (4714) S: | −0.03624 | (1877) S: | 0.030694 | 0.189092 | 3.36E−05 |
| | Clostridium sp | | Bacteroides | | | |
| | | | caccae | | | |
| X - 11378 | (4581) S: | 0.024786 | (6139) G: | −0.02167 | 0.188939 | 3.41E−05 |
| | Dorea | | Intestinibacter | | | |
| | longicatena | | | | | |
| erucate | (14924) S: | −0.03415 | (14992) G: | 0.033553 | 0.188356 | 3.61E−05 |
| (22:1n9) | Firmicutes | | Butyricicoccus | | | |
| | bacterium | | | | | |
| | CAG 137 | | | | | |
| 7- | (1832) S: | 0.046219 | (15154) F: | 0.032325 | 0.186213 | 4.44E−05 |
| methylxanthine | Bacteroides | | Clostridiales | | | |
| | clarus | | unclassified | | | |
| 3- | (4532) S: | 0.051178 | (1832) S: | 0.036553 | 0.185837 | 4.60E−05 |
| methylxanthine | Eubacterium | | Bacteroides | | | |
| | hallii | | clarus | | | |
| 7-alpha- | (2325) S: | −0.03875 | (4705) S: | 0.030587 | 0.185307 | 4.84E−05 |
| hydroxy-3-oxo- | Alistipes | | Clostridium | | | |
| 4-cholestenoate | indistinctus | | sp CAG | | | |
| (7-Hoca) | | | 43 | | | |
| 2- | (4933) S: | −0.03975 | (7985) S: | 0.037651 | 0.185133 | 4.92E−05 |
| aminoadipate | Eubacterium | | Lactococcus | | | |
| | rectale | | lactis | | | |
| N- | (4553) S: | 0.017304 | (5736) S: | −0.01705 | 0.184771 | 5.09E−05 |
| acetylaspartate | Clostridium sp | | Acidaminococcus | | | |
| (NAA) | | | intestini | | | |
| 3- | (14823) F: | 0.025517 | (4964) F: | 0.023516 | 0.184771 | 5.09E−05 |
| methyladipate | Eggerthellaceae | | Eubacteriaceae | | | |
| gamma- | (15286) F: | −0.02981 | (8767) U: | −0.02653 | 0.184717 | 5.12E−05 |
| glutamylleucine | Ruminococcaceae | | Unknown | | | |
| X - 12101 | (2301) S: | 0.015415 | (14992) G: | 0.01372 | 0.18465 | 5.15E−05 |
| | Alistipes | | Butyricicoccus | | | |
| | finegoldii | | | | | |
| theobromine | (14921) U: | 0.044583 | (1832) S: | 0.044038 | 0.184276 | 5.34E−05 |
| | Unknown | | Bacteroides | | | |
| | | | clarus | | | |
| 1- | (6750) S: | 0.028075 | (9226) S: | −0.0266 | 0.182811 | 6.13E−05 |
| methylhistidine | Clostridium sp | | Akkermansia | | | |
| | | | muciniphila | | | |
| trimethylamine | (4577) S: | 0.022201 | (15350) U: | 0.0202 | 0.182751 | 6.17E−05 |
| N-oxide | Coprococcus | | Unknown | | | |
| | comes | | | | | |
| X - 17654 | (9226) S: | −0.02736 | (4262) S: | 0.026172 | 0.181994 | 6.62E−05 |
| | Akkermansia | | Ruminococcus | | | |
| | muciniphila | | sp | | | |
| ximenoylcarnitine | (4828) S: | 0.026637 | (6276) S: | −0.02367 | 0.181408 | 7.00E−05 |
| (C26:1)* | Blautia sp | | Clostridium | | | |
| | | | sp CAG | | | |
| | | | 245 | | | |
| glycosyl | (4540) S: | 0.023968 | (15073) G: | 0.017841 | 0.180199 | 7.84E−05 |
| ceramide | Anaerostipes | | Oscillibacter | | | |
| (d18:2/24:1, | hadrus | | | | | |
| d18:1/24:2)* | | | | | | |
| tiglylcarnitine | (14909) S: | 0.039971 | (15332) S: | 0.031338 | 0.180062 | 7.94E−05 |
| (C5:1-DC) | Clostridium sp | | Faecalibacterium | | | |
| | CAG 169 | | prausnitzii | | | |
| isovalerylglycine | (4705) S: | −0.05482 | (4651) S: | 0.025388 | 0.179713 | 8.20E−05 |
| | Clostridium sp | | Clostridium | | | |
| | CAG 43 | | sp CAG | | | |
| | | | 230 | | | |
| glutamate | (7985) S: | 0.022629 | (4940) S: | 0.017824 | 0.179328 | 8.50E−05 |
| | Lactococcus | | Roseburia | | | |
| | lactis | | inulinivorans | | | |
| 7-methylurate | (1861) S: | −0.04538 | (5082) S: | −0.02823 | 0.179307 | 8.51E−05 |
| | Bacteroides | | Eubacterium | | | |
| | thetaiotaomicron | | eligens | | | |
| 2- | (15090) S: | 0.038815 | (4644) S: | −0.03569 | 0.179151 | 8.64E−05 |
| methylbutyrylcarnitine | Oscillibacter | | Clostridium | | | |
| (C5) | sp CAG 241 | | sp CAG | | | |
| | | | 62 | | | |
| X - 13844 | (14921) U: | 0.042185 | (6747) S: | −0.042 | 0.179028 | 8.73E−05 |
| | Unknown | | Clostridium | | | |
| | | | spiroforme | | | |
| X - 12739 | (4781) U: | −0.01699 | (14992) G: | 0.015071 | 0.178857 | 8.87E−05 |
| | Unknown | | Butyricicoccus | | | |
| androstenediol | (4882) S: | −0.0296 | (8076) S: | −0.02816 | 0.178705 | 9.00E−05 |
| (3alpha, | Roseburia sp | | Streptococcus | | | |
| 17alpha) | CAG 100 | | parasanguinis | | | |
| monosulfate | | | | | | |
| (2) | | | | | | |
| palmitoylcarnitine | (1862) S: | 0.034849 | (4940) S: | 0.033225 | 0.178654 | 9.04E−05 |
| (C16) | Bacteroides | | Roseburia | | | |
| | finegoldii | | inulinivorans | | | |
| gamma- | (4571) S: | 0.035643 | (15326) G: | −0.03152 | 0.178576 | 9.11E−05 |
| glutamyl-2- | Dorea sp CAG | | Faecalibacterium | | | |
| aminobutyrate | 105 | | | | | |
| acisoga | (4960) G: | 0.046059 | (1877) S: | 0.036021 | 0.178429 | 9.23E−05 |
| | Eubacterium | | Bacteroides | | | |
| | | | caccae | | | |
| 1-(1-enyl- | (15271) S: | 0.013828 | (4540) S: | 0.012286 | 0.177804 | 9.78E−05 |
| palmitoyl)-2- | Ruthenibacterium | | Anaerostipes | | | |
| oleoyl-GPC | lactatiformans | | hadrus | | | |
| (P-16:0/18:1)* | | | | | | |
| catechol | (14861) U: | 0.038348 | (4826) S: | −0.02748 | 0.176921 | 0.000106 |
| sulfate | Unknown | | Blautia sp | | | |
| 3- | (15369) S: | −0.01833 | (4342) U: | −0.01715 | 0.176838 | 0.000107 |
| methylcytidine | Faecalibacterium | | Unknown | | | |
| | sp CAG 74 | | | | | |
| X - 14939 | (9226) S: | −0.02471 | (6148) F: | −0.02155 | 0.176721 | 0.000108 |
| | Akkermansia | | Peptostrep- | | | |
| | muciniphila | | tococcaceae | | | |
| pregnenetriol | (4564) S: | 0.026935 | (4750) G: | 0.020832 | 0.176393 | 0.000111 |
| disulfate* | Ruminococcus | | Clostridium | | | |
| | torques | | | | | |
| 1-(1-enyl- | (5803) S: | −0.03699 | (15350) U: | 0.036086 | 0.176365 | 0.000112 |
| stearoyl)-GPE | Dialister sp | | Unknown | | | |
| (P-18:0)* | CAG 357 | | | | | |
| carnitine | (1830) S: | 0.029298 | (6347) S: | 0.025743 | 0.176034 | 0.000115 |
| | Bacteroides | | Clostridium | | | |
| | stercoris | | sp CAG | | | |
| | | | 356 | | | |
| X - 11261 | (4644) S: | −0.02467 | (4651) S: | −0.01978 | 0.175416 | 0.000122 |
| | Clostridium sp | | Clostridium | | | |
| | CAG 62 | | sp CAG | | | |
| | | | 230 | | | |
| gamma- | (4930) F: | 0.032433 | (15286) F: | 0.029908 | 0.174417 | 0.000133 |
| glutamylcitrulline* | Lachnospiraceae | | Ruminococcaceae | | | |
| N-acetyl- | (15132) S: | −0.02791 | (4804) S: | −0.0258 | 0.173841 | 0.00014 |
| isoputreanine* | Flavonifractor | | Blautia sp | | | |
| | plautii | | | | | |
| 5alpha- | (1814) S: | −0.02443 | (15216) F: | 0.017697 | 0.170402 | 0.00019 |
| pregnan- | Bacteroides | | Clostridiales | | | |
| 3beta,20alpha- | vulgatus | | unclassified | | | |
| diol | | | | | | |
| monosulfate | | | | | | |
| (2) | | | | | | |
| o-cresol sulfate | (1786) S: | 0.046263 | (4914) S: | −0.03874 | 0.169442 | 0.000207 |
| | Butyricimonas | | Clostridium sp | | | |
| | synergistica | | | | | |
| phenol | (4749) S: | 0.022088 | (15317) S: | −0.01923 | 0.169413 | 0.000208 |
| glucuronide | Clostridium sp | | Faecalibacterium | | | |
| | CAG 7 | | sp | | | |
| | | | CAG 82 | | | |
| leucine | (4564) S: | 0.027402 | (6148) F: | 0.026545 | 0.169312 | 0.00021 |
| | Ruminococcus | | Peptostrep- | | | |
| | torques | | tococcaceae | | | |
| X - 24544 | (4581) S: | 0.033527 | (15315) G: | 0.026809 | 0.169132 | 0.000213 |
| | Dorea | | Faecalibacterium | | | |
| | longicatena | | | | | |
| deoxycholate | (4552) S: | 0.047973 | (4659) S: | −0.0432 | 0.168661 | 0.000222 |
| | Ruminococcus | | Clostridium | | | |
| | sp | | sp CAG | | | |
| | | | 122 | | | |
| 2-methylserine | (2296) G: | −0.05513 | (4425) S: | −0.03964 | 0.167244 | 0.000251 |
| | Alistipes | | Ruminococcus | | | |
| | | | sp CAG | | | |
| | | | 254 | | | |
| N-stearoyl- | (4714) S: | −0.02344 | (15315) G: | −0.02246 | 0.16624 | 0.000274 |
| sphingosine | Clostridium sp | | Faecalibacterium | | | |
| (d18:1/18:0)* | | | | | | |
| 2- | (4272) S: | −0.02307 | (8010) S: | −0.02054 | 0.166116 | 0.000277 |
| aminobutyrate | Eubacterium | | Streptococcus | | | |
| | sp CAG 581 | | salivarius | | | |
| imidazole | (5089) S: | 0.02396 | (7985) S: | 0.023451 | 0.165961 | 0.00028 |
| propionate | Eubacterium | | Lactococcus | | | |
| | sp CAG 38 | | lactis | | | |
| sphingomyelin | (15266) G: | −0.023 | (14894) S: | 0.022525 | 0.165136 | 0.000301 |
| (d18:1/22:1, | Firmicutes | | Anaeroma | | | |
| d18:2/22:0, | unclassified | | ssilibacillus | | | |
| d16:1/24:1)* | | | sp An250 | | | |
| X - 16944 | (17244) S: | 0.024286 | (4816) S: | −0.02382 | 0.165071 | 0.000303 |
| | Bifidobacterium | | Blautia sp | | | |
| | adolescentis | | | | | |
| X - 24947 | (1812) S: | 0.033326 | (6750) S: | 0.022116 | 0.165035 | 0.000304 |
| | Bacteroides | | Clostridium sp | | | |
| | massiliensis | | | | | |
| indole-3- | (3926) U: | 0.021648 | (4909) G: | 0.02119 | 0.164723 | 0.000312 |
| carboxylic acid | Unknown | | Clostridium | | | |
| perfluorooctanesulfonic | (17256) S: | −0.03882 | (4557) S: | 0.038422 | 0.164055 | 0.00033 |
| acid | Bifidobacterium | | Ruminococcus | | | |
| (PFOS) | bifidum | | lactaris | | | |
| 4- | (2318) S: | −0.04684 | (15093) F: | −0.04421 | 0.162374 | 0.000381 |
| imidazoleacetate | Alistipes | | Clostridiales | | | |
| | putredinis | | unclassified | | | |
| androstenediol | (15120) S: | −0.0329 | (15233) G: | −0.03049 | 0.162146 | 0.000388 |
| (3alpha,17alpha) | Firmicutes | | Firmicutes | | | |
| monosulfate | bacterium | | unclassified | | | |
| (3) | CAG 114 | | | | | |
| X - 11444 | (4564) S: | 0.02505 | (1786) S: | 0.024484 | 0.161915 | 0.000396 |
| | Ruminococcus | | Butyricimonas | | | |
| | torques | | synergistica | | | |
| N- | (4037) S: | −0.04166 | (4564) S: | −0.03847 | 0.161896 | 0.000396 |
| methyltaurine | Clostridium | | Ruminococcus | | | |
| | innocuum | | torques | | | |
| adipoylcarnitine | (15132) S: | 0.02224 | (4940) S: | 0.021147 | 0.161523 | 0.000409 |
| (C6-DC) | Flavonifractor | | Roseburia | | | |
| | plautii | | inulinivorans | | | |
| X - 18922 | (4540) S: | −0.03347 | (6750) S: | 0.029384 | 0.161302 | 0.000417 |
| | Anaerostipes | | Clostridium sp | | | |
| | hadrus | | | | | |
| dehydroisoand | (3964) U: | −0.03037 | (8002) S: | −0.03031 | 0.160191 | 0.000457 |
| rosterone | Unknown | | Streptococcus | | | |
| sulfate (DHEA-S) | | | thermophilus | | | |
| perfluorooctanoate | (6141) F: | −0.03107 | (4933) S: | −0.02892 | 0.160113 | 0.00046 |
| (PFOA) | Peptostrep- | | Eubacterium | | | |
| | tococcaceae | | rectale | | | |
| pregn steroid | (4581) S: | 0.035894 | (4940) S: | 0.035555 | 0.159783 | 0.000473 |
| monosulfate | Dorea | | Roseburia | | | |
| C21H34O5S* | longicatena | | inulinivorans | | | |
| X - 12798 | (15340) G: | −0.03508 | (6141) F: | −0.03128 | 0.159687 | 0.000477 |
| | Faecalibacterium | | Peptostrep- | | | |
| | | | tococcaceae | | | |
| gamma- | (14993) S: | 0.021478 | (5075) S: | 0.02064 | 0.159665 | 0.000477 |
| glutamylglutamate | Butyricicoccus | | Lachnospira | | | |
| | sp | | pectinoschiza | | | |
| X - 13431 | (6148) F: | 0.034411 | (5121) S: | 0.032508 | 0.159559 | 0.000482 |
| | Peptostrep- | | Clostridium | | | |
| | tococcaceae | | sp CAG | | | |
| | | | 264 | | | |
| caffeic acid | (14861) U: | 0.026993 | (3957) F: | −0.02187 | 0.159463 | 0.000486 |
| sulfate | Unknown | | Lachnospiraceae | | | |
| 4- | (4121) U: | 0.026234 | (4933) S: | −0.02563 | 0.159245 | 0.000494 |
| hydroxychlorothalonil | Unknown | | Eubacterium | | | |
| | | | rectale | | | |
| X - 17685 | (4447) S: | −0.04234 | (4705) S: | −0.03739 | 0.1588 | 0.000513 |
| | Eubacterium | | Clostridium | | | |
| | sp CAG 274 | | sp CAG | | | |
| | | | 43 | | | |
| thyroxine | (4811) S: | 0.021084 | (5792) S: | −0.01971 | 0.158642 | 0.00052 |
| | Blautia | | Phascolarctobacterium | | | |
| | obeum | | sp CAG | | | |
| | | | 207 | | | |
| sphingomyelin | (15333) S: | −0.02757 | (14909) S: | −0.02458 | 0.158003 | 0.000548 |
| (d18:2/24:1, | Faecalibacterium | | Clostridium | | | |
| d18:1/24:2)* | prausnitzii | | sp CAG | | | |
| | | | 169 | | | |
| Fibrinopeptide | (1786) S: | −0.03762 | (5045) S: | −0.03299 | 0.157893 | 0.000553 |
| A (3-16)** | Butyricimonas | | Eubacterium | | | |
| | synergistica | | ventriosum | | | |
| pregnanediol- | (4644) S: | 0.027471 | (4532) S: | −0.02173 | 0.157596 | 0.000566 |
| 3-glucuronide | Clostridium sp | | Eubacterium | | | |
| | CAG 62 | | hallii | | | |
| N- | (4933) S: | −0.02409 | (4571) S: | 0.022616 | 0.156582 | 0.000615 |
| acetylarginine | Eubacterium | | Dorea sp | | | |
| | rectale | | CAG 105 | | | |
| pregnen-diol | (4940) S: | 0.029751 | (6328) S: | −0.02762 | 0.15617 | 0.000636 |
| disulfate | Roseburia | | Clostridium | | | |
| C21H34O8S2* | inulinivorans | | sp CAG | | | |
| | | | 492 | | | |
| 1-oleoyl-2- | (5736) S: | −0.0273 | (4540) S: | 0.024308 | 0.156064 | 0.000642 |
| docosahexaenoyl- | Acidaminococcus | | Anaerostipes | | | |
| GPC | intestini | | hadrus | | | |
| (18:1/22:6)* | | | | | | |
| 3-(4- | (4581) S: | 0.03186 | (14899) U: | 0.030331 | 0.155544 | 0.000669 |
| hydroxyphenyl)lactate | Dorea | | Unknown | | | |
| | longicatena | | | | | |
| N-acetylglycine | (8601) S: | 0.037245 | (4816) S: | 0.036725 | 0.155199 | 0.000688 |
| | Candidatus | | Blautia sp | | | |
| | Gastranaerophilales | | | | | |
| | bacterium | | | | | |
| | HUM 10 | | | | | |
| propionylglycine | (4447) S: | −0.02902 | (1626) S: | 0.028992 | 0.15484 | 0.000709 |
| | Eubacterium | | Prevotellacopri | | | |
| | sp CAG 274 | | | | | |
| taurine | (14894) S: | 0.017189 | (6173) S: | 0.014888 | 0.154013 | 0.000757 |
| | Anaeromassili | | Clostridium | | | |
| | bacillus sp | | sp CAG | | | |
| | An250 | | 221 | | | |
| glycine | (15216) F: | −0.03834 | (7061) S: | 0.036169 | 0.153227 | 0.000807 |
| conjugate of | Clostridiales | | Lactobacillus | | | |
| C10H14O2 (1)* | unclassified | | ruminis | | | |
| sphingomyelin | (15373) F: | 0.027889 | (1934) S: | 0.026974 | 0.153218 | 0.000807 |
| (d18:1/21:0, | Ruminococcaceae | | Parabacteroides | | | |
| d17:1/22:0, | | | distasonis | | | |
| d16:1/23:0)* | | | | | | |
| acetylcarnitine | (1812) S: | 0.019671 | (6750) S: | 0.019283 | 0.152854 | 0.000831 |
| (C2) | Bacteroides | | Clostridium sp | | | |
| | massiliensis | | | | | |
| X - 18899 | (14992) G: | 0.015723 | (14993) S: | 0.015681 | 0.152617 | 0.000847 |
| | Butyricicoccus | | Butyricicoccus sp | | | |
| X - 12906 | (4930) F: | 0.039781 | (6376) F: | 0.037775 | 0.152538 | 0.000852 |
| | Lachnospiraceae | | Clostridiaceae | | | |
| 3-sulfo-L- | (15385) U: | 0.033842 | (4670) S: | −0.03222 | 0.152176 | 0.000877 |
| alanine | Unknown | | Coprococcus | | | |
| | | | catus | | | |
| biliverdin | (15286) F: | 0.02333 | (14844) S: | −0.01748 | 0.152148 | 0.000879 |
| | Ruminococcaceae | | Firmicutes | | | |
| | | | bacterium | | | |
| | | | CAG 94 | | | |
| 1-linoleoyl- | (1786) S: | 0.023611 | (14400) G: | −0.01513 | 0.151872 | 0.000898 |
| GPA (18:2)* | Butyricimonas | | Collinsella | | | |
| | synergistica | | | | | |
| 3-hydroxy-2- | (15452) S: | 0.025741 | (4532) S: | −0.02396 | 0.151481 | 0.000927 |
| ethylpropionate | Bilophila sp 4 | | Eubacterium | | | |
| | 1 30 | | hallii | | | |
| carotene diol | (8002) S: | −0.0236 | (4810) S: | 0.019618 | 0.151433 | 0.00093 |
| (3) | Streptococcus | | Blautia sp | | | |
| | thermophilus | | CAG 237 | | | |
| X - 17325 | (15154) F: | 0.019388 | (4940) S: | −0.019 | 0.149107 | 0.001117 |
| | Clostridiales | | Roseburia | | | |
| | unclassified | | inulinivorans | | | |
| docosahexaenoate | (15295) G: | 0.017696 | (3957) F: | −0.01692 | 0.148078 | 0.001209 |
| (DHA; | Gemmiger | | Lachnospiraceae | | | |
| 22:6n3) | | | | | | |
| N6,N6,N6- | (2318) S: | −0.02004 | (15332) S: | 0.019503 | 0.147817 | 0.001234 |
| trimethyllysine | Alistipes | | Faecalibacterium | | | |
| | putredinis | | prausnitzii | | | |
| deoxycarnitine | (15346) G: | 0.030403 | (5083) G: | 0.028617 | 0.147739 | 0.001242 |
| | Faecalibacterium | | Eubacterium | | | |
| 2,3-dihydroxy- | (15216) F: | −0.02283 | (1877) S: | 0.0228 | 0.147388 | 0.001276 |
| 5-methylthio- | Clostridiales | | Bacteroides | | | |
| 4-pentenoate | unclassified | | caccae | | | |
| (DMTPA)* | | | | | | |
| arabonate/xylonate | (4961) G: | 0.022231 | (4608) S: | −0.02199 | 0.146798 | 0.001335 |
| | Eubacterium | | Ruminococcus | | | |
| | | | torques | | | |
| X - 11852 | (4893) S: | 0.017806 | (4957) F: | 0.01425 | 0.146358 | 0.001381 |
| | Clostridium sp | | Eubacteriaceae | | | |
| urea | (15078) S: | −0.03091 | (5190) S: | 0.02188 | 0.146356 | 0.001381 |
| | Oscillibacter | | Firmicutes | | | |
| | sp | | bacterium | | | |
| | | | CAG 102 | | | |
| indoleacetylglutamine | (4447) S: | −0.03378 | (4749) S: | −0.031 | 0.145985 | 0.001421 |
| | Eubacterium | | Clostridium | | | |
| | sp CAG 274 | | sp CAG | | | |
| | | | 7 | | | |
| vanillylmandelate | (9262) S: | −0.01662 | (15318) S: | 0.013687 | 0.145053 | 0.001525 |
| (VMA) | Burkholderiales | | Faecalibacterium | | | |
| | bacterium | | prausnitzii | | | |
| | 1 1 47 | | | | | |
| X - 13255 | (17239) S: | 0.046643 | (4961) G: | 0.042712 | 0.144663 | 0.001571 |
| | Bifidobacterium | | Eubacterium | | | |
| | sp N4G05 | | | | | |
| androstenediol | (4564) S: | 0.021734 | (4782) U: | −0.02155 | 0.1441 | 0.00164 |
| (3beta,17beta) | Ruminococcus | | Unknown | | | |
| disulfate (1) | torques | | | | | |
| valine | (6179) G: | 0.031487 | (7985) S: | 0.030513 | 0.143921 | 0.001662 |
| | Clostridium | | Lactococcus | | | |
| | | | lactis | | | |
| X - 11485 | (1786) S: | 0.034559 | (4553) S: | 0.032995 | 0.143508 | 0.001715 |
| | Butyricimonas | | Clostridium sp | | | |
| | synergistica | | | | | |
| X - 24757 | (15085) F: | 0.020657 | (4909) G: | 0.019259 | 0.143247 | 0.001749 |
| | Clostridiales | | Clostridium | | | |
| | unclassified | | | | | |
| chenodeoxycholate | (4552) S: | −0.03176 | (2301) S: | −0.02344 | 0.143007 | 0.00178 |
| | Ruminococcus | | Alistipes | | | |
| | sp | | finegoldii | | | |
| 17- | (15073) G: | 0.0211 | (4940) S: | 0.020984 | 0.142649 | 0.001829 |
| methylstearate | Oscillibacter | | Roseburia | | | |
| | | | inulinivorans | | | |
| 3- | (14400) G: | −0.04178 | (14974) U: | 0.036425 | 0.142441 | 0.001857 |
| hydroxybutyryl | Collinsella | | Unknown | | | |
| carnitine (1) | | | | | | |
| sphingomyelin | (15452) S: | −0.01411 | (4648) G: | 0.013313 | 0.1424 | 0.001863 |
| (d18:2/24:2)* | Bilophila sp 4 | | Roseburia | | | |
| | 1 30 | | | | | |
| 5alpha- | (15346) G: | 0.026787 | (15120) S: | −0.02311 | 0.142374 | 0.001867 |
| androstan- | Faecalibacterium | | Firmicutes | | | |
| 3beta,17beta- | | | bacterium | | | |
| diol | | | CAG 114 | | | |
| monosulfate | | | | | | |
| (2) | | | | | | |
| stearoyl | (15317) S: | −0.03088 | (5082) S: | 0.029658 | 0.142261 | 0.001883 |
| sphingomyelin | Faecalibacterium | | Eubacterium | | | |
| (d18:1/18:0) | sp CAG 82 | | eligens | | | |
| 2- | (14963) S: | −0.02409 | (4828) S: | 0.020904 | 0.142222 | 0.001888 |
| linoleoylglycerol | Anaerotruncus | | Blautia sp | | | |
| (18:2) | colihominis | | | | | |
| xanthurenate | (17237) S: | −0.02659 | (6179) G: | 0.025405 | 0.142175 | 0.001895 |
| | Bifidobacterium | | Clostridium | | | |
| | pseudocatenulatum | | | | | |
| X - 12411 | (14807) S: | −0.02183 | (1836) S: | −0.02029 | 0.142173 | 0.001895 |
| | Gordonibacter | | Bacteroides | | | |
| | pamelaeae | | uniformis | | | |
| 5-oxoproline | (15081) F: | 0.019373 | (6179) G: | 0.016099 | 0.142122 | 0.001902 |
| | Clostridiales | | Clostridium | | | |
| | unclassified | | | | | |
| 1-(1-enyl- | (4721) S: | 0.014673 | (4705) S: | −0.01447 | 0.141822 | 0.001945 |
| palmitoyl)-GPC | Clostridium sp | | Clostridium | | | |
| (P-16:0)* | CAG 58 | | sp CAG | | | |
| | | | 43 | | | |
| N- | (4844) S: | −0.02196 | (14974) U: | 0.02064 | 0.14181 | 0.001947 |
| acetylglutamate | Blautia | | Unknown | | | |
| | obeum | | | | | |
| tetradecanedioate | (4930) F: | −0.05114 | (4914) S: | −0.0502 | 0.141803 | 0.001948 |
| | Lachnospiraceae | | Clostridium sp | | | |
| glutarylcarnitine | (4820) S: | −0.01929 | (1949) S: | 0.018906 | 0.141384 | 0.00201 |
| (C5-DC) | Blautia sp | | Parabacteroides | | | |
| | | | merdae | | | |
| X - 24337 | (15272) F: | −0.02787 | (4816) S: | −0.02418 | 0.140613 | 0.002128 |
| | Ruminococcaceae | | Blautia sp | | | |
| gamma- | (15286) F: | −0.02942 | (15332) S: | 0.029158 | 0.140431 | 0.002157 |
| glutamylisoleucine* | Ruminococcaceae | | Faecalibacterium | | | |
| | | | prausnitzii | | | |
| 1-(1-enyl- | (6148) F: | 0.03825 | (4874) S: | 0.029863 | 0.140159 | 0.0022 |
| palmitoyl)-2- | Peptostrep- | | Fusicatenibacter | | | |
| arachidonoyl- | tococcaceae | | saccharivorans | | | |
| GPC (P- | | | | | | |
| 16:0/20:4)* | | | | | | |
| 1-(1-enyl- | (2311) F: | 0.032348 | (5190) S: | 0.031149 | 0.140091 | 0.002211 |
| stearoyl)-2- | Rikenellaceae | | Firmicutes | | | |
| oleoyl-GPE | | | bacterium | | | |
| (P-18:0/18:1) | | | CAG 102 | | | |
| 1-(1-enyl- | (4782) U: | −0.02249 | (4721) S: | 0.019978 | 0.13999 | 0.002228 |
| palmitoyl)-GPE | Unknown | | Clostridium | | | |
| (P-16:0)* | | | sp CAG | | | |
| | | | 58 | | | |
| epiandrosterone | (15260) G: | 0.026216 | (14470) G: | 0.021722 | 0.139978 | 0.00223 |
| sulfate | Firmicutes | | Collinsella | | | |
| | unclassified | | | | | |
| 2- | (17241) S: | 0.032773 | (15143) S: | 0.010676 | 0.139865 | 0.002249 |
| acetamidophenol | Bifidobacterium | | Flavonifractor sp | | | |
| sulfate | catenulatum | | | | | |
| 1-myristoyl-2- | (1832) S: | −0.01363 | (9226) S: | 0.011531 | 0.139792 | 0.00226 |
| arachidonoyl- | Bacteroides | | Akkermansia | | | |
| GPC | clarus | | muciniphila | | | |
| (14:0/20:4)* | | | | | | |
| N,N,N- | (6750) S: | 0.030556 | (1785) S: | 0.025528 | 0.139762 | 0.002266 |
| trimethyl- | Clostridium sp | | Butyricimonas sp | | | |
| alanylproline | | | An62 | | | |
| betaine | | | | | | |
| (TMAP) | | | | | | |
| X - 13684 | (15390) U: | −0.01587 | (15224) F: | −0.01533 | 0.139271 | 0.002349 |
| | Unknown | | Clostridiales | | | |
| | | | unclassified | | | |
| X - 24748 | (6754) S: | 0.017642 | (15271) S: | −0.01679 | 0.138689 | 0.002451 |
| | Clostridium sp | | Ruthenibacterium | | | |
| | | | lactatiformans | | | |
| malate | (4938) S: | 0.017703 | (15073) G: | 0.015187 | 0.138301 | 0.002521 |
| | Roseburia sp | | Oscillibacter | | | |
| isovalerylcarnitine | (4121) U: | 0.03584 | (15332) S: | 0.034336 | 0.138116 | 0.002555 |
| (C5) | Unknown | | Faecalibacterium | | | |
| | | | prausnitzii | | | |
| 2- | (17249) S: | −0.03766 | (14992) G: | 0.035068 | 0.137906 | 0.002595 |
| hydroxynervonate* | Bifidobacterium | | Butyricicoccus | | | |
| | longum | | | | | |
| X - 11858 | (4582) S: | −0.01276 | (6347) S: | 0.01219 | 0.137828 | 0.002609 |
| | Dorea | | Clostridium | | | |
| | longicatena | | sp CAG | | | |
| | | | 356 | | | |
| 3- | (15085) F: | 0.031154 | (14992) G: | 0.022437 | 0.136824 | 0.002806 |
| hydroxyhippurate | Clostridiales | | Butyricicoccus | | | |
| sulfate | unclassified | | | | | |
| lactosyl-N- | (5843) S: | −0.03117 | (14322) S: | 0.017928 | 0.136052 | 0.002966 |
| nervonoyl- | Allisonella | | Eggerthella | | | |
| sphingosine | histaminiformans | | sp CAG | | | |
| (d18:1/24:1)* | | | 209 | | | |
| 1-(1-enyl- | (6936) S: | 0.015436 | (4659) S: | 0.01529 | 0.135874 | 0.003005 |
| palmitoyl)-2- | Veillonella | | Clostridium | | | |
| oleoyl-GPE | atypica | | sp CAG | | | |
| (P-16:0/18:1)* | | | 122 | | | |
| X - 18886 | (4810) S: | −0.02418 | (14594) G: | 0.02417 | 0.135841 | 0.003012 |
| | Blautia sp | | Collinsella | | | |
| | CAG 237 | | | | | |
| Fibrinopeptide | (1949) S: | −0.01591 | (15317) S: | −0.01575 | 0.135774 | 0.003026 |
| B (1-13)** | Parabacteroides | | Faecalibacterium sp | | | |
| | merdae | | CAG 82 | | | |
| taurochenodeoxycholic | (4664) S: | 0.007057 | (4557) S: | 0.006881 | 0.134882 | 0.003225 |
| acid 3- | Roseburia sp | | Ruminococcus | | | |
| sulfate | CAG 303 | | lactaris | | | |
| DSGEGDFXAEGGGVR* | (2303) S: | −0.0239 | (9391) F: | −0.0223 | 0.134124 | 0.003404 |
| | Alistipes | | Oxalobacteraceae | | | |
| | finegoldii | | | | | |
| tauroursodeoxycholate | (14341) S: | −0.02604 | (1867) S: | 0.025111 | 0.133987 | 0.003437 |
| | Eggerthella sp | | Bacteroides | | | |
| | CAG 298 | | xylanisolvens | | | |
| X - 13723 | (4261) G: | 0.033265 | (4868) S: | −0.02808 | 0.133722 | 0.003502 |
| | Blautia | | Blautia sp | | | |
| 1-stearoyl-2- | (15385) U: | −0.0234 | (4810) S: | 0.021333 | 0.133381 | 0.003587 |
| docosahexaenoyl-GPE | Unknown | | Blautia sp | | | |
| (18:0/22:6)* | | | CAG 237 | | | |
| 14-HDoHE/17- | (15460) F: | 0.026875 | (1784) G: | 0.02536 | 0.133132 | 0.003651 |
| HDoHE | Desulfovibrionaceae | | Butyricimonas | | | |
| 1- | (6962) S: | 0.008273 | (4871) S: | 0.00802 | 0.13212 | 0.00392 |
| linolenoylglycerol | Megamonas | | Ruminococcus | | | |
| (18:3) | funiformis | | sp | | | |
| X - 11299 | (4553) S: | 0.024483 | (15385) U: | 0.022957 | 0.131227 | 0.004172 |
| | Clostridium sp | | Unknown | | | |
| X - 21285 | (9283) S: | 0.037269 | (15350) U: | 0.032192 | 0.130566 | 0.004367 |
| | Sutterella | | Unknown | | | |
| | wadsworthensis | | | | | |
| Fibrinopeptide | (1786) S: | −0.03017 | (5045) S: | −0.02522 | 0.129638 | 0.004656 |
| A (5-16)* | Butyricimonas | | Eubacterium | | | |
| | synergistica | | ventriosum | | | |
| X - 21661 | (4811) S: | −0.01344 | (14594) G: | −0.00963 | 0.129284 | 0.004771 |
| | Blautia | | Collinsella | | | |
| | obeum | | | | | |
| dodecenedioate | (14114) S: | 0.031723 | (6148) F: | −0.02984 | 0.128831 | 0.004921 |
| (C12:1-DC)* | Subdoligranulum | | Peptostrep- | | | |
| | sp CAG | | tococcaceae | | | |
| | 314 | | | | | |
| 3-methyl-2- | (4706) F: | 0.019187 | (15390) U: | −0.01839 | 0.128595 | 0.005001 |
| oxovalerate | Clostridiaceae | | Unknown | | | |
| X - 11847 | (15271) S: | −0.0142 | (4582) S: | −0.01128 | 0.128021 | 0.005201 |
| | Ruthenibacterium | | Dorea | | | |
| | lactatiformans | | longicatena | | | |
| 1-myristoyl-2- | (6338) F: | −0.01141 | (1962) S: | 0.011219 | 0.127609 | 0.005349 |
| palmitoyl-GPC | Clostridiaceae | | Coprobacter | | | |
| (14:0/16:0) | | | secundus | | | |
| 3-aminoisobutyrate | (15124) F: | −0.024 | (15271) S: | −0.02275 | 0.127528 | 0.005378 |
| | Clostridiales | | Ruthenibacterium | | | |
| | unclassified | | lactatiformans | | | |
| stachydrine | (4961) G: | 0.022511 | (14999) U: | −0.01805 | 0.127415 | 0.00542 |
| | Eubacterium | | Unknown | | | |
| eicosenoate | (3957) F: | −0.01721 | (5075) S: | 0.016961 | 0.127302 | 0.005461 |
| (20:1) | Lachnospiraceae | | Lachnospira | | | |
| | | | pectinoschiza | | | |
| isocitrate | (4938) S: | −0.02327 | (15326) G: | 0.017973 | 0.1267 | 0.005688 |
| | Roseburia sp | | Faecalibacterium | | | |
| X - 21364 | (8076) S: | −0.01727 | (4951) S: | 0.015285 | 0.126682 | 0.005695 |
| | Streptococcus | | Roseburia | | | |
| | parasanguinis | | intestinalis | | | |
| X - 12007 | (15254) F: | 0.021132 | (9333) S: | −0.01973 | 0.126616 | 0.00572 |
| | Clostridiales | | Acetobacter | | | |
| | unclassified | | sp CAG | | | |
| | | | 267 | | | |
| N1-Methyl-2- | (8002) S: | 0.030264 | (5803) S: | −0.02372 | 0.126496 | 0.005767 |
| pyridone-5- | Streptococcus | | Dialister sp | | | |
| carboxamide | thermophilus | | CAG 357 | | | |
| X - 21659 | (4939) G: | 0.036695 | (4953) S: | 0.03646 | 0.126145 | 0.005905 |
| | Roseburia | | Roseburia | | | |
| | | | sp CAG | | | |
| | | | 182 | | | |
| gamma- | (4716) S: | 0.019939 | (1934) S: | −0.01591 | 0.126038 | 0.005947 |
| tocopherol/beta- | Clostridium sp | | Parabacteroides | | | |
| tocopherol | | | distasonis | | | |
| X - 12117 | (1836) S: | −0.02601 | (4644) S: | −0.02354 | 0.125916 | 0.005996 |
| | Bacteroides | | Clostridium | | | |
| | uniformis | | sp CAG | | | |
| | | | 62 | | | |
| 1- | (1790) S: | −0.02251 | (1862) S: | 0.021676 | 0.125693 | 0.006086 |
| myristoylglycerol | Odoribacter | | Bacteroides | | | |
| (14:0) | splanchnicus | | finegoldii | | | |
| X - 21845 | (15265) S: | 0.028019 | (14797) G: | 0.023629 | 0.125549 | 0.006145 |
| | Firmicutes | | Adlercreutzia | | | |
| | bacterium | | | | | |
| | CAG 103 | | | | | |
| N- | (14992) G: | 0.024679 | (4582) S: | −0.02289 | 0.125506 | 0.006163 |
| methylhydroxy | Butyricicoccus | | Dorea | | | |
| proline** | | | longicatena | | | |
| stearoylcarnitine | (17249) S: | −0.02445 | (1812) S: | 0.022237 | 0.125349 | 0.006228 |
| (C18) | Bifidobacterium | | Bacteroides | | | |
| | longum | | massiliensis | | | |
| X - 24546 | (4940) S: | 0.035016 | (4750) G: | 0.032653 | 0.125194 | 0.006293 |
| | Roseburia | | Clostridium | | | |
| | inulinivorans | | | | | |
| 2- | (15154) F: | 0.014856 | (3989) F: | 0.012342 | 0.124995 | 0.006377 |
| hydroxyglutarate | Clostridiales | | Firmicutes | | | |
| | unclassified | | unclassified | | | |
| X - 23787 | (15317) S: | 0.019888 | (1836) S: | 0.019399 | 0.124908 | 0.006414 |
| | Faecalibacterium | | Bacteroides | | | |
| | sp CAG 82 | | uniformis | | | |
| 4- | (14322) S: | 0.027768 | (5803) S: | 0.026381 | 0.124668 | 0.006518 |
| hydroxyhippurate | Eggerthella sp | | Dialister sp | | | |
| | CAG 209 | | CAG 357 | | | |
| glycylvaline | (1963) S: | 0.022131 | (14894) S: | 0.020056 | 0.124352 | 0.006656 |
| | Coprobacter | | Anaeroma | | | |
| | fastidiosus | | ssilibacillus | | | |
| | | | sp An250 | | | |
| cerotoylcarnitine | (15346) G: | 0.019902 | (17237) S: | −0.01903 | 0.124253 | 0.0067 |
| (C26)* | Faecalibacterium | | Bifidobacterium | | | |
| | | | pseudocatenulatum | | | |
| methylsuccinoylcarnitine | (1965) S: | 0.015991 | (4261) G: | 0.012935 | 0.123073 | 0.007243 |
| (1) | Bacteroides | | Blautia | | | |
| | sp CAG 20 | | | | | |
| X - 15492 | (6367) F: | −0.03864 | (4940) S: | 0.024465 | 0.123061 | 0.007248 |
| | Clostridiaceae | | Roseburia | | | |
| | | | inulinivorans | | | |
| X - 23585 | (9262) S: | 0.031296 | (14861) U: | 0.021237 | 0.122612 | 0.007465 |
| | Burkholderiales | | Unknown | | | |
| | bacterium | | | | | |
| | 1 1 47 | | | | | |
| X - 24556 | (5082) S: | 0.02246 | (15318) S: | 0.021364 | 0.120816 | 0.008393 |
| | Eubacterium | | Faecalibacterium | | | |
| | eligens | | prausnitzii | | | |
| N1- | (1790) S: | −0.01772 | (4705) S: | 0.012148 | 0.120422 | 0.008609 |
| methyladenosine | Odoribacter | | Clostridium | | | |
| | splanchnicus | | sp CAG | | | |
| | | | 43 | | | |
| 1,2,3- | (17244) S: | −0.02127 | (1830) S: | −0.0201 | 0.120351 | 0.008649 |
| benzenetriol | Bifidobacterium | | Bacteroides | | | |
| sulfate (2) | adolescentis | | stercoris | | | |
| 21- | (6359) F: | −0.03473 | (4564) S: | 0.032184 | 0.119965 | 0.008867 |
| hydroxypregnenolone | Clostridiaceae | | Ruminococcus | | | |
| disulfate | | | torques | | | |
| hexanoylglutamine | (14992) G: | 0.036528 | (4874) S: | −0.03028 | 0.119813 | 0.008954 |
| | Butyricicoccus | | Fusicatenibacter | | | |
| | | | saccharivorans | | | |
| X - 17367 | (15154) F: | 0.012108 | (4537) S: | −0.01195 | 0.119767 | 0.008981 |
| | Clostridiales | | Eubacterium | | | |
| | unclassified | | hallii | | | |
| tridecenedioate | (15132) S: | 0.045078 | (6174) S: | 0.044543 | 0.119127 | 0.009357 |
| (C13:1-DC)* | Flavonifractor | | Clostridium | | | |
| | plautii | | sp CAG | | | |
| | | | 265 | | | |
| phytanate | (15073) G: | 0.017338 | (14823) F: | 0.017013 | 0.118948 | 0.009464 |
| | Oscillibacter | | Eggerthellaceae | | | |
| hydroxy- | (14263) U: | −0.03089 | (15295) G: | 0.027677 | 0.11774 | 0.010221 |
| CMPF* | Unknown | | Gemmiger | | | |
| N-palmitoyl- | (15146) F: | 0.0221 | (15216) F: | −0.02184 | 0.117704 | 0.010244 |
| sphinganine | Clostridiales | | Clostridiales | | | |
| (d18:0/16:0) | unclassified | | unclassified | | | |
| 4-methyl-2- | (6148) F: | 0.02125 | (4648) G: | −0.01851 | 0.11718 | 0.01059 |
| oxopentanoate | Peptostrep- | | Roseburia | | | |
| | tococcaceae | | | | | |
| cys-gly, | (4303) S: | 0.02136 | (4820) S: | −0.02018 | 0.117156 | 0.010606 |
| oxidized | Clostridium sp | | Blautia sp | | | |
| | CAG 217 | | | | | |
| glycerate | (14313) S: | −0.02306 | (4834) G: | 0.019943 | 0.117141 | 0.010616 |
| | Clostridium sp | | Blautia | | | |
| | CAG 226 | | | | | |
| bradykinin, | (4959) S: | 0.009207 | (4811) S: | 0.007451 | 0.116402 | 0.011121 |
| des-arg(9) | Eubacterium | | Blautia | | | |
| | ramulus | | obeum | | | |
| 15- | (4714) S: | −0.01907 | (15350) U: | 0.018079 | 0.116125 | 0.011316 |
| methylpalmitate | Clostridium sp | | Unknown | | | |
| X - 11795 | (15124) F: | −0.0347 | (5803) S: | 0.025284 | 0.116105 | 0.01133 |
| | Clostridiales | | Dialister sp | | | |
| | unclassified | | CAG 357 | | | |
| 16a-hydroxy | (4782) U: | −0.0193 | (4564) S: | 0.018405 | 0.115506 | 0.011762 |
| DHEA 3-sulfate | Unknown | | Ruminococcus | | | |
| | | | torques | | | |
| arachidoylcarnitine | (4933) S: | −0.05449 | (15451) G: | −0.03232 | 0.115399 | 0.011841 |
| (C20)* | Eubacterium | | Bilophila | | | |
| | rectale | | | | | |
| choline | (15081) F: | 0.013512 | (5087) S: | 0.013325 | 0.115075 | 0.012082 |
| | Clostridiales | | Eubacterium | | | |
| | unclassified | | sp CAG | | | |
| | | | 86 | | | |
| palmitoyl | (4540) S: | 0.021119 | (4670) S: | 0.019749 | 0.114709 | 0.01236 |
| dihydrosphingomyelin | Anaerostipes | | Coprococcus | | | |
| (d18:0/16:0)* | hadrus | | catus | | | |
| glycosyl-N- | (5843) S: | −0.02223 | (15073) G: | 0.013519 | 0.114454 | 0.012557 |
| behenoyl- | Allisonella | | Oscillibacter | | | |
| sphingadienine | histaminiformans | | | | | |
| (d18:2/22:0)* | | | | | | |
| hydroxy- | (4564) S: | 0.016937 | (15346) G: | 0.014591 | 0.11419 | 0.012763 |
| N6,N6,N6- | Ruminococcus | | Faecalibacterium | | | |
| trimethyllysine * | torques | | | | | |
| lysine | (8002) S: | 0.028247 | (1830) S: | 0.027797 | 0.114182 | 0.012769 |
| | Streptococcus | | Bacteroides | | | |
| | thermophilus | | stercoris | | | |
| tyrosine | (9298) F: | −0.02194 | (7044) S: | 0.021725 | 0.114134 | 0.012808 |
| | Sutterellaceae | | Lactobacillus | | | |
| | | | acidophilus | | | |
| androsterone | (15233) G: | −0.02419 | (8002) S: | −0.02177 | 0.113555 | 0.013273 |
| sulfate | Firmicutes | | Streptococcus | | | |
| | unclassified | | thermophilus | | | |
| glycodeoxycholate | (5121) S: | −0.02394 | (15078) S: | 0.021689 | 0.113258 | 0.013517 |
| sulfate | Clostridium sp | | Oscillibacter sp | | | |
| | CAG 264 | | | | | |
| alpha- | (17244) S: | −0.02156 | (15452) S: | 0.018676 | 0.113166 | 0.013593 |
| tocopherol | Bifidobacterium | | Bilophila | | | |
| | adolescentis | | sp 4 1 30 | | | |
| 3-(3- | (14823) F: | 0.016505 | (1872) S: | −0.01511 | 0.112805 | 0.013898 |
| hydroxyphenyl)propionate | Eggerthellaceae | | Bacteroides | | | |
| sulfate | | | ovatus | | | |
| linoleate | (4936) S: | 0.016353 | (5111) S: | 0.015685 | 0.112626 | 0.01405 |
| (18:2n6) | Roseburia | | Clostridium | | | |
| | hominis | | sp CAG | | | |
| | | | 127 | | | |
| 17alpha- | (5190) S: | −0.02901 | (4781) U: | −0.0244 | 0.111788 | 0.014786 |
| hydroxypregnenolone 3- | Firmicutes | | Unknown | | | |
| sulfate | bacterium | | | | | |
| | CAG 102 | | | | | |
| xanthosine | (6939) S: | 0.015029 | (4571) S: | 0.013364 | 0.111532 | 0.015017 |
| | Veillonella | | Dorea sp | | | |
| | parvula | | CAG 105 | | | |
| 4- | (4868) S: | 0.024994 | (4844) S: | −0.02202 | 0.111379 | 0.015156 |
| hydroxyphenyl | Blautia sp | | Blautia | | | |
| pyruvate | | | obeum | | | |
| S- | (4957) F: | 0.018829 | (8002) S: | −0.01823 | 0.110711 | 0.01578 |
| methylcysteine | Eubacteriaceae | | Streptococcus | | | |
| | | | thermophilus | | | |
| dodecadienoate | (4936) S: | 0.007497 | (5792) S: | 0.006512 | 0.110622 | 0.015865 |
| (12:2)* | Roseburia | | Phascolarctobacterium | | | |
| | hominis | | sp CAG | | | |
| | | | 207 | | | |
| 1-palmitoyl-2- | (5190) S: | −0.01815 | (1962) S: | 0.011785 | 0.110232 | 0.016241 |
| palmitoleoyl- | Firmicutes | | Coprobacter | | | |
| GPC | bacterium | | secundus | | | |
| (16:0/16:1)* | CAG 102 | | | | | |
| 2- | (1862) S: | 0.024847 | (6962) S: | 0.021436 | 0.109731 | 0.016736 |
| arachidonoylglycerol | Bacteroides | | Megamonas | | | |
| (20:4) | finegoldii | | funiformis | | | |
| sphingomyelin | (4782) U: | −0.02675 | (14921) U: | 0.021965 | 0.109634 | 0.016833 |
| (d18:1/25:0, | Unknown | | Unknown | | | |
| d19:0/24:1, | | | | | | |
| d20:1/23:0, | | | | | | |
| d19:1/24:0)* | | | | | | |
| 1-palmitoyl-2- | (15124) F: | 0.017688 | (15225) F: | −0.0144 | 0.10905 | 0.017429 |
| docosahexaenoyl- | Clostridiales | | Clostridiales | | | |
| GPC | unclassified | | unclassified | | | |
| (16:0/22:6) | | | | | | |
| Fibrinopeptide | (9391) F: | −0.02671 | (4782) U: | −0.02297 | 0.108842 | 0.017646 |
| A (7-16)* | Oxalobacteraceae | | Unknown | | | |
| N6- | (15342) S: | 0.00907 | (15216) F: | −0.00651 | 0.108627 | 0.017873 |
| carbamoylthre- | Faecalibacterium | | Clostridiales | | | |
| onyladenosine | prausnitzii | | unclassified | | | |
| glycohyocholate | (15265) S: | −0.04384 | (15342) S: | 0.03827 | 0.108537 | 0.017968 |
| | Firmicutes | | Faecalibacterium | | | |
| | bacterium | | prausnitzii | | | |
| | CAG 103 | | | | | |
| N- | (1867) S: | 0.029494 | (17249) S: | −0.02421 | 0.108424 | 0.018088 |
| oleoyltaurine | Bacteroides | | Bifidobacterium | | | |
| | xylanisolvens | | longum | | | |
| X - 11593 | (4886) S: | 0.012074 | (4658) S: | 0.009798 | 0.108193 | 0.018337 |
| | Firmicutes | | Clostridium | | | |
| | bacterium | | sp CAG | | | |
| | CAG 194 | | 253 | | | |
| phenyllactate | (4925) S: | 0.022219 | (4575) S: | 0.022171 | 0.107793 | 0.018776 |
| (PLA) | Roseburia | | Dorea | | | |
| | faecis | | formicigenerans | | | |
| beta- | (2301) S: | 0.022147 | (6179) G: | 0.020411 | 0.107633 | 0.018953 |
| citrylglutamate | Alistipes | | Clostridium | | | |
| | finegoldii | | | | | |
| X - 14314 | (17241) S: | 0.014687 | (15154) F: | 0.013906 | 0.107403 | 0.019211 |
| | Bifidobacterium | | Clostridiales | | | |
| | catenulatum | | unclassified | | | |
| creatine | (5803) S: | −0.01668 | (4953) S: | −0.01582 | 0.107388 | 0.019228 |
| | Dialister sp | | Roseburia | | | |
| | CAG 357 | | sp CAG | | | |
| | | | 182 | | | |
| arabitol/xylitol | (1934) S: | 0.031652 | (4828) S: | 0.029975 | 0.106438 | 0.020327 |
| | Parabacteroides | | Blautia sp | | | |
| | distasonis | | | | | |
| uridine | (4547) S: | −0.03528 | (1790) S: | 0.026747 | 0.106231 | 0.020575 |
| | Anaerostipes | | Odoribacter | | | |
| | hadrus | | splanchnicus | | | |
| ectoine | (5062) G: | 0.010402 | (15326) G: | 0.008021 | 0.106182 | 0.020634 |
| | Firmicutes | | Faecalibacterium | | | |
| | unclassified | | | | | |
| X - 17653 | (4767) U: | −0.01285 | (4581) S: | 0.01176 | 0.10604 | 0.020805 |
| | Unknown | | Dorea | | | |
| | | | longicatena | | | |
| catechol | (6747) S: | −0.0224 | (15081) F: | 0.022163 | 0.105927 | 0.020941 |
| glucuronide | Clostridium | | Clostridiales | | | |
| | spiroforme | | unclassified | | | |
| X - 18887 | (15299) G: | 0.02692 | (15316) S: | 0.021941 | 0.104673 | 0.022516 |
| | Gemmiger | | Faecalibacterium | | | |
| | | | prausnitzii | | | |
| eicosapentaenoylcholine | (6141) F: | 0.048926 | (4303) S: | 0.030017 | 0.104352 | 0.022934 |
| | Peptostrep- | | Clostridium | | | |
| | tococcaceae | | sp CAG | | | |
| | | | 217 | | | |
| oleate/vaccenate | (5111) S: | 0.013939 | (14993) S: | 0.012976 | 0.104015 | 0.023382 |
| (18:1) | Clostridium sp | | Butyricicoccus | | | |
| | CAG 127 | | sp | | | |
| N- | (4829) S: | −0.01515 | (5087) S: | 0.012105 | 0.103957 | 0.02346 |
| acetylneuraminate | Blautia sp | | Eubacterium | | | |
| | | | sp CAG | | | |
| | | | 86 | | | |
| X - 16576 | (13981) U: | 0.013445 | (15460) F: | 0.008498 | 0.10394 | 0.023483 |
| | Unknown | | Desulfovibrionaceae | | | |
| X - 21839 | (15265) S: | 0.023227 | (4826) S: | −0.0224 | 0.103797 | 0.023675 |
| | Firmicutes | | Blautia sp | | | |
| | bacterium | | | | | |
| | CAG 103 | | | | | |
| 1-palmitoyl-2- | (4938) S: | −0.02856 | (14991) F: | 0.023705 | 0.103762 | 0.023723 |
| gamma- | Roseburia sp | | Clostridiaceae | | | |
| linolenoyl-GPC | | | | | | |
| (16:0/18:3n6)* | | | | | | |
| 2- | (17278) S: | −0.00852 | (14992) G: | 0.008154 | 0.103757 | 0.02373 |
| aminoheptanoate | Bifidobacterium | | Butyricicoccus | | | |
| | animalis | | | | | |
| palmitoyl | (4705) S: | −0.01695 | (4540) S: | 0.016293 | 0.103605 | 0.023936 |
| sphingomyelin | Clostridium sp | | Anaerostipes | | | |
| (d18:1/16:0) | CAG 43 | | hadrus | | | |
| nervonoylcarnitine | (15216) F: | −0.04038 | (4868) S: | −0.03403 | 0.103484 | 0.024102 |
| (C24:1)* | Clostridiales | | Blautia sp | | | |
| | unclassified | | | | | |
| X - 24812 | (6750) S: | 0.039472 | (4608) S: | 0.033314 | 0.103171 | 0.024536 |
| | Clostridium sp | | Ruminococcus | | | |
| | | | torques | | | |
| piperine | (6369) S: | −0.02014 | (15073) G: | −0.01911 | 0.102993 | 0.024785 |
| | Clostridium sp | | Oscillibacter | | | |
| | CAG 389 | | | | | |
| chiro-inositol | (14334) S: | −0.01845 | (4706) F: | 0.012575 | 0.101795 | 0.026521 |
| | Cryptobacterium | | Clostridiaceae | | | |
| | sp CAG | | | | | |
| | 338 | | | | | |
| X - 23974 | (713) G: | −0.03698 | (15154) F: | 0.030957 | 0.101544 | 0.026898 |
| | Methanobrevibacter | | Clostridiales | | | |
| | | | unclassified | | | |
| 3- | (17244) S: | −0.01941 | (4537) S: | −0.01776 | 0.101505 | 0.026957 |
| methoxycatechol | Bifidobacterium | | Eubacterium hallii | | | |
| sulfate (1) | adolescentis | | | | | |
| N-trimethyl 5- | (15271) S: | 0.026124 | (6141) F: | −0.02273 | 0.101107 | 0.027565 |
| aminovalerate | Ruthenibacterium | | Peptostrep- | | | |
| | lactatiformans | | tococcaceae | | | |
| glycochenodeoxycholate | (15291) F: | −0.02158 | (4914) S: | −0.02153 | 0.100996 | 0.027737 |
| glucuronide (1) | Ruminococcaceae | | Clostridium sp | | | |
| sphingomyelin | (4704) F: | −0.02206 | (15317) S: | −0.02017 | 0.100893 | 0.027897 |
| (d18:1/20:1, | Clostridiaceae | | Faecalibacterium | | | |
| d18:2/20:0)* | | | sp | | | |
| | | | CAG 82 | | | |
| X - 11470 | (14937) U: | −0.02188 | (4581) S: | 0.016799 | 0.100798 | 0.028046 |
| | Unknown | | Dorea | | | |
| | | | longicatena | | | |
| X - 21353 | (15256) F: | 0.0146 | (4936) S: | 0.014299 | 0.100654 | 0.028272 |
| | Clostridiales | | Roseburia | | | |
| | unclassified | | hominis | | | |
| X - 12472 | (14999) U: | 0.026062 | (14823) F: | 0.023754 | 0.100186 | 0.029017 |
| | Unknown | | Eggerthellaceae | | | |
| X - 12456 | (4705) S: | 0.015677 | (6962) S: | 0.015445 | 0.099379 | 0.030344 |
| | Clostridium sp | | Megamonas | | | |
| | CAG 43 | | funiformis | | | |
| X - 13866 | (15452) S: | 0.019139 | (6174) S: | 0.016247 | 0.098839 | 0.031261 |
| | Bilophila sp 4 | | Clostridium | | | |
| | 1 30 | | sp CAG | | | |
| | | | 265 | | | |
| vanillactate | (4831) F: | 0.051625 | (4824) G: | 0.041918 | 0.098677 | 0.031539 |
| | Lachnospiraceae | | Blautia | | | |
| X - 16580 | (1934) S: | 0.024707 | (15124) F: | 0.024448 | 0.098546 | 0.031768 |
| | Parabacteroides | | Clostridiales | | | |
| | distasonis | | unclassified | | | |
| X - 24329 | (2303) S: | −0.02538 | (1836) S: | −0.02536 | 0.09853 | 0.031795 |
| | Alistipes | | Bacteroides | | | |
| | finegoldii | | uniformis | | | |
| androsterone | (8076) S: | −0.02058 | (4839) G: | 0.018667 | 0.098384 | 0.03205 |
| glucuronide | Streptococcus | | Blautia | | | |
| | parasanguinis | | | | | |
| hydroxyasparagine** | (17248) S: | −0.00929 | (6141) F: | −0.00872 | 0.098378 | 0.032062 |
| | Bifidobacterium | | Peptostrep- | | | |
| | longum | | tococcaceae | | | |
| X - 23680 | (15374) F: | −0.02656 | (17241) S: | 0.025397 | 0.09835 | 0.032111 |
| | Ruminococcaceae | | Bifidobacterium | | | |
| | | | catenulatum | | | |
| 1- | (1903) S: | 0.028354 | (5075) S: | 0.028138 | 0.098016 | 0.032702 |
| oleoylglycerol | Bacteroides | | Lachnospira | | | |
| (18:1) | plebeius CAG | | pectinoschiza | | | |
| | 211 | | | | | |
| 1-(1-enyl- | (4780) G: | 0.014535 | (1790) S: | 0.011529 | 0.09774 | 0.033198 |
| palmitoyl)-2- | Clostridium | | Odoribacter | | | |
| palmitoleoyl- | | | splanchnicus | | | |
| GPC | | | | | | |
| (P-16:0/16:1)* | | | | | | |
| heneicosapentaenoate | (14400) G: | −0.0271 | (6141) F: | 0.01887 | 0.096856 | 0.03483 |
| (21:5n3) | Collinsella | | Peptostrep- | | | |
| | | | tococcaceae | | | |
| N-palmitoyl- | (15342) S: | −0.02804 | (1957) S: | 0.027896 | 0.096756 | 0.035019 |
| heptadecasphingosine | Faecalibacterium | | Bacteroides | | | |
| (d17:1/16:0)* | prausnitzii | | sp CAG | | | |
| | | | 144 | | | |
| beta-alanine | (6148) F: | 0.020157 | (4925) S: | 0.020075 | 0.096348 | 0.035799 |
| | Peptostrep- | | Roseburia | | | |
| | tococcaceae | | faecis | | | |
| X - 21474 | (15318) S: | −0.04014 | (4659) S: | 0.039439 | 0.096222 | 0.036041 |
| | Faecalibacterium | | Clostridium | | | |
| | prausnitzii | | sp CAG | | | |
| | | | 122 | | | |
| 2- | (15350) U: | 0.051887 | (15124) F: | 0.035101 | 0.095939 | 0.036596 |
| docosahexaenoylglycerol | Unknown | | Clostridiales | | | |
| (22:6)* | | | unclassified | | | |
| margarate | (14974) U: | 0.013311 | (4940) S: | 0.012762 | 0.095892 | 0.036687 |
| (17:0) | Unknown | | Roseburia | | | |
| | | | inulinivorans | | | |
| 1-ribosyl- | (15342) S: | 0.023475 | (4957) F: | 0.022928 | 0.095809 | 0.03685 |
| imidazoleacetate* | Faecalibacterium | | Eubacteriaceae | | | |
| | prausnitzii | | | | | |
| X - 21295 | (4669) G: | −0.02087 | (14861) U: | 0.020517 | 0.095321 | 0.037827 |
| | Coprococcus | | Unknown | | | |
| cysteinylglycine | (14020) U: | −0.02178 | (15286) F: | −0.02115 | 0.09521 | 0.038051 |
| disulfide* | Unknown | | Ruminococcaceae | | | |
| tryptophan | (15054) F: | −0.01383 | (8002) S: | 0.01105 | 0.094892 | 0.038701 |
| | Clostridiales | | Streptococcus | | | |
| | unclassified | | thermophilus | | | |
| 1-palmitoyl-2- | (15229) F: | −0.01867 | (4121) U: | −0.01846 | 0.094768 | 0.038959 |
| docosahexaenoyl- | Clostridiales | | Unknown | | | |
| GPE | unclassified | | | | | |
| (16:0/22:6)* | | | | | | |
| S- | (15332) S: | 0.043284 | (4882) S: | 0.042659 | 0.094733 | 0.039031 |
| adenosylhomocysteine | Faecalibacterium | | Roseburia | | | |
| (SAH) | prausnitzii | | sp CAG | | | |
| | | | 100 | | | |
| X - 12206 | (4959) S: | −0.02691 | (4546) S: | 0.019168 | 0.094575 | 0.03936 |
| | Eubacterium | | Eubacterium | | | |
| | ramulus | | sp | | | |
| X - 18345 | (4394) U: | 0.012098 | (9701) S: | 0.010524 | 0.094256 | 0.040032 |
| | Unknown | | Haemophilus | | | |
| | | | sp | | | |
| | | | HMSC061E01 | | | |
| tauro-beta- | (4831) F: | −0.03274 | (4130) U: | −0.03214 | 0.094251 | 0.040043 |
| muricholate | Lachnospiraceae | | Unknown | | | |
| phenylpyruvate | (14932) U: | −0.0089 | (9226) S: | −0.00696 | 0.09316 | 0.042412 |
| | Unknown | | Akkermansia | | | |
| | | | muciniphila | | | |
| oleoyl | (1814) S: | 0.017731 | (13982) U: | 0.01504 | 0.092823 | 0.043169 |
| ethanolamide | Bacteroides | | Unknown | | | |
| | vulgatus | | | | | |
| 2,3- | (14993) S: | 0.01931 | (14416) G: | −0.01704 | 0.092506 | 0.04389 |
| dihydroxyisovalerate | Butyricicoccus | | Collinsella | | | |
| | sp | | | | | |
| X - 16964 | (4537) S: | −0.0594 | (4914) S: | −0.05497 | 0.092354 | 0.044241 |
| | Eubacterium | | Clostridium sp | | | |
| | hallii | | | | | |
| X - 12544 | (4564) S: | 0.005718 | (14252) U: | 0.005618 | 0.092332 | 0.04429 |
| | Ruminococcus | | Unknown | | | |
| | torques | | | | | |
| arachidate | (15346) G: | 0.019826 | (15154) F: | 0.018477 | 0.092187 | 0.044628 |
| (20:0) | Faecalibacterium | | Clostridiales | | | |
| | | | unclassified | | | |
| X - 17655 | (6472) F: | 0.01049 | (4782) U: | 0.007802 | 0.091978 | 0.045114 |
| | Clostridiaceae | | Unknown | | | |
| 5alpha- | (8002) S: | −0.02357 | (15091) G: | 0.022201 | 0.091942 | 0.045199 |
| pregnan- | Streptococcus | | Oscillibacter | | | |
| 3beta,20alpha- | thermophilus | | | | | |
| diol disulfate | | | | | | |
| X - 15486 | (4644) S: | −0.01694 | (4826) S: | 0.016926 | 0.091313 | 0.046698 |
| | Clostridium sp | | Blautia sp | | | |
| | CAG 62 | | | | | |
| 3,7- | (1832) S: | 0.018158 | (4537) S: | −0.01529 | 0.091072 | 0.047282 |
| dimethylurate | Bacteroides | | Eubacterium | | | |
| | clarus | | hallii | | | |

[0159] According to a particular embodiment, the metabolite which is predicted is set forth in Table 4.

TABLE 4

| | Top | Directional | Top | Directional | Top | Directional |
|---|---|---|---|---|---|---|
| | predictor | SHAP value | predictor | SHAP value | predictor | SHAP value |
| BIOCHEMICAL | #1 | #1 | #2 | #2 | #3 | #3 |
| 1-methylxanthine | Coffee Freq | 0.521955 | SF_Coffee_wt | 0.453195 | SF_Cappuccino_wt | 0.078874 |
| 3-carboxy-4- | Fish Cooked, | 0.382587 | Canned Tuna | 0.149771 | Fish (not | 0.107626 |
| methyl-5- | Baked or | | or Tuna Salad | | Tuna) Pickled, | |
| propyl-2- | Grilled Freq | | Freq | | Dried, Smoked, | |
| furanpropanoate | | | | | Canned Freq | |
| (CMPF) | | | | | | |
| hydroxy-CMPF* | Fish Cooked, | 0.373131 | Canned Tuna | 0.165863 | Fish (not | 0.139629 |
| | Baked or | | or Tuna Salad | | Tuna) Pickled, | |
| | Grilled Freq | | Freq | | Dried, Smoked, | |
| | | | | | Canned Freq | |
| quinate | SF_Coffee_wt | 0.366101 | Coffee Freq | 0.301928 | SF_Cappuccino_wt | 0.073144 |
| X - 21442 | SF_Coffee_wt | 0.507797 | Coffee Freq | 0.391595 | SF_Cappuccino_wt | 0.142793 |
| 1-methylurate | SF_Coffee_wt | 0.449174 | Coffee Freq | 0.385187 | SF_Cappuccino_wt | 0.101257 |
| 1,3-dimethylurate | Coffee Freq | 0.508676 | SF_Coffee_wt | 0.439991 | SF_Cappuccino_wt | 0.125518 |
| 1,3,7-trimethylurate | Coffee Freq | 0.52283 | SF_Coffee_wt | 0.425254 | SF_Cappuccino_wt | 0.086449 |
| X - 24811 | SF_Coffee_wt | 0.528661 | Coffee Freq | 0.442288 | SF_Cappuccino_wt | 0.094478 |
| theophylline | Coffee Freq | 0.428521 | SF_Coffee_wt | 0.399509 | SF_Cappuccino_wt | 0.088292 |
| 5-acetylamino- | SF_Coffee_wt | 0.469622 | Coffee Freq | 0.403792 | 3% Milk Freq | 0.061279 |
| 6-amino-3- | | | | | | |
| methyluracil | | | | | | |
| 1,7-dimethylurate | Coffee Freq | 0.472547 | SF_Coffee_wt | 0.460378 | SF_Cappuccino_wt | 0.06662 |
| caffeine | Coffee Freq | 0.419314 | SF_Coffee_wt | 0.350417 | SF_Wine_wt | 0.0539 |
| paraxanthine | Coffee Freq | 0.541851 | SF_Coffee_wt | 0.467303 | SF_Cappuccino_wt | 0.097286 |
| X - 23655 | SF_Coffee_wt | 0.435476 | Coffee Freq | 0.303309 | SF_Cappuccino_wt | 0.083376 |
| X - 13835 | Pastrami or | 0.188407 | Beef, Veal, | 0.187234 | SF_WhiteWheat_g_wt | 0.113279 |
| | Smoked Turkey | | Lamb, Pork, | | | |
| | Breast Freq | | Steak, Golash | | | |
| | | | Freq | | | |
| saccharin | Artificial | 0.312888 | SF_Sugar | 0.111067 | Oil as an | −0.0301 |
| | Sweeteners | | substitute_wt | | addition for | |
| | Freq | | | | Salads or | |
| | | | | | Stews Freq | |
| 3-methyl catechol | SF_Coffee_wt | 0.276915 | Coffee Freq | 0.268574 | SF_Wine_wt | 0.051132 |
| sulfate (1) | | | | | | |
| 3-hydroxypyridine | SF_Coffee_wt | 0.295696 | Coffee Freq | 0.21339 | Ice Cream or | −0.04483 |
| sulfate | | | | | Popsicle which | |
| | | | | | contains | |
| | | | | | Dairy Freq | |
| X - 23652 | Beef, Veal, | 0.143448 | Pastrami or | 0.115295 | SF_WhiteWheat_g_wt | 0.076963 |
| | Lamb, Pork, | | Smoked Turkey | | | |
| | Steak, Golash | | Breast Freq | | | |
| | Freq | | | | | |
| trigonelline (N′- | SF_Coffee_wt | 0.263854 | Coffee Freq | 0.215773 | SF_Cappuccino_wt | 0.060521 |
| methylnicotinate) | | | | | | |
| X - 11315 | SF_Almonds_wt | 0.206196 | Nuts, | 0.138389 | SF_Milk_wt | −0.12129 |
| | | | almonds, | | | |
| | | | pistachios | | | |
| | | | Freq | | | |
| 1-methyl-5- | Beef, Veal, | 0.123294 | Pastrami or | 0.095776 | SF_WhiteWheat_g_wt | 0.091505 |
| imidazoleacetate | Lamb, Pork, | | Smoked Turkey | | | |
| | Steak, Golash | | Breast Freq | | | |
| | Freq | | | | | |
| 1-(1-enyl-palmitoyl)- | Chicken or | 0.131388 | Turkey | 0.104297 | Beef, Veal, | 0.103265 |
| 2-arachidonoyl-GPE | Turkey | | Meatballs, | | Lamb, Pork, | |
| (P-16:0/20:4)* | Without Skin | | Beef, Chicken | | Steak, Golash | |
| | Freq | | Freq | | Freq | |
| X - 11858 | SF_Tahini_wt | 0.326823 | Tahini Salad | 0.171167 | SF_Hummus | 0.068006 |
| | | | Freq | | Salad_wt | |
| 1-(1-enyl-stearoyl)- | Egg, Hard | 0.1218 | Beef, Veal, | 0.108988 | Turkey | 0.103305 |
| 2-arachidonoyl-GPE | Boiled or Soft | | Lamb, Pork, | | Meatballs, | |
| (P-18:0/20:4)* | Freq | | Steak, Golash | | Beef, Chicken | |
| | | | Freq | | Freq | |
| X - 21339 | Fries Freq | 0.212512 | Falafel in Pita | 0.093116 | SF_Apple_wt | −0.08103 |
| | | | Bread Freq | | | |
| 3-methylhistidine | Beef, Veal, | 0.106555 | Pastrami or | 0.102308 | Chicken or | 0.09838 |
| | Lamb, Pork, | | Smoked Turkey | | Turkey | |
| | Steak, Golash | | Breast Freq | | Without Skin | |
| | Freq | | | | Freq | |
| X - 23649 | SF_Coffee_wt | 0.445723 | Coffee Freq | 0.321779 | Mixed | 0.090503 |
| | | | | | Chicken or | |
| | | | | | Turkey Dishes | |
| | | | | | Freq | |
| 4-ethylcatechol | SF_Coffee_wt | 0.331396 | Coffee Freq | 0.238634 | SF_WhiteWheat_g_wt | −0.03928 |
| sulfate | | | | | | |
| X - 11880 | Fries Freq | 0.206379 | Falafel in Pita | 0.087521 | SF_Natural | −0.07837 |
| | | | Bread Freq | | Yogurt_wt | |
| X - 11308 | Fries Freq | 0.138526 | Alcoholic | 0.106923 | SF_Hummus | 0.080083 |
| | | | Drinks Freq | | Salad_wt | |
| 2,3-dihydroxypyridine | Coffee Freq | 0.453341 | SF_Coffee_wt | 0.418166 | SF_Bread_wt | −0.06984 |
| beta-cryptoxanthin | Mandarin or | 0.187788 | Red Pepper | 0.147568 | Persimmon | 0.11856 |
| | Clementine | | Freq | | Freq | |
| | Freq | | | | | |
| X - 13844 | SF_Coffee_wt | 0.3579 | Coffee Freq | 0.274482 | Regular Sodas | −0.11742 |
| | | | | | with Sugar | |
| | | | | | Freq | |
| X - 11372 | Fries Freq | 0.159375 | Salty Snacks | 0.10569 | Alcoholic | 0.073839 |
| | | | Freq | | Drinks Freq | |
| 1-palmitoyl-2- | Fish Cooked, | 0.252315 | Canned Tuna | 0.100372 | Fish (not | 0.064741 |
| docosahexaenoyl-GPC | Baked or | | or Tuna Salad | | Tuna) Pickled, | |
| (16:0/22:6) | Grilled Freq | | Freq | | Dried, Smoked, | |
| | | | | | Canned Freq | |
| X - 24949 | SF_Tahini_wt | 0.19913 | Tahini Salad | 0.151 | SF_Olive | 0.061803 |
| | | | Freq | | oil_wt | |
| X - 18914 | 3% Milk Freq | 0.125681 | Cooked | −0.10398 | SF_Milk_wt | 0.097464 |
| | | | Legumes Freq | | | |
| X - 21661 | SF_Tahini_wt | 0.327191 | Tahini Salad | 0.141354 | Hummus | 0.092048 |
| | | | Freq | | Salad Freq | |
| sphingomyelin | >=16% Yellow | 0.094716 | 3% Milk Freq | 0.081685 | Cooked | −0.07917 |
| (d17:1/16:0, | Cheese Freq | | | | Legumes Freq | |
| d18:1/15:0, | | | | | | |
| d16:1/17:0)* | | | | | | |
| X - 21752 | Cooked | 0.27247 | Granola or | 0.189121 | SF_Granola_wt | 0.100119 |
| | Cereal such as | | Bernflaks | | | |
| | Oatmeal | | Freq | | | |
| | Porridge Freq | | | | | |
| X - 12816 | SF_Coffee_wt | 0.50891 | Coffee Freq | 0.271773 | SF_Cappuccino_wt | 0.155256 |
| 5alpha-androstan- | Beer Freq | 0.165139 | SF_Beer_wt | 0.130197 | SF_WhiteWheat_g_wt | 0.102007 |
| 3alpha,17beta-diol | | | | | | |
| monosulfate (2) | | | | | | |
| stachydrine | SF_Orange_wt | 0.156365 | Mandarin or | 0.093164 | SF_Vegetable | 0.060348 |
| | | | Clementine | | Salad_wt | |
| | | | Freq | | | |
| X - 23639 | SF_Coffee_wt | 0.129872 | Coffee Freq | 0.080549 | SF_Omelette_wt | −0.06285 |
| sphingomyelin | >=16% Yellow | 0.095505 | SF_Milk_wt | 0.077198 | Beef or | 0.072712 |
| (d18:1/17:0, | Cheese Freq | | | | Chicken Soup | |
| d17:1/18:0, | | | | | Freq | |
| d19:1/16:0) | | | | | | |
| X - 11381 | 3% Milk Freq | 0.185143 | SF_Coffee_wt | 0.128715 | SF_Milk_wt | 0.069382 |
| X - 24637 | SF_Soymilk_wt | 0.20839 | SF_Tofu_wt | 0.051064 | Beef, Veal, | −0.02708 |
| | | | | | Lamb, Pork, | |
| | | | | | Steak, Golash | |
| | | | | | Freq | |
| X - 17185 | SF_Coffee_wt | 0.39039 | Coffee Freq | 0.19712 | SF_Salmon_wt | −0.07847 |
| 5-acetylamino-6- | SF_Coffee_wt | 0.33866 | Coffee Freq | 0.238393 | SF_Tomatoes_wt | −0.04626 |
| formylamino- | | | | | | |
| 3-methyluracil | | | | | | |
| X - 17145 | SF_Apple_wt | 0.194117 | SF_Orange_wt | 0.112769 | Apple Freq | 0.092335 |
| X - 11847 | SF_Tahini_wt | 0.295026 | Tahini Salad | 0.136155 | Hummus | 0.082698 |
| | | | Freq | | Salad Freq | |
| 1,5-anhydroglucitol | Regular Sodas | 0.138944 | SF_WhiteWheat_g_wt | 0.112928 | Ordinary | 0.082267 |
| (1,5-AG) | with Sugar | | | | Bread or | |
| | Freq | | | | Challah Freq | |
| X - 18249 | SF_Olive | −0.11992 | Cooked | −0.10672 | 3% Milk Freq | 0.101731 |
| | oil_wt | | Legumes Freq | | | |
| citraconate/ | Coffee Freq | 0.232123 | SF_Coffee_wt | 0.199446 | SF_Rice | 0.047645 |
| glutaconate | | | | | crackers_wt | |
| X - 12329 | SF_Coffee_wt | 0.319652 | Coffee Freq | 0.227085 | SF_Bread_wt | −0.07622 |
| sphingomyelin | SF_Milk_wt | 0.102712 | Cooked | −0.08776 | Hummus | −0.07391 |
| (d18:1/19:0, | | | Legumes Freq | | Salad Freq | |
| d19:1/18:0)* | | | | | | |
| X - 14939 | SF_Tahini_wt | 0.115425 | SF_Hummus | 0.08575 | Falafel in Pita | 0.062322 |
| | | | Salad_wt | | Bread Freq | |
| acesulfame | Diet Soda | 0.247531 | Artificial | 0.154245 | SF_Sugar Free | 0.084721 |
| | Freq | | Sweeteners | | Gum_wt | |
| | | | Freq | | | |
| 1-stearoyl-2- | Fish Cooked, | 0.224374 | Canned Tuna | 0.098494 | Fish (not | 0.065521 |
| docosahexaenoyl-GPC | Baked or | | or Tuna Salad | | Tuna) Pickled, | |
| (18:0/22:6) | Grilled Freq | | Freq | | Dried, Smoked, | |
| | | | | | Canned Freq | |
| 5alpha-androstan- | Beer Freq | 0.193374 | SF_WhiteWheat_g_wt | 0.128321 | SF_Beer_wt | 0.118443 |
| 3alpha,17beta- | | | | | | |
| diol disulfate | | | | | | |
| tryptophan | Cooked | 0.194321 | SF_Tahini_wt | 0.090885 | Beef or | −0.05859 |
| betaine | Legumes Freq | | | | Chicken Soup | |
| | | | | | Freq | |
| gamma- | Cooked | −0.08704 | SF_Parsley_wt | −0.07333 | SF_WhiteWheat_g_wt | 0.065157 |
| glutamylvaline | Legumes Freq | | | | | |
| daidzein | SF_Soymilk_wt | 0.150796 | SF_Tofu_wt | 0.03136 | Cooked | 0.020687 |
| sulfate (2) | | | | | Legumes Freq | |
| sphingomyelin | 3% Milk Freq | 0.109429 | 3-5% Natural | 0.108154 | >=16% Yellow | 0.095027 |
| (d18:1/25:0, | | | Yogurt Freq | | Cheese Freq | |
| d19:0/24:1, | | | | | | |
| d20:1/23:0, | | | | | | |
| d19:1/24:0)* | | | | | | |
| sphingomyelin | Cooked | −0.09994 | SF_Milk_wt | 0.074219 | 0.5-3% White | 0.063754 |
| (d18:1/14:0, | Legumes Freq | | | | Cheese, | |
| d16:1/16:0)* | | | | | Cottage Freq | |
| X - 24475 | SF_Almonds_wt | 0.180157 | Nuts, | 0.135553 | Apple Freq | 0.101342 |
| | | | almonds, | | | |
| | | | pistachios | | | |
| | | | Freq | | | |
| methyl | SF_Butter_wt | −0.09535 | Orange or | 0.093033 | SF_Banana_wt | 0.086389 |
| glucopyranoside | | | Grapefruit | | | |
| (alpha + beta) | | | Freq | | | |
| X - 11795 | SF_WhiteWheat_g_wt | 0.127225 | Pasta or | 0.125764 | SF_WholeWheat_g_wt | 0.108236 |
| | | | Flakes Freq | | | |
| docosahexaenoate | Fish Cooked, | 0.183304 | Fish (not | 0.098234 | Canned Tuna | 0.085462 |
| (DHA; 22:6n3) | Baked or | | Tuna) Pickled, | | or Tuna Salad | |
| | Grilled Freq | | Dried, Smoked, | | Freq | |
| | | | Canned Freq | | | |
| X - 11849 | SF_Tahini_wt | 0.26333 | Tahini Salad | 0.122309 | Hummus | 0.089613 |
| | | | Freq | | Salad Freq | |
| X - 18922 | SF_Tahini_wt | 0.1229 | SF_Olive | 0.088716 | Peach, | −0.06299 |
| | | | oil_wt | | Nectarine, | |
| | | | | | Plum Freq | |
| S-methylcysteine | Brussels | 0.120063 | SF_Cooked | 0.05419 | SF_Kohlrabi_wt | 0.050796 |
| sulfoxide | Sprouts, | | cauliflower_wt | | | |
| | Green or Red | | | | | |
| | Cabbage Freq | | | | | |
| perfluorooctane- | Fish Cooked, | 0.122487 | Fish (not | 0.093453 | Simple | −0.0496 |
| sulfonic acid | Baked or | | Tuna) Pickled, | | Cookies or | |
| (PFOS) | Grilled Freq | | Dried, Smoked, | | Biscuits Freq | |
| | | | Canned Freq | | | |
| 3-hydroxystachydrine* | SF_Orange_wt | 0.173077 | Mandarin or | 0.134784 | SF_Plum_wt | −0.07661 |
| | | | Clementine | | | |
| | | | Freq | | | |
| sphingomyelin | SF_Milk_wt | 0.111512 | Hummus | −0.0925 | Beer Freq | −0.06966 |
| (d18:2/23:1)* | | | Salad Freq | | | |
| maleate | Coffee Freq | 0.211948 | SF_Coffee_wt | 0.149481 | SF_Rice | 0.05272 |
| | | | | | crackers_wt | |
| eicosenedioate | SF_WhiteWheat_g_wt | 0.102584 | SF_Apple_wt | −0.08961 | Fries Freq | 0.0863 |
| (C20:1-DC)* | | | | | | |
| homostachydrine* | SF_Coffee_wt | 0.226189 | SF_Wholemeal | 0.083208 | SF_WholeWheat_g_wt | 0.080145 |
| | | | Bread_wt | | | |
| creatine | Turkey | 0.099401 | Chicken or | 0.090823 | Artificial | 0.056639 |
| | Meatballs, | | Turkey | | Sweeteners | |
| | Beef, Chicken | | Without Skin | | Freq | |
| | Freq | | Freq | | | |
| X - 17653 | Falafel in Pita | 0.121756 | Fries Freq | 0.07962 | SF_WhiteWheat_g_wt | 0.069756 |
| | Bread Freq | | | | | |
| catechol | SF_Coffee_wt | 0.26583 | Coffee Freq | 0.161844 | Herbal Tea | 0.070285 |
| sulfate | | | | | Freq | |
| X - 16935 | Fries Freq | 0.22235 | SF_Tahini_wt | −0.11794 | Small Burekas | 0.093917 |
| | | | | | Freq | |
| sphingomyelin | Beer Freq | −0.10449 | Hummus | −0.08009 | SF_Coffee_wt | 0.065897 |
| (d18:2/21:0, | | | Salad Freq | | | |
| d16:2/23:0)* | | | | | | |
| sphingomyelin | Cooked | −0.10394 | Beer Freq | −0.06772 | 0.5-3% White | 0.062997 |
| (d17:2/16:0, | Legumes Freq | | | | Cheese, | |
| d18:2/15:0)* | | | | | Cottage Freq | |
| S-methylcysteine | Brussels | 0.094394 | SF_Lentils_wt | 0.052955 | SF_Vegetable | 0.041488 |
| | Sprouts, | | | | Soup_wt | |
| | Green or Red | | | | | |
| | Cabbage Freq | | | | | |
| N-(2-furoyl)glycine | SF_Coffee_wt | 0.232673 | Coffee Freq | 0.140282 | SF_Wine_wt | 0.03347 |
| 2,6-dihydroxybenzoic | Cooked | 0.09138 | Couscous, | 0.060169 | Granola or | 0.057334 |
| acid | Cereal such as | | Burgul, | | Bernflaks | |
| | Oatmeal | | Mamaliga, | | Freq | |
| | Porridge Freq | | Groats Freq | | | |
| X - 12837 | Coffee Freq | 0.280958 | SF_Coffee_wt | 0.218618 | SF_Cappuccino_wt | 0.069369 |
| pyroglutamine* | Beer Freq | 0.107215 | Mayonnaise | −0.08141 | Falafel in Pita | 0.066716 |
| | | | Including | | Bread Freq | |
| | | | Light Freq | | | |
| N-delta- | Red Pepper | 0.12734 | Cooked | 0.10344 | SF_Apple_wt | 0.087097 |
| acetylornithine | Freq | | Legumes Freq | | | |
| X - 21736 | SF_Butter_wt | 0.126458 | SF_Carrots_wt | −0.08728 | SF_Tomatoes_wt | −0.07812 |
| tridecenedioate | Tahini Salad | −0.16699 | SF_Tahini_wt | −0.12043 | SF_Soymilk_wt | −0.10931 |
| (C13:1-DC)* | Freq | | | | | |
| heneicosa- | Fish Cooked, | 0.144003 | Fish (not | 0.122323 | SF_Rice_wt | −0.07452 |
| pentaenoate | Baked or | | Tuna) Pickled, | | | |
| (21:5n3) | Grilled Freq | | Dried, Smoked, | | | |
| | | | Canned Freq | | | |
| 2-aminobutyrate | Simple | −0.06513 | Chicken or | 0.06163 | Beef or | 0.051808 |
| | Cookies or | | Turkey With | | Chicken Soup | |
| | Biscuits Freq | | Skin Freq | | Freq | |
| X - 11378 | Alcoholic | 0.103051 | Beer Freq | 0.087346 | SF_WhiteWheat_g_wt | 0.075742 |
| | Drinks Freq | | | | | |
| 2-hydroxylaurate | Fries Freq | 0.097427 | Alcoholic | 0.089771 | SF_Apple_wt | −0.07034 |
| | | | Drinks Freq | | | |
| 17-methylstearate | Butter Freq | 0.101184 | Simple | −0.08125 | Beef, Veal, | 0.057793 |
| | | | Cookies or | | Lamb, Pork, | |
| | | | Biscuits Freq | | Steak, Golash | |
| | | | | | Freq | |
| 15-methylpalmitate | Butter Freq | 0.079326 | SF_Butter_wt | 0.059867 | 3% Milk Freq | 0.057259 |
| sphingomyelin | Beer Freq | −0.09521 | Honey, Jam, | 0.086719 | Cooked | −0.07236 |
| (d18:2/14:0, | | | fruit syrup, | | Legumes Freq | |
| d18:1/14:l)* | | | Maple syrup | | | |
| | | | Freq | | | |
| hippurate | SF_Coffee_wt | 0.288796 | Coffee Freq | 0.049863 | Fried Fish | −0.04174 |
| | | | | | Freq | |
| X - 12730 | SF_Coffee_wt | 0.251511 | Coffee Freq | 0.177172 | SF_Bread_wt | −0.07314 |
| 1-(1-enyl-palmitoyl)- | Beef, Veal, | 0.143527 | Egg Recipes | 0.072606 | Turkey | 0.05528 |
| 2-arachidonoyl-GPC | Lamb, Pork, | | Freq | | Meatballs, | |
| (P-16:0/20:4)* | Steak, Golash | | | | Beef, Chicken | |
| | Freq | | | | Freq | |
| caffeic acid | SF_Coffee_wt | 0.179171 | Coffee Freq | 0.138653 | Regular Sodas | −0.04717 |
| sulfate | | | | | with Sugar | |
| | | | | | Freq | |
| 1-(1-enyl- | Beef or | 0.110716 | Egg, Hard | 0.085947 | Beef, Veal, | 0.065351 |
| stearoyl)-GPE | Chicken Soup | | Boiled or Soft | | Lamb, Pork, | |
| (P-18:0)* | Freq | | Freq | | Steak, Golash | |
| | | | | | Freq | |
| 3-methyl catechol | Coffee Freq | 0.227497 | SF_Coffee_wt | 0.223543 | SF_Wine_wt | 0.071815 |
| sulfate (2) | | | | | | |
| oxalate | Red Pepper | 0.171087 | SF_Butter_wt | −0.06363 | SF_Cucumber_wt | 0.057747 |
| (ethanedioate) | Freq | | | | | |
| eicosapentaenoate | Fish (not | 0.087437 | Fish Cooked, | 0.083989 | SF_Tahini_wt | −0.07324 |
| (EPA; 20:5n3) | Tuna) Pickled, | | Baked or | | | |
| | Dried, Smoked, | | Grilled Freq | | | |
| | Canned Freq | | | | | |
| X - 12738 | SF_Coffee_wt | 0.292468 | Coffee Freq | 0.264584 | SF_Wine_wt | 0.083477 |
| X - 21383 | SF_Hummus | 0.056309 | 5-9% Yellow | 0.054893 | 5-9% White | 0.051581 |
| | Salad_wt | | Cheese Freq | | Cheese, | |
| | | | | | Cottage Freq | |
| creatinine | Beer Freq | 0.091432 | SF_Beef_wt | 0.061359 | SF_WhiteWheat_g_wt | 0.058713 |
| gentisate | Cooked | 0.10068 | SF_Almonds_wt | 0.077111 | Wholemeal or | 0.063621 |
| | Legumes Freq | | | | Rye Bread | |
| | | | | | Freq | |
| X - 24951 | Fries Freq | 0.101159 | SF_WhiteWheat_g_wt | 0.07231 | Salty Snacks | 0.061788 |
| | | | | | Freq | |
| X - 17654 | SF_WhiteWheat_g_wt | 0.085536 | Falafel in Pita | 0.085105 | Fries Freq | 0.075289 |
| | | | Bread Freq | | | |
| tiglylcarnitine | Cooked | −0.07801 | SF_Omelette_wt | 0.075921 | Mango Freq | −0.06379 |
| (C5:1-DC) | Cereal such as | | | | | |
| | Oatmeal | | | | | |
| | Porridge Freq | | | | | |
| 2-aminoheptanoate | SF_Milk_wt | −0.08734 | SF_Tahini_wt | 0.061512 | Chicken or | −0.05331 |
| | | | | | Turkey | |
| | | | | | Without Skin | |
| | | | | | Freq | |
| phytanate | Butter Freq | 0.080496 | Beef, Veal, | 0.06686 | Corn Freq | −0.06446 |
| | | | Lamb, Pork, | | | |
| | | | Steak, Golash | | | |
| | | | Freq | | | |
| androsterone | Beer Freq | 0.133229 | SF_Coffee_wt | −0.06105 | Hummus | 0.046412 |
| glucuronide | | | | | Salad Freq | |
| 4-vinylguaiacol | SF_Coffee_wt | 0.272866 | Coffee Freq | 0.151908 | SF_Bread_wt | −0.10835 |
| sulfate | | | | | | |
| 1-docosahexaenoyl- | Fish Cooked, | 0.272759 | Fish (not | 0.079088 | Canned Tuna | 0.064288 |
| glycerol (22:6) | Baked or | | Tuna) Pickled, | | or Tuna Salad | |
| | Grilled Freq | | Dried, Smoked, | | Freq | |
| | | | Canned Freq | | | |
| 2-aminophenol | SF_WholeWheat _g_wt | 0.117974 | SF_Wholemeal | 0.109317 | Pasta or | 0.076604 |
| sulfate | | | Bread_wt | | Flakes Freq | |
| N2,N5-diacetylornithine | SF_Apple_wt | 0.105153 | Red Pepper | 0.095432 | Cooked | 0.077642 |
| | | | Freq | | Legumes Freq | |
| X - 17676 | SF_Coffee_wt | 0.200781 | Coffee Freq | 0.193388 | SF_Rice | 0.073746 |
| | | | | | crackers_wt | |
| carotene diol (2) | SF_WhiteWheat_g_wt | −0.05751 | Yeast Cakes | −0.05427 | SF_Chicken | −0.05335 |
| | | | and Cookies | | breast_wt | |
| | | | as Rogallach, | | | |
| | | | Croissant or | | | |
| | | | Donut Freq | | | |
| 4-ethylphenylsulfate | SF_Soymilk_wt | 0.146566 | SF_Tofu_wt | 0.059703 | Beef, Veal, | −0.05809 |
| | | | | | Lamb, Pork, | |
| | | | | | Steak, Golash | |
| | | | | | Freq | |
| 2-aminoadipate | Pastrami or | 0.074629 | SF_Sugar Free | −0.04829 | White or | −0.04431 |
| | Smoked Turkey | | Gum_wt | | Brown Sugar | |
| | Breast Freq | | | | Freq | |
| O-methylcatechol | SF_Coffee_wt | 0.252455 | Coffee Freq | 0.110436 | SF_Wine_wt | 0.060985 |
| sulfate | | | | | | |
| X - 24655 | SF_Soymilk_wt | 0.164445 | SF_Tofu_wt | 0.024294 | SF_Rice_wt | −0.02072 |
| ceramide | Artificial | 0.12836 | Cooked | −0.12107 | Coffee Freq | 0.090017 |
| (d18:1/14:0, | Sweeteners | | Legumes Freq | | | |
| d16:1/16:0)* | Freq | | | | | |
| X - 17325 | SF_Coffee_wt | 0.347227 | Coffee Freq | 0.068552 | Peach, | 0.044107 |
| | | | | | Nectarine, | |
| | | | | | Plum Freq | |
| N1-Methyl-2-pyridone- | Pastrami or | 0.090985 | 0-1.5% | 0.061739 | Roll or | −0.05568 |
| 5-carboxamide | Smoked Turkey | | Natural | | Bageles Freq | |
| | Breast Freq | | Yogurt Freq | | | |
| urate | SF_WhiteWheat_g_wt | 0.11539 | Chicken or | 0.058241 | Beer Freq | 0.057116 |
| | | | Turkey With | | | |
| | | | Skin Freq | | | |
| carotene diol (3) | Red Pepper | 0.245336 | SF_Orange_wt | 0.035475 | Wholemeal or | −0.03217 |
| | Freq | | | | Rye Bread | |
| | | | | | Freq | |
| 1-methylhistidine | Beef, Veal, | 0.096089 | Chicken or | 0.056173 | SF_WhiteWheat_g_wt | 0.054076 |
| | Lamb, Pork, | | Turkey With | | | |
| | Steak, Golash | | Skin Freq | | | |
| | Freq | | | | | |
| 3-acetylphenol | SF_Coffee_wt | 0.273419 | Coffee Freq | 0.212696 | SF_Salmon_wt | −0.03895 |
| sulfate | | | | | | |
| theobromine | Milk or Dark | 0.17203 | Coffee Freq | 0.127556 | SF_Coffee_wt | 0.084332 |
| | Chocolate | | | | | |
| | Freq | | | | | |
| N-methylproline | SF_Orange_wt | 0.165026 | Mandarin or | 0.082633 | Orange or | 0.055373 |
| | | | Clementine | | Grapefruit | |
| | | | Freq | | Freq | |
| dihydrocaffeate | SF_Coffee_wt | 0.27251 | Coffee Freq | 0.133393 | Pita Freq | −0.06401 |
| sulfate (2) | | | | | | |
| threonate | Red Pepper | 0.13263 | SF_WhiteWheat_g_wt | −0.06314 | SF_Apple_wt | 0.059448 |
| | Freq | | | | | |
| X - 12221 | SF_Coffee_wt | 0.29291 | SF_Tahini_wt | −0.06887 | SF_Peas_wt | −0.06465 |
| myristoyl | Butter Freq | 0.058086 | 3-5% Natural | 0.050942 | Coffee Freq | 0.050482 |
| dihydrosphingo- | | | Yogurt Freq | | | |
| myelin | | | | | | |
| (d18:0/14:0)* | | | | | | |
| X - 17367 | SF_Coffee_wt | 0.335257 | Pasta or | −0.04922 | Peach, | 0.045612 |
| | | | Flakes Freq | | Nectarine, | |
| | | | | | Plum Freq | |
| 4-methyl-2- | Egg Recipes | 0.073025 | SF_Beef_wt | 0.057631 | Beef, Veal, | 0.052266 |
| oxopentanoate | Freq | | | | Lamb, Pork, | |
| | | | | | Steak, Golash | |
| | | | | | Freq | |
| 1-myristoyl-2- | Cooked | −0.11559 | Tahini Salad | −0.07746 | SF_White | 0.067513 |
| palmitoyl-GPC | Legumes Freq | | Freq | | Cheese_wt | |
| (14:0/16:0) | | | | | | |
| arabonate/xylonate | SF_Coffee_wt | 0.150348 | Mandarin or | 0.065405 | Wholemeal or | 0.043615 |
| | | | Clementine | | Rye Bread | |
| | | | Freq | | Freq | |
| leucine | Cooked | −0.085 | SF_Beef_wt | 0.043223 | SF_Omelette_wt | 0.040266 |
| | Cereal such as | | | | | |
| | Oatmeal | | | | | |
| | Porridge Freq | | | | | |
| 5alpha-androstan- | Beer Freq | 0.178786 | Fries Freq | 0.075916 | SF_Milk_wt | −0.07192 |
| 3beta,17beta- | | | | | | |
| diol disulfate | | | | | | |
| 3-methylxanthine | Milk or Dark | 0.179884 | SF_Coffee_wt | 0.123982 | Coffee Freq | 0.107916 |
| | Chocolate | | | | | |
| | Freq | | | | | |
| X - 16087 | Fish Cooked, | 0.081994 | SF_Dark | 0.070058 | SF_Hummus | 0.064971 |
| | Baked or | | Chocolate_wt | | Salad_wt | |
| | Grilled Freq | | | | | |
| 3-methyl-2- | Egg Recipes | 0.071551 | Beef, Veal, | 0.05501 | White or | −0.05454 |
| oxovalerate | Freq | | Lamb, Pork, | | Brown Sugar | |
| | | | Steak, Golash | | Freq | |
| | | | Freq | | | |
| 2-hydroxybutyrate/ | Fish Cooked, | 0.083833 | Simple | −0.06585 | Olives Freq | 0.063047 |
| 2-hydroxyisobutyrate | Baked or | | Cookies or | | | |
| | Grilled Freq | | Biscuits Freq | | | |
| ergothioneine | SF_Mushrooms_wt | 0.054552 | Yeast Cakes | −0.04754 | White or | −0.04292 |
| | | | and Cookies | | Brown Sugar | |
| | | | as Rogallach, | | Freq | |
| | | | Croissant or | | | |
| | | | Donut Freq | | | |
| 1-lignoceroyl-GPC | Fries Freq | −0.09709 | SF_Tahini_wt | 0.084528 | SF_Banana_wt | 0.073216 |
| (24:0) | | | | | | |
| linoleoylcarnitine | SF_Tahini_wt | 0.124663 | SF_WhiteWheat_g_wt | 0.088672 | Nuts, | 0.0619 |
| (C18:2)* | | | | | almonds, | |
| | | | | | pistachios | |
| | | | | | Freq | |
| N-acetylcarnosine | Beer Freq | 0.138963 | SF_WhiteWheat_g_wt | 0.098821 | SF_Hummus | 0.064194 |
| | | | | | Salad_wt | |
| N-trimethyl 5- | SF_Milk_wt | 0.158341 | SF_Natural | 0.108177 | Salty Cheese, | 0.058578 |
| aminovalerate | | | Yogurt_wt | | Tzfatit, | |
| | | | | | Bulgarian, | |
| | | | | | Brinza, | |
| | | | | | Medium Slice | |
| | | | | | Freq | |
| sphingomyelin | SF_Milk_wt | 0.093966 | 3% Milk Freq | 0.061361 | SF_Dark | −0.05679 |
| (d18:1/22:2, | | | | | Chocolate_wt | |
| d18:2/22:1, | | | | | | |
| d16:1/24:2)* | | | | | | |
| urea | 0-1.5% | 0.052525 | Pastrami or | 0.049891 | 5-9% Yellow | 0.049752 |
| | Natural | | Smoked Turkey | | Cheese Freq | |
| | Yogurt Freq | | Breast Freq | | | |
| 3-carboxy-4- | Fish Cooked, | 0.097277 | Roll or | −0.07205 | SF_Couscous_wt | −0.05875 |
| methyl-5- | Baked or | | Bageles Freq | | | |
| pentyl-2- | Grilled Freq | | | | | |
| furanpropionate | | | | | | |
| (3-CMPFP)** | | | | | | |
| Fibrinopeptide | SF_Bread_wt | −0.10601 | Beer Freq | −0.03725 | 3% Milk Freq | 0.01296 |
| A(7-16)* | | | | | | |
| 3-(4-hydroxy- | SF_WhiteWheat_g_wt | 0.072752 | Kiwi or | −0.05595 | SF_Sugar Free | −0.05294 |
| phenyl)lactate | | | Strawberries | | Gum_wt | |
| | | | Freq | | | |
| 1-(1-enyl- | Chicken or | 0.068906 | Beef, Veal, | 0.058324 | Chicken or | 0.056297 |
| palmitoyl)-2- | Turkey | | Lamb, Pork, | | Turkey With | |
| linoleoyl-GPE | Without Skin | | Steak, Golash | | Skin Freq | |
| (P-16:0/18:2)* | Freq | | Freq | | | |
| X - 24948 | Beer Freq | 0.136619 | SF_Coffee_wt | −0.08636 | Orange or | 0.047517 |
| | | | | | Grapefruit | |
| | | | | | Juice Freq | |
| 1-(1-enyl-stearoyl)- | Egg, Hard | 0.070487 | Beef, Veal, | 0.06215 | Processed | −0.05125 |
| 2-oleoyl-GPE | Boiled or Soft | | Lamb, Pork, | | Meat Free | |
| (P-18:0/18:1) | Freq | | Steak, Golash | | Products Freq | |
| | | | Freq | | | |
| 3-hydroxybutyryl- | Cauliflower or | 0.062891 | SF_Whipped | 0.056602 | SF_Olives_wt | 0.056434 |
| carnitine (1) | Broccoli Freq | | cream_wt | | | |
| X - 19183 | SF_Orange_wt | 0.172544 | Mandarin or | 0.0745 | SF_Mandarin_wt | 0.042371 |
| | | | Clementine | | | |
| | | | Freq | | | |
| X - 23659 | Small Burekas | −0.0857 | SF_Tomatoes_wt | 0.068558 | SF_Vegetable | 0.065828 |
| | Freq | | | | Salad_wt | |
| 7-methylurate | SF_Coffee_wt | 0.259783 | Coffee Freq | 0.156831 | Milk or Dark | 0.082805 |
| | | | | | Chocolate | |
| | | | | | Freq | |
| X - 24757 | SF_Coffee_wt | 0.31171 | Peach, | 0.055613 | Fried Fish | −0.05359 |
| | | | Nectarine, | | Freq | |
| | | | Plum Freq | | | |
| X - 24328 | Yeast Cakes | 0.086134 | Watermelon | −0.05613 | Egg Recipes | 0.055837 |
| | and Cookies | | Freq | | Freq | |
| | as Rogallach, | | | | | |
| | Croissant or | | | | | |
| | Donut Freq | | | | | |
| pregn steroid | Beer Freq | 0.119691 | SF_Coffee_wt | −0.0608 | Shish Kebab | 0.040348 |
| monosulfate | | | | | in Pita Bread | |
| C21H34O5S* | | | | | Freq | |
| ethyl | SF_Wine_wt | 0.120814 | Alcoholic | 0.035542 | SF_Beer_wt | 0.02615 |
| glucuronide | | | Drinks Freq | | | |
| 3-hydroxyhippurate | SF_Coffee_wt | 0.254046 | SF_WholeWheat_g_wt | 0.108662 | Coffee Freq | 0.061144 |
| sulfate | | | | | | |
| 7-methylxanthine | Milk or Dark | 0.137426 | Coffee Freq | 0.117867 | SF_Dark | 0.093571 |
| | Chocolate | | | | Chocolate_wt | |
| | Freq | | | | | |
| X - 18886 | Fries Freq | 0.171409 | Olives Freq | 0.088129 | SF_Wine_wt | 0.058571 |
| glycine | Falafel in Pita | 0.12458 | SF_Tomatoes_wt | −0.09125 | SF_WhiteWheat_g_wt | 0.067141 |
| conjugate of | Bread Freq | | | | | |
| C10H14O2 (1)* | | | | | | |
| caprate (10:0) | SF_Coffee_wt | 0.074579 | SF_Butter_wt | 0.063468 | Butter Freq | 0.056425 |
| dihydroferulic | SF_Coffee_wt | 0.290151 | Coffee Freq | 0.148282 | 3-5% Natural | −0.0903 |
| acid | | | | | Yogurt Freq | |
| X - 12306 | SF_Tomatoes_wt | 0.105789 | Dried Fruits | 0.089391 | Herbal Tea | 0.060606 |
| | | | Freq | | Freq | |
| leucylalanine | SF_Bread_wt | −0.0722 | SF_Omelette_wt | −0.041 | SF_Beef_wt | −0.03317 |
| N1-methylinosine | SF_Orange_wt | −0.13759 | Orange or | −0.04785 | SF_Yellow | 0.041202 |
| | | | Grapefruit | | Cheese_wt | |
| | | | Freq | | | |
| X - 12544 | SF_WholeWheat_g_wt | 0.168178 | Wholemeal or | 0.151852 | Pasta or | 0.07402 |
| | | | Rye Bread | | Flakes Freq | |
| | | | Freq | | | |
| androstenediol | Beer Freq | 0.180346 | SF_Coffee_wt | −0.06751 | SF_WhiteWheat_g_wt | 0.055027 |
| (3alpha,17alpha) | | | | | | |
| monosulfate (3) | | | | | | |
| argininate* | Cooked | 0.12675 | Carrots, Fresh | 0.040944 | SF_Almonds_wt | 0.039395 |
| | Legumes Freq | | or Cooked, | | | |
| | | | Carrot Juice | | | |
| | | | Freq | | | |
| ferulic acid 4- | SF_Coffee_wt | 0.178886 | SF_Wholemeal | 0.08723 | Coffee Freq | 0.068412 |
| sulfate | | | Bread_wt | | | |
| pregnen-diol | Beer Freq | 0.135676 | SF_Coffee_wt | −0.09444 | Fries Freq | 0.030136 |
| disulfate | | | | | | |
| C21H34O8S2* | | | | | | |
| N-acetyl-3- | Chicken or | 0.092063 | Chicken or | 0.084964 | SF_Omelette_wt | 0.067281 |
| methylhistidine* | Turkey | | Turkey With | | | |
| | Without Skin | | Skin Freq | | | |
| | Freq | | | | | |
| X - 17655 | SF_Tahini_wt | 0.202332 | Tahini Salad | 0.070704 | SF_Hummus | 0.06714 |
| | | | Freq | | Salad_wt | |
| X - 24693 | White or | −0.0901 | Yeast Cakes | −0.08164 | SF_Tahini_wt | 0.071629 |
| | Brown Sugar | | and Cookies | | | |
| | Freq | | as Rogallach, | | | |
| | | | Croissant or | | | |
| | | | Donut Freq | | | |
| S-methylmethionine | Lettuce Freq | 0.098783 | SF_Vegetable | 0.089156 | Red Pepper | 0.068482 |
| | | | Salad_wt | | Freq | |
| X - 23314 | SF_Orange_wt | 0.084577 | Mandarin or | 0.059914 | SF_Banana_wt | 0.045285 |
| | | | Clementine | | | |
| | | | Freq | | | |
| sphingomyelin | SF_Dark | −0.09798 | 3% Milk Freq | 0.073143 | SF_Milk_wt | 0.054922 |
| (d18:1/20:2, | Chocolate_wt | | | | | |
| d18:2/20:1, | | | | | | |
| d16:1/22:2)* | | | | | | |
| androstenediol | SF_Coffee_wt | −0.09061 | Beer Freq | 0.081526 | Sugar | 0.064238 |
| (3alpha,17alpha) | | | | | Sweetened | |
| monosulfate (2) | | | | | Chocolate | |
| | | | | | Milk Freq | |
| alpha-hydroxy- | Beer Freq | 0.039992 | Beef, Veal, | 0.028714 | SF_Beef_wt | 0.026511 |
| isocaproate | | | Lamb, Pork, | | | |
| | | | Steak, Golash | | | |
| | | | Freq | | | |
| X - 24473 | Nuts, | 0.106187 | SF_Almonds_wt | 0.076986 | SF_Dried | 0.060379 |
| | almonds, | | | | dates_wt | |
| | pistachios | | | | | |
| | Freq | | | | | |
| X - 24337 | SF_Potatoes_wt | 0.091924 | SF_Salmon_wt | −0.08841 | SF_Water_wt | −0.08513 |
| X - 21829 | SF_Butter_wt | 0.068232 | SF_Wine_wt | 0.066805 | SF_Tomatoes | −0.06357 |
| | | | | | wt | |
| X - 23780 | Red Pepper | 0.214012 | Kiwi or | −0.03662 | SF_Vegetable | 0.034627 |
| | Freq | | Strawberries | | Salad_wt | |
| | | | Freq | | | |
| deoxycarnitine | Beer Freq | 0.081061 | SF_Vegetable | 0.069293 | SF_WhiteWheat_g_wt | 0.061974 |
| | | | Salad_wt | | | |
| N,N,N-trimethyl- | SF_WhiteWheat_g_wt | 0.076917 | SF_Beer_wt | 0.050797 | Hummus | 0.049043 |
| alanylproline | | | | | Salad Freq | |
| betaine (TMAP) | | | | | | |
| Fibrinopeptide | Beer Freq | −0.05044 | SF_Bread_wt | −0.04958 | Cooked | −0.02234 |
| B (1-13)** | | | | | Legumes Freq | |
| stearoylcarnitine | SF_Butter_wt | 0.076214 | SF_Dark | 0.066223 | SF_Beef_wt | 0.047197 |
| (C18) | | | Chocolate_wt | | | |
| myristate (14:0) | Artificial | 0.047372 | SF_Tahini_wt | −0.04426 | SF_Butter_wt | 0.041539 |
| | Sweeteners | | | | | |
| | Freq | | | | | |
| histidine | SF_Milk_wt | 0.079817 | Cooked | 0.071422 | SF_WhiteWheat_g_wt | −0.07029 |
| | | | Tomatoes, | | | |
| | | | Tomato | | | |
| | | | Sauce, | | | |
| | | | Tomato Soup | | | |
| | | | Freq | | | |
| isovaleryl- | SF_WhiteWheat_g_wt | 0.073234 | Cooked | −0.06223 | Chicken or | 0.051086 |
| carnitine (C5) | | | Cereal such as | | Turkey With | |
| | | | Oatmeal | | Skin Freq | |
| | | | Porridge Freq | | | |
| X - 13431 | SF_Butter_wt | 0.076001 | Alcoholic | 0.066183 | Butter Freq | 0.05745 |
| | | | Drinks Freq | | | |
| X - 13255 | Coffee Freq | 0.224197 | SF_Coffee_wt | 0.191833 | SF_Wholemeal | 0.063629 |
| | | | | | Crackers_wt | |
| X - 21319 | Fries Freq | 0.083015 | Cucumber | −0.05797 | Falafel in Pita | 0.054902 |
| | | | Freq | | Bread Freq | |
| X - 13866 | Fish Cooked, | 0.07941 | Canned Tuna | 0.072571 | SF_Tahini_wt | −0.06274 |
| | Baked or | | or Tuna Salad | | | |
| | Grilled Freq | | Freq | | | |
| 3-methyl-2- | Beef, Veal, | 0.035937 | Olives Freq | 0.032186 | SF_Soda | 0.029835 |
| oxobutyrate | Lamb, Pork, | | | | water_wt | |
| | Steak, Golash | | | | | |
| | Freq | | | | | |
| X - 07765 | Pasta or | 0.094759 | SF_Olive | −0.09441 | SF_WhiteWheat_g_wt | 0.060015 |
| | Flakes Freq | | oil_wt | | | |
| X - 22509 | SF_Tahini_wt | 0.220874 | SF_Water_wt | 0.042218 | SF_Mayonnaise_wt | −0.03097 |
| 2,3-dihydroxy- | Regular Sodas | −0.07983 | SF_Butter_wt | −0.06396 | Mandarin or | 0.061099 |
| 2-methylbutyrate | with Sugar | | | | Clementine | |
| | Freq | | | | Freq | |
| ADpSGEGDFX | Beer Freq | −0.09051 | SF_Bread_wt | −0.07817 | Salty Cheese, | 0.0402 |
| AEGGGVR* | | | | | Tzfatit, | |
| | | | | | Bulgarian, | |
| | | | | | Brinza, Thin | |
| | | | | | Slice Freq | |
| 5alpha-androstan- | Beer Freq | 0.173493 | SF_Vegetable | 0.05951 | SF_Rice | −0.05417 |
| 3alpha,17alpha- | | | Salad_wt | | crackers_wt | |
| diol monosulfate | | | | | | |
| X - 24832 | Cooked | −0.08267 | SF_Omelette_wt | 0.066657 | SF_Carrots_w | −0.06113 |
| | Cereal such as | | | | t | |
| | Oatmeal | | | | | |
| | Porridge Freq | | | | | |
| carotene diol | Red Pepper | 0.086142 | SF_Vegetable | 0.047378 | Yeast Cakes | −0.04061 |
| (1) | Freq | | Salad_wt | | and Cookies | |
| | | | | | as Rogallach, | |
| | | | | | Croissant or | |
| | | | | | Donut Freq | |
| 2-methylserine | Apple Freq | 0.225169 | SF_Apple_wt | 0.172245 | SF_Schnitzel_wt | −0.0719 |
| N-methylhydroxy- | SF_Orange_wt | 0.160394 | Mandarin or | 0.097522 | Orange or | 0.060004 |
| proline** | | | Clementine | | Grapefruit | |
| | | | Freq | | Freq | |
| catechol | SF_Coffee_wt | 0.215832 | Coffee Freq | 0.093628 | SF_Rice | 0.032019 |
| glucuronide | | | | | crackers_wt | |
| 3-hydroxyhippurate | SF_Coffee_wt | 0.19393 | Thousand | −0.07451 | Coffee Freq | 0.07307 |
| | | | Island | | | |
| | | | Dressing, | | | |
| | | | Garlic | | | |
| | | | Dressing Freq | | | |
| X - 18899 | SF_Tahini_wt | 0.125705 | Tahini Salad | 0.100376 | White or | −0.06859 |
| | | | Freq | | Brown Sugar | |
| | | | | | Freq | |
| pregnenetriol | Beer Freq | 0.121398 | SF_Coffee_wt | −0.08837 | Honey, Jam, | −0.03605 |
| disulfate* | | | | | fruit syrup, | |
| | | | | | Maple syrup | |
| | | | | | Freq | |
| N-stearoyl- | 3% Milk Freq | 0.074516 | SF_Tahini_wt | −0.06365 | Artificial | 0.060883 |
| sphingosine | | | | | Sweeteners | |
| (d18:1/18:0)* | | | | | Freq | |
| 10-undecenoate | SF_Tahini_wt | 0.109543 | Tahini Salad | 0.089383 | SF_Wine_wt | 0.064351 |
| (11:1n1) | | | Freq | | | |
| X - 15503 | SF_Carrots_w−t | −0.07267 | Apple Freq | 0.063306 | Schnitzel | 0.060649 |
| | | | | | Turkey or | |
| | | | | | Chicken Freq | |
| 1-palmitoyl-2- | SF_Tahini_wt | −0.10304 | SF_White | 0.057898 | Beer Freq | −0.04463 |
| palmitoleoyl-GPC | | | Cheese_wt | | | |
| (16:0/16:1)* | | | | | | |
| X - 15486 | Falafel in Pita | 0.073077 | SF_WhiteWheat_g_wt | 0.068423 | Coated or | 0.050947 |
| | Bread Freq | | | | Stuffed | |
| | | | | | Cookies, | |
| | | | | | Waffles or | |
| | | | | | Biscuits Freq | |
| gamma-tocopherol/ | Chicken or | −0.08596 | SF_Tahini_wt | 0.082135 | Cooked | 0.079452 |
| beta-tocopherol | Turkey | | | | Legumes Freq | |
| | Without Skin | | | | | |
| | Freq | | | | | |
| sphingomyelin | Cooked | −0.07581 | SF_Milk_wt | 0.073206 | Sour Cream | 0.049569 |
| (d18:1/21:0, | Legumes Freq | | | | Freq | |
| d17:1/22:0, | | | | | | |
| d16:1/23:0)* | | | | | | |
| 1-(1-enyl- | SF_Bread_wt | 0.069892 | SF_Wholemeal | −0.05993 | Beef or | 0.057894 |
| palmitoyl)-GPE | | | Bread_wt | | Chicken Soup | |
| (P-16:0)* | | | | | Freq | |
| isobutyryl- | SF_Natural | 0.063163 | 5-9% Yellow | 0.05372 | SF_Cereals_wt | 0.053375 |
| carnitine (C4) | Yogurt_wt | | Cheese Freq | | | |
| X - 18901 | SF_Banana_wt | 0.06399 | Diet Soda | −0.05372 | SF_Mayonnaise_wt | −0.04222 |
| | | | Freq | | | |
| gamma- | SF_Tomatoes_wt | −0.09994 | SF_Bread_wt | 0.052591 | SF_Sugar Free | −0.04414 |
| glutamylglutamate | | | | | Gum_wt | |
| X - 15492 | SF_WhiteWheat_g_wt | 0.076599 | Fried Fish | 0.074998 | Peanuts Freq | 0.069423 |
| | | | Freq | | | |
| X - 16580 | SF_Tahini_wt | −0.08956 | Lettuce Freq | 0.086593 | Olives Freq | 0.063551 |
| sphingomyelin | SF_Dark | −0.06768 | Wholemeal or | 0.050004 | Beer Freq | −0.04815 |
| (d18:2/24:2)* | Chocolate_wt | | Rye Bread | | | |
| | | | Freq | | | |
| stearoyl | SF_Milk_wt | 0.067077 | 3% Milk Freq | 0.047581 | >=16% Yellow | 0.039688 |
| sphingomyelin | | | | | Cheese Freq | |
| (d18:1/18:0) | | | | | | |
| N-methyltaurine | SF_Watermelon_wt | −0.17449 | Onion Freq | 0.147793 | Falafel in Pita | 0.122295 |
| | | | | | Bread Freq | |
| lysine | Chicken or | 0.098944 | Artificial | 0.056876 | Beef or | 0.052718 |
| | Turkey | | Sweeteners | | Chicken Soup | |
| | Without Skin | | Freq | | Freq | |
| | Freq | | | | | |
| X - 17340 | SF_Hummus | 0.116257 | Peanuts Freq | 0.097322 | Fried Fish | 0.07388 |
| | Salad_wt | | | | Freq | |
| X - 13703 | Coffee Freq | 0.188466 | SF_Coffee_wt | 0.152114 | SF_Rice | 0.046852 |
| | | | | | crackers_wt | |
| X - 24706 | SF_Soymilk_wt | 0.06487 | Cooked | 0.017659 | Zucchini or | 0.016865 |
| | | | Legumes Freq | | Eggplant Freq | |
| X - 22716 | 3% Milk Freq | −0.10833 | Cooked | 0.08906 | 0.5-3% White | −0.08144 |
| | | | Legumes Freq | | Cheese, | |
| | | | | | Cottage Freq | |
| X - 14082 | SF_Coffee_wt | 0.156468 | Coffee Freq | 0.152021 | Fresh | 0.042167 |
| | | | | | Vegetable | |
| | | | | | Salad With | |
| | | | | | Dressing or | |
| | | | | | Oil Freq | |
| 4-allylphenol | Apple Freq | 0.116885 | SF_Apple_wt | 0.076744 | SF_Milk_wt | −0.06441 |
| sulfate | | | | | | |
| 1-oleoyl-2- | Fish Cooked, | 0.084036 | SF_WhiteWheat_g_wt | −0.05803 | Jachnun, | −0.03538 |
| docosahexaenoyl- | Baked or | | | | Mlawah, | |
| GPC (18:1/22:6)* | Grilled Freq | | | | Kubana, | |
| | | | | | Cigars Freq | |
| X - 17354 | SF_Tahini_wt | 0.160742 | SF_Natural | 0.039212 | SF_Apple_wt | 0.034765 |
| | | | Yogurt_wt | | | |
| 6-oxopiperidine- | SF_Egg_wt | 0.06615 | Artificial | 0.062186 | Sugar | −0.05349 |
| 2-carboxylate | | | Sweeteners | | Sweetened | |
| | | | Freq | | Chocolate | |
| | | | | | Milk Freq | |
| X - 18240 | SF_Coffee_wt | 0.187494 | Coffee Freq | 0.0935 | SF_Wine_wt | 0.046175 |
| theanine | Green Tea | 0.096144 | SF_Green | 0.095442 | Regular Tea | 0.077232 |
| | Freq | | Tea_wt | | Freq | |
| X - 24760 | SF_Coffee_wt | 0.280824 | SF_WholeWheat_g_wt | 0.101318 | SF_Wholemeal | 0.057419 |
| | | | | | Crackers_wt | |
| beta-hydroxyiso- | Cooked | −0.06808 | Egg Recipes | 0.059491 | Olives Freq | 0.04804 |
| valerate | Cereal such as | | Freq | | | |
| | Oatmeal | | | | | |
| | Porridge Freq | | | | | |
| dodecenedioate | Nuts, | 0.117334 | 3% Milk Freq | −0.10753 | SF_Walnuts_wt | 0.102202 |
| (C12:1-DC)* | almonds, | | | | | |
| | pistachios | | | | | |
| | Freq | | | | | |
| X - 11478 | Fries Freq | 0.09509 | Carrots, Fresh | −0.06526 | Falafel in Pita | 0.060008 |
| | | | or Cooked, | | Bread Freq | |
| | | | Carrot Juice | | | |
| | | | Freq | | | |
| X - 24736 | SF_Tahini_wt | 0.112295 | SF_WhiteWheat_g_wt | −0.07968 | SF_Brown | 0.075141 |
| | | | | | Rice_wt | |
| lactose | 3% Milk Freq | 0.225955 | SF_Coffee_wt | 0.199653 | Cooked | −0.06794 |
| | | | | | Legumes Freq | |
| 2-hydroxyoctanoate | 3% Milk Freq | −0.09954 | SF_Tahini_wt | 0.071947 | Chicken or | −0.06708 |
| | | | | | Turkey | |
| | | | | | Without Skin | |
| | | | | | Freq | |
| trans-4- | Sausages Freq | 0.0654 | SF_Beef_wt | 0.054309 | Beef, Veal, | 0.052938 |
| hydroxyproline | | | | | Lamb, Pork, | |
| | | | | | Steak, Golash | |
| | | | | | Freq | |
| X - 17351 | Mandarin or | 0.058162 | SF_Brown | −0.04934 | Zucchini or | 0.046388 |
| | Clementine | | Sugar_wt | | Eggplant Freq | |
| | Freq | | | | | |
| 1-methylnicotin- | SF_Water_wt | 0.091722 | SF_Salmon_wt | 0.055713 | Beef or | 0.055467 |
| amide | | | | | Chicken Soup | |
| | | | | | Freq | |
| acetoacetate | Fish Cooked, | 0.073927 | Pasta or | −0.06951 | Ordinary | −0.05612 |
| | Baked or | | Flakes Freq | | Bread or | |
| | Grilled Freq | | | | Challah Freq | |
| X - 23782 | Regular Sodas | −0.10444 | Fish Cooked, | 0.10004 | Coated or | −0.04626 |
| | with Sugar | | Baked or | | Stuffed | |
| | Freq | | Grilled Freq | | Cookies, | |
| | | | | | Waffles or | |
| | | | | | Biscuits Freq | |
| X - 12818 | SF_Wholemeal | 0.184703 | SF_Cereals_wt | 0.104268 | Lemon Freq | −0.09019 |
| | Bread_wt | | | | | |
| 10- nonadecenoate | SF_Soymilk_wt | −0.03908 | Regular Sodas | −0.03743 | Butter Freq | 0.035973 |
| (19:1n9) | | | with Sugar | | | |
| | | | Freq | | | |
| X - 14314 | SF_Coffee_wt | 0.054253 | SF_Bread_wt | 0.041986 | SF_Butter_wt | 0.036913 |
| X - 24544 | Beer Freq | 0.085933 | SF_Coffee_wt | −0.0784 | Fries Freq | 0.04965 |
| gamma-glutamyl- | Cooked | −0.06413 | SF_WhiteWheat_g_wt | 0.054748 | White or | −0.04477 |
| leucine | Cereal such as | | | | Brown Sugar | |
| | Oatmeal | | | | Freq | |
| | Porridge Freq | | | | | |
| glutaryl- | Beer Freq | 0.13809 | SF_Beer_wt | 0.055295 | SF_Potatoes_wt | 0.051997 |
| carnitine (C5-DC) | | | | | | |
| hydantoin-5- | SF_Wholemeal | 0.080184 | Processed | −0.0621 | SF_Cottage | 0.053608 |
| propionic acid | Bread_wt | | Meat Free | | cheese_wt | |
| | | | Products Freq | | | |
| X - 12543 | SF_Coffee_wt | 0.289918 | Regular Tea | −0.08174 | Thousand | −0.05793 |
| | | | Freq | | Island | |
| | | | | | Dressing, | |
| | | | | | Garlic | |
| | | | | | Dressing Freq | |
| X - 17337 | SF_Cottage | 0.064122 | Fish (not | 0.060858 | SF_Tomatoes | −0.05977 |
| | cheese_wt | | Tuna) Pickled, | | _wt | |
| | | | Dried, Smoked, | | | |
| | | | Canned Freq | | | |
| dodecanedioate | SF_Tahini_wt | −0.15098 | Tahini Salad | −0.0647 | Coffee Freq | 0.062105 |
| | | | Freq | | | |
| androstenediol | Beer Freq | 0.109059 | SF_Coffee_wt | −0.06242 | SF_WhiteWheat_g_wt | 0.048352 |
| (3beta,17beta) | | | | | | |
| monosulfate (1) | | | | | | |
| adipoylcarnitine | SF_Tahini_wt | −0.09092 | SF_Carrots_wt | −0.04623 | SF_Olives_wt | 0.04375 |
| (C6-DC) | | | | | | |
| pristanate | Butter Freq | 0.171721 | Simple | −0.0926 | Beef, Veal, | 0.082812 |
| | | | Cookies or | | Lamb, Pork, | |
| | | | Biscuits Freq | | Steak, Golash | |
| | | | | | Freq | |
| sphingomyelin | Hummus | −0.06595 | SF_Potatoes_wt | −0.05092 | SF_Milk_wt | 0.05023 |
| (d18:2/23:0, | Salad Freq | | | | | |
| d18:1/23:1, | | | | | | |
| d17:1/24:1)* | | | | | | |
| X - 24542 | SF_Coffee_wt | 0.14031 | Regular Tea | −0.08879 | Herbal Tea | 0.06994 |
| | | | Freq | | Freq | |
| X - 22475 | SF_Coffee_wt | 0.18452 | SF_WholeWheat_g_wt | 0.096449 | 3% Milk Freq | 0.068639 |
| alpha-hydroxyiso- | SF_Coffee_wt | −0.05921 | SF_WhiteWheat_g_wt | 0.049964 | Beer Freq | 0.040813 |
| valerate | | | | | | |
| myristoylcarnitine | Butter Freq | 0.0533 | Cooked | −0.05196 | Beef, Veal, | 0.0485 |
| (C14) | | | Legumes Freq | | Lamb, Pork, | |
| | | | | | Steak, Golash | |
| | | | | | Freq | |
| X - 21411 | SF_Tahini_wt | 0.128825 | 3% Milk Freq | −0.07513 | Chicken or | −0.06842 |
| | | | | | Turkey | |
| | | | | | Without Skin | |
| | | | | | Freq | |
| 1-(1-enyl- | SF_Bread_wt | 0.059334 | Beef or | 0.052217 | SF_Wholemeal | −0.05039 |
| oleoyl)-GPE | | | Chicken Soup | | Bread_wt | |
| (P-18:1)* | | | Freq | | | |
| Fibrinopeptide | SF_Bread_wt | −0.04915 | Hummus | −0.0239 | Avocado Freq | 0.015385 |
| A (4-15)** | | | Salad Freq | | | |
| X - 11640 | SF_Tahini_wt | 0.247584 | SF_Water_wt | 0.059533 | SF_Red | −0.05334 |
| | | | | | pepper_wt | |
| 2-hydroxy-3- | Beer Freq | 0.049638 | SF_Milk_wt | −0.04903 | Herbal Tea | −0.04318 |
| methylvalerate | | | | | Freq | |
| dehydroiso- | Beer Freq | 0.14187 | SF_Coffee_wt | −0.08914 | Shish Kebab | 0.052195 |
| androsterone | | | | | in Pita Bread | |
| sulfate (DHEA-S) | | | | | Freq | |
| X - 12726 | SF_Coffee_wt | 0.092904 | SF_Vegetable | 0.072989 | SF_Olives_wt | 0.06468 |
| | | | Salad_wt | | | |
| X - 13728 | Milk or Dark | 0.153607 | SF_Dark | 0.087974 | Beef or | −0.04863 |
| | Chocolate | | Chocolate_wt | | Chicken Soup | |
| | Freq | | | | Freq | |
| cinnamoylglycine | SF_Coffee_wt | 0.126319 | Regular Sodas | −0.06715 | SF_Mayonnaise_wt | −0.06438 |
| | | | with Sugar | | | |
| | | | Freq | | | |
| X - 17685 | SF_Coffee_wt | 0.138281 | SF_WholeWheat_g_wt | 0.121406 | SF_Wine_wt | 0.065703 |
| X - 12101 | Brussels | 0.051094 | Cooked | 0.042104 | Falafel in Pita | 0.028582 |
| | Sprouts, | | Legumes Freq | | Bread Freq | |
| | Green or Red | | | | | |
| | Cabbage Freq | | | | | |
| glycocholenate | SF_Coffee_wt | −0.06995 | Coffee Freq | −0.0618 | SF_WhiteWheat_g_wt | 0.056011 |
| sulfate* | | | | | | |
| 4-hydroxyphenyl | SF_Cappuccino_wt | 0.049382 | SF_Fried | −0.04463 | SF_Bread_wt | −0.0354 |
| pyruvate | | | eggplant_wt | | | |
| 1-(1-enyl-palmitoyl)- | SF_WhiteWheat_g_wt | −0.10134 | SF_Hummus | −0.09715 | SF_Potatoes_wt | −0.04524 |
| 2-oleoyl-GPC | | | Salad_wt | | | |
| (P-16:0/18:1)* | | | | | | |
| picolinoylglycine | White or | −0.09267 | Processed | −0.05389 | SF_Tea_wt | −0.04419 |
| | Brown Sugar | | Meat Free | | | |
| | Freq | | Products Freq | | | |
| isocitrate | Red Pepper | 0.076783 | Pastrami or | −0.06361 | SF_Beef_wt | −0.05482 |
| | Freq | | Smoked Turkey | | | |
| | | | Breast Freq | | | |
| X - 24243 | SF_Cooked | −0.06315 | Pastrami or | 0.061746 | Turkey | 0.039993 |
| | beets_wt | | Smoked Turkey | | Meatballs, | |
| | | | Breast Freq | | Beef, Chicken | |
| | | | | | Freq | |
| androstenediol | Beer Freq | 0.134934 | SF_Coffee_wt | −0.08313 | Egg Recipes | 0.068449 |
| (3beta,17beta) | | | | | Freq | |
| disulfate (2) | | | | | | |
| X - 11261 | Falafel in Pita | 0.068496 | SF_Water_wt | −0.0405 | SF_Tomatoes_wt | −0.03592 |
| | Bread Freq | | | | | |
| X - 22162 | Orange or | 0.077606 | SF_Rice_wt | 0.052965 | SF_Hummus_wt | 0.052656 |
| | Grapefruit | | | | | |
| | Freq | | | | | |
| X - 11470 | Hummus | 0.100684 | SF_Rice | −0.08934 | Cucumber | −0.0614 |
| | Salad Freq | | crackers_wt | | Freq | |
| 2-methylbutyryl | SF_WhiteWheat_g_wt | 0.065268 | Cooked | −0.0465 | Dried Fruits | −0.03871 |
| carnitine (C5) | | | Cereal such as | | Freq | |
| | | | Oatmeal | | | |
| | | | Porridge Freq | | | |
| X - 12798 | 3% Milk Freq | 0.091414 | SF_Milk_wt | 0.074018 | SF_Tahini_wt | −0.04342 |
| dimethyl sulfoxide | SF_Tomatoes_wt | 0.05062 | SF_Potatoes_wt | −0.04519 | Red Pepper | 0.044749 |
| (DMSO) | | | | | Freq | |
| 2-aminooctanoate | SF_Tahini_wt | 0.105905 | 3% Milk Freq | −0.0914 | Beer Freq | 0.058881 |
| pentadecanoate | Butter Freq | 0.053376 | Olives Freq | 0.039644 | Cooked | −0.03932 |
| (15:0) | | | | | Legumes Freq | |
| 1,2-dilinoleoyl- | SF_Tahini_wt | 0.096569 | SF_Potatoes_wt | −0.06019 | Cooked | 0.055795 |
| GPC (18:2/18:2) | | | | | Legumes Freq | |
| X - 18921 | Fries Freq | 0.05387 | Coated or | 0.039743 | SF_WhiteWheat_g_wt | 0.03824 |
| | | | Stuffed | | | |
| | | | Cookies, | | | |
| | | | Waffles or | | | |
| | | | Biscuits Freq | | | |
| 1,2,3-benzenetriol | SF_Coffee_wt | 0.134102 | Coffee Freq | 0.052842 | SF_WholeWheat_g_wt | 0.043487 |
| sulfate (2) | | | | | | |
| nonadecanoate | Simple | −0.06058 | Butter Freq | 0.047339 | Coated or | −0.02794 |
| (19:0) | Cookies or | | | | Stuffed | |
| | Biscuits Freq | | | | Cookies, | |
| | | | | | Waffles or | |
| | | | | | Biscuits Freq | |
| gentisic acid- | 3% Milk Freq | −0.05801 | SF_Wholemeal | 0.047284 | Cauliflower or | 0.038263 |
| 5-glucoside | | | Bread_wt | | Broccoli Freq | |
| X - 18606 | SF_Tahini_wt | 0.142344 | SF_Hummus | 0.072401 | Beer Freq | 0.058927 |
| | | | Salad_wt | | | |
| hydroxy-N6,N6,N6- | SF_Sugar Free | −0.07963 | SF_Milk_wt | −0.07081 | SF_Vegetable | 0.064225 |
| trimethyllysine* | Gum_wt | | | | Salad_wt | |
| 3-(3-hydroxy- | SF_Coffee_wt | 0.227788 | Coffee Freq | 0.05958 | SF_WholeWheat_g_wt | 0.053186 |
| phenyl)propionate | | | | | | |
| sulfate | | | | | | |
| cytosine | SF_Wholemeal | 0.159775 | SF_Fried | −0.0547 | SF_WholeWheat_g_wt | 0.040952 |
| | Bread_wt | | onions_wt | | | |
| 2-hydroxynervonate* | Yeast Cakes | −0.0553 | SF_Noodles_wt | −0.04438 | SF_WhiteWheat_g_wt | −0.04422 |
| | and Cookies | | | | | |
| | as Rogallach, | | | | | |
| | Croissant or | | | | | |
| | Donut Freq | | | | | |
| 1-(1-enyl-stearoyl)- | Egg, Hard | 0.07593 | Beef or | 0.065637 | SF_Tahini_wt | 0.063931 |
| 2-linoleoyl-GPE | Boiled or Soft | | Chicken Soup | | | |
| (P-18:0/18:2)* | Freq | | Freq | | | |
| 1-palmitoyl-2- | Fish Cooked, | 0.057094 | SF_Wholemeal | 0.055869 | SF_Tahini_wt | −0.03623 |
| docosahexaenoyl-GPE | Baked or | | Light | | | |
| (16:0/22:6)* | Grilled Freq | | Bread_wt | | | |
| ADSGEGDFXAE | Orange or | −0.10373 | Salty Snacks | −0.08455 | Alcoholic | −0.07739 |
| GGGVR* | Grapefruit | | Freq | | Drinks Freq | |
| | Juice Freq | | | | | |
| 3-(3-hydroxyphenyl) | SF_Coffee_wt | 0.201776 | Coffee Freq | 0.052656 | SF_WholeWheat_g_wt | 0.038157 |
| propionate | | | | | | |
| N-stearoyltaurine | Beef, Veal, | 0.110496 | SF_Tomatoes_wt | −0.07775 | SF_Olives_wt | 0.042842 |
| | Lamb, Pork, | | | | | |
| | Steak, Golash | | | | | |
| | Freq | | | | | |
| 4-vinylphenol | Roll or | −0.1048 | SF_Coffee_wt | 0.10402 | Granola or | 0.065599 |
| sulfate | Bageles Freq | | | | Bernflaks | |
| | | | | | Freq | |
| N-acetyltaurine | SF_WhiteWheat_g_wt | 0.077176 | SF_Potatoes_wt | 0.065368 | Falafel in Pita | 0.036458 |
| | | | | | Bread Freq | |
| X - 24293 | Beer Freq | 0.091094 | SF_Wine_wt | 0.08129 | SF_WhiteWheat_g_wt | 0.07415 |
| tartronate | Red Pepper | 0.07617 | Turkey | −0.04034 | Vegetable | 0.037986 |
| (hydroxymalonate) | Freq | | Meatballs, | | Soup Freq | |
| | | | Beef, Chicken | | | |
| | | | Freq | | | |
| X - 22143 | Shish Kebab | 0.053932 | Sweet Dry | 0.044043 | Herbal Tea | −0.03614 |
| | in Pita Bread | | Wine, | | Freq | |
| | Freq | | Cocktails Freq | | | |
| pyrraline | SF_WholeWheat_g_wt | 0.061848 | Simple | 0.060612 | SF_Salmon_wt | −0.04986 |
| | | | Cookies or | | | |
| | | | Biscuits Freq | | | |
| 5-oxoproline | SF_Bread_wt | 0.036501 | Beer Freq | 0.02624 | SF_White | 0.025292 |
| | | | | | beans_wt | |
| margarate (17:0) | Simple | −0.03928 | Regular Sodas | −0.02758 | SF_Butter_wt | 0.025446 |
| | Cookies or | | with Sugar | | | |
| | Biscuits Freq | | Freq | | | |
| aconitate [cis | SF_Carrots_wt | −0.05062 | Potatoes | −0.04769 | Salty Snacks | −0.04748 |
| or trans] | | | Boiled, | | Freq | |
| | | | Baked, | | | |
| | | | Mashed, | | | |
| | | | Potatoes | | | |
| | | | Salad Freq | | | |
| 3,7-dimethylurate | Milk or Dark | 0.189726 | SF_Dark | 0.074185 | Beef or | −0.06911 |
| | Chocolate | | Chocolate_wt | | Chicken Soup | |
| | Freq | | | | Freq | |
| 1-stearoyl-2- | Fish Cooked, | 0.091596 | SF_Wholemeal | 0.054854 | SF_Tahini_wt | −0.04813 |
| docosahexaenoyl-GPE | Baked or | | Light | | | |
| (18:0/22:6)* | Grilled Freq | | Bread_wt | | | |
| X - 24801 | SF_WholeWheat_g_wt | 0.06358 | SF_Sugar Free | −0.05639 | Peanuts Freq | 0.049639 |
| | | | Gum_wt | | | |
| chiro-inositol | SF_Orange_wt | 0.107262 | Mandarin or | 0.051525 | Orange or | 0.048499 |
| | | | Clementine | | Grapefruit | |
| | | | Freq | | Freq | |
| trimethylamine | Roll or | −0.07952 | SF_Coffee_wt | 0.077516 | Processed | −0.05468 |
| N-oxide | Bageles Freq | | | | Meat Free | |
| | | | | | Products Freq | |
| 3-phenylpropionate | SF_Coffee_wt | 0.104958 | SF_Mayonnaise_wt | −0.1009 | SF_Apple_wt | 0.055215 |
| (hydrocinnamate) | | | | | | |
| X - 12283 | Egg Recipes | −0.05075 | SF_Hummus_wt | 0.050204 | Mandarin or | 0.050203 |
| | Freq | | | | Clementine | |
| | | | | | Freq | |
| X - 21410 | SF_Tahini_wt | −0.19852 | SF_Egg_wt | 0.191018 | SF_Beef_wt | 0.106045 |
| vanillyl- | Apple Freq | 0.077743 | Onion Freq | −0.06802 | SF_Banana_wt | 0.054575 |
| mandelate (VMA) | | | | | | |
| N-acetylglycine | SF_WhiteWheat_g_wt | −0.09448 | Herbal Tea | 0.059217 | Nuts, | 0.048257 |
| | | | Freq | | almonds, | |
| | | | | | pistachios | |
| | | | | | Freq | |
| X - 12812 | Mandarin or | 0.074454 | Orange or | 0.072369 | SF_Tomatoes_wt | 0.052836 |
| | Clementine | | Grapefruit | | | |
| | Freq | | Freq | | | |
| glycohyocholate | 3% Milk Freq | −0.09652 | SF_Beef_wt | −0.05554 | 0.5-3% White | −0.04343 |
| | | | | | Cheese, | |
| | | | | | Cottage Freq | |
| palmitoyl | Nuts, | 0.10047 | SF_WhiteWheat_g_wt | −0.06178 | SF_Potatoes_wt | −0.05827 |
| dihydrosphingo- | almonds, | | | | | |
| myelin | pistachios | | | | | |
| (d18:0/16:0)* | Freq | | | | | |
| gamma-CEHC | Pasta or | 0.107936 | Tahini Salad | −0.0595 | SF_Tahini_wt | −0.05082 |
| | Flakes Freq | | Freq | | | |
| X - 12472 | SF_Coffee_wt | 0.094319 | Falafel in Pita | 0.090484 | SF_Carrots_wt | −0.05648 |
| | | | Bread Freq | | | |
| 4-hydroxychloro- | SF_Cottage | 0.055377 | SF_Milk_wt | 0.048346 | Red Pepper | 0.045907 |
| thalonil | cheese_wt | | | | Freq | |
| 10-heptadecenoate | Regular Sodas | −0.04974 | Simple | −0.04505 | Artificial | 0.021249 |
| (17:1n7) | with Sugar | | Cookies or | | Sweeteners | |
| | Freq | | Biscuits Freq | | Freq | |
| X - 23644 | Red Pepper | 0.093291 | SF_Vegetable | 0.039215 | SF_Red | 0.033965 |
| | Freq | | Salad_wt | | pepper_wt | |
| X - 21821 | Mandarin or | 0.051696 | Apple Freq | 0.050414 | Zucchini or | 0.03914 |
| | Clementine | | | | Eggplant Freq | |
| | Freq | | | | | |
| X - 11444 | SF_Vegetable | 0.092755 | SF_Hummus | 0.058934 | SF_Carrots_wt | −0.05091 |
| | Salad_wt | | Salad_wt | | | |
| docosahexaenoyl- | Fish Cooked, | 0.109538 | SF_Salmon_wt | 0.076422 | SF_Bread_wt | 0.03848 |
| choline | Baked or | | | | | |
| | Grilled Freq | | | | | |
| gamma-glutamyl- | Beer Freq | 0.061011 | SF_Tomatoes_wt | −0.05921 | 0.5-3% White | −0.04567 |
| glutamine | | | | | Cheese, | |
| | | | | | Cottage Freq | |
| valine | White or | −0.05934 | Fish (not | 0.054359 | SF_Omelette_wt | 0.049183 |
| | Brown Sugar | | Tuna) Pickled, | | | |
| | Freq | | Dried, Smoked, | | | |
| | | | Canned Freq | | | |
| X - 13723 | SF_Coffee_wt | 0.193624 | Coffee Freq | 0.127054 | Vegetable | 0.03529 |
| | | | | | Soup Freq | |
| indolepropionate | Cooked | 0.046646 | Dried Fruits | 0.045609 | Wholemeal or | 0.043607 |
| | Legumes Freq | | Freq | | Rye Bread | |
| | | | | | Freq | |
| arabitol/xylitol | SF_Coffee_wt | 0.139771 | SF_Rice | 0.076099 | SF_Wholemeal | 0.066292 |
| | | | crackers_wt | | Bread_wt | |
| carnitine | Shish Kebab | 0.097013 | Chicken or | 0.061211 | SF_Vegetable | 0.046594 |
| | in Pita Bread | | Turkey With | | Salad_wt | |
| | Freq | | Skin Freq | | | |
| benzoylcarnitine* | SF_Coffee_wt | 0.157067 | SF_Apple_wt | 0.072915 | Coffee Freq | 0.071059 |
| X - 13729 | Onion Freq | −0.09022 | SF_Coffee_wt | 0.073443 | >=16% Yellow | 0.065813 |
| | | | | | Cheese Freq | |
| X - 12739 | Falafel in Pita | 0.071968 | Hummus | 0.069679 | SF_Hummus | 0.059622 |
| | Bread Freq | | Salad Freq | | Salad_wt | |
| 9-hydroxystearate | SF_Milk_wt | 0.095003 | Butter Freq | 0.068312 | Regular Sodas | −0.0617 |
| | | | | | with Sugar | |
| | | | | | Freq | |
| X - 21851 | SF_Apple_wt | −0.06377 | Sausages Freq | 0.049895 | Regular Sodas | 0.042147 |
| | | | | | with Sugar | |
| | | | | | Freq | |
| 13-methylmyristate | Sour Cream | 0.084894 | SF_Butter_wt | 0.083964 | SF_Milk_wt | 0.068971 |
| | Freq | | | | | |
| 7-ethylguanine | SF_Wine_wt | 0.066846 | Chicken or | −0.06106 | SF_WhiteWheat_g_wt | 0.05459 |
| | | | Turkey | | | |
| | | | Without Skin | | | |
| | | | Freq | | | |
| margaroylcarnitine* | Butter Freq | 0.105975 | >=16% Yellow | 0.097941 | Mixed Meat | 0.042884 |
| | | | Cheese Freq | | Dishes as | |
| | | | | | Moussaka, | |
| | | | | | Hamin, Cuba | |
| | | | | | Freq | |
| docosapentaenoate | Simple | −0.12007 | Apricot Fresh | 0.034649 | 0.5-3% White | 0.030771 |
| (n3 DPA; 22:5n3) | Cookies or | | or Dry, or | | Cheese, | |
| | Biscuits Freq | | Loquat Freq | | Cottage Freq | |
| X - 24546 | SF_Tahini_wt | −0.11829 | SF_Coffee_wt | −0.10119 | Tahini Salad | −0.07446 |
| | | | | | Freq | |
| X - 11787 | White or | −0.04505 | SF_Tomatoes_wt | −0.0379 | SF_Vegetable | 0.035632 |
| | Brown Sugar | | | | Salad_wt | |
| | Freq | | | | | |
| X - 24527 | SF_Hummus | 0.070502 | Falafel in Pita | 0.06244 | Hummus | 0.05344 |
| | Salad_wt | | Bread Freq | | Salad Freq | |
| 4-acetylphenol | SF_Coffee_wt | 0.156791 | 3% Milk Freq | −0.05685 | SF_Soymilk_wt | 0.049785 |
| sulfate | | | | | | |
| sphingomyelin | SF_Hummus | −0.06839 | Fresh | 0.053578 | SF_Milk_wt | 0.032785 |
| (d18:2/24:1, | Salad_wt | | Vegetable | | | |
| d18:1/24:2)* | | | Salad Without | | | |
| | | | Dressing or | | | |
| | | | Oil Freq | | | |
| cys-gly, oxidized | Pastrami or | 0.036794 | SF_Lettuce_wt | −0.03083 | Sausages Freq | 0.030657 |
| | Smoked Turkey | | | | | |
| | Breast Freq | | | | | |
| isoleucine | Cooked | −0.03656 | Herbal Tea | −0.03344 | SF_Tea_wt | −0.03212 |
| | Cereal such as | | Freq | | | |
| | Oatmeal | | | | | |
| | Porridge Freq | | | | | |
| cysteinylglycine | Pastrami or | 0.056683 | SF_Yellow | 0.054024 | SF_Sugar Free | −0.05318 |
| disulfide* | Smoked Turkey | | Cheese_wt | | Gum_wt | |
| | Breast Freq | | | | | |
| 1-myristoyl-2- | Cooked | −0.07118 | SF_White | 0.070052 | Onion Freq | 0.064567 |
| arachidonoyl-GPC | Legumes Freq | | Cheese_wt | | | |
| (14:0/20:4)* | | | | | | |
| 1-myristoyl- | Cooked | −0.11965 | Tahini Salad | −0.05657 | 3-5% Natural | 0.053361 |
| glycerol (14:0) | Legumes Freq | | Freq | | Yogurt Freq | |
| alpha-ketoglutarate | Artificial | 0.063637 | SF_Tomatoes_wt | −0.05738 | SF_Bread_wt | 0.047728 |
| | Sweeteners | | | | | |
| | Freq | | | | | |
| X - 24748 | SF_Tahini_wt | 0.17305 | 5-9% White | −0.06025 | Peanuts Freq | 0.060099 |
| | | | Cheese, | | | |
| | | | Cottage Freq | | | |
| eicosanodioate | SF_Hummus | 0.061637 | Alcoholic | 0.043798 | SF_Tahini_wt | 0.043589 |
| | Salad_wt | | Drinks Freq | | | |
| X - 24556 | SF_Tahini_wt | −0.15025 | Tahini Salad | −0.06057 | Cooked | −0.05647 |
| | | | Freq | | Legumes Freq | |
| X - 23680 | Falafel in Pita | 0.087917 | SF_WhiteWheat g_wt | 0.054224 | SF_Tomatoes_wt | −0.03333 |
| | Bread Freq | | | | | |
| acetylcarnitine | Chicken or | 0.064778 | Olives Freq | 0.054727 | Cauliflower or | 0.048316 |
| (C2) | Turkey With | | | | Broccoli Freq | |
| | Skin Freq | | | | | |
| hexanoylglutamine | SF_Olives_wt | 0.071153 | SF_Carrots_wt | −0.05522 | SF_Butter_wt | 0.040206 |
| sphingomyelin | SF_Hummus | −0.04922 | Beer Freq | −0.04036 | SF_Milk_wt | 0.037815 |
| (d18:1/18:1, | Salad_wt | | | | | |
| d18:2/18:0) | | | | | | |
| sphingomyelin | SF_Milk_wt | 0.061398 | Coffee Freq | 0.054795 | Apple Freq | −0.05461 |
| (d18:1/20:0, | | | | | | |
| d16:1/22:0)* | | | | | | |
| X - 23974 | Pasta or | −0.09086 | Hummus | −0.05679 | Lettuce Freq | 0.046852 |
| | Flakes Freq | | Salad Freq | | | |
| X - 12212 | Corn Freq | 0.071692 | SF_Milk_wt | −0.0674 | SF_White | 0.064989 |
| | | | | | Cheese_wt | |
| myristoleate | Regular Sodas | −0.0642 | SF_Soymilk_wt | −0.03688 | SF_Milk_wt | 0.036841 |
| (14:1n5) | with Sugar | | | | | |
| | Freq | | | | | |
| X - 13846 | Coffee Freq | 0.167835 | SF_Coffee_wt | 0.13385 | SF_Avocado_wt | −0.03013 |
| X - 21657 | SF_Milk_wt | −0.07147 | SF_Onion_wt | 0.068077 | Ice Cream or | −0.05106 |
| | | | | | Popsicle which | |
| | | | | | contains | |
| | | | | | Dairy Freq | |
| X - 24352 | Nuts, | 0.091291 | SF_Almonds_wt | 0.049197 | SF_Milk_wt | −0.03754 |
| | almonds, | | | | | |
| | pistachios | | | | | |
| | Freq | | | | | |
| beta- | SF_Bread_wt | 0.053222 | SF_Halva_wt | 0.044486 | SF_Hummus | −0.03712 |
| citrylglutamate | | | | | Salad_wt | |
| gluconate | Vegetable | 0.064582 | Mandarin or | 0.043157 | SF_Rice | 0.039038 |
| | Soup Freq | | Clementine | | crackers_wt | |
| | | | Freq | | | |
| lignoceroyl- | SF_Dark | 0.052863 | Light Bread | −0.05073 | SF_Couscous_wt | −0.0402 |
| carnitine (C24)* | Chocolate_wt | | Freq | | | |
| X - 24831 | Beef, Veal, | 0.037107 | SF_Carrots_wt | −0.03136 | Herbal Tea | −0.0304 |
| | Lamb, Pork, | | | | Freq | |
| | Steak, Golash | | | | | |
| | Freq | | | | | |
| Fibrinopeptide | SF_Bread_wt | −0.04056 | 3% Milk Freq | 0.027349 | Cauliflower or | 0.023617 |
| A (2-15)** | | | | | Broccoli Freq | |
| gamma-glutamyl- | Cooked | −0.05156 | SF_Sugar Free | −0.04448 | SF_Vegetable | 0.039899 |
| isoleucine* | Cereal such as | | Gum_wt | | Salad_wt | |
| | Oatmeal | | | | | |
| | Porridge Freq | | | | | |
| X - 12846 | Hummus | 0.080235 | Peanuts Freq | 0.077533 | SF_Vegetable | 0.055132 |
| | Salad Freq | | | | Salad_wt | |
| S-allylcysteine | SF_Hummus | 0.089282 | SF_Lettuce_wt | −0.05902 | SF_Cucumber_wt | −0.05122 |
| | Salad_wt | | | | | |
| tartarate | SF_Grapes_wt | 0.082038 | Turkey | −0.05606 | SF_Raisins_wt | 0.053596 |
| | | | Meatballs, | | | |
| | | | Beef, Chicken | | | |
| | | | Freq | | | |
| ceramide | Beef or | 0.091016 | SF_Tahini_wt | −0.07115 | 3% Milk Freq | 0.043787 |
| (d18:2/24:1, | Chicken Soup | | | | | |
| d18:1/24:2)* | Freq | | | | | |
| X - 12714 | SF_Coffee_wt | 0.154378 | SF_Salmon_wt | −0.06742 | Coffee Freq | 0.057035 |
| 1-stearoyl-2- | Beef, Veal, | −0.0542 | SF_WhiteWheat_g_wt | −0.02915 | 5-9% White | −0.02794 |
| linoleoyl-GPI | Lamb, Pork, | | | | Cheese, | |
| (18:0/18:2) | Steak, Golash | | | | Cottage Freq | |
| | Freq | | | | | |
| 1-linoleoyl- | Alcoholic | 0.134912 | SF_Potatoes_wt | −0.05422 | SF_Tahini_wt | 0.050325 |
| GPC (18:2) | Drinks Freq | | | | | |
| gamma-glutamyl- | SF_Vegetable | 0.047001 | SF_Wholemeal | 0.032299 | SF_Coffee_wt | 0.032297 |
| tyrosine | Salad_wt | | Bread_wt | | | |
| N-acetyl- | Coffee Freq | −0.05887 | 3% Milk Freq | −0.0416 | SF_Vegetable | 0.024152 |
| isoputreanine* | | | | | Salad_wt | |
| hexanoyl- | Chicken or | 0.047782 | Olives Freq | 0.045283 | Fresh | 0.038541 |
| carnitine (C6) | Turkey With | | | | Vegetable | |
| | Skin Freq | | | | Salad With | |
| | | | | | Dressing or | |
| | | | | | Oil Freq | |
| X - 16944 | Coated or | 0.05482 | SF_Tomatoes_wt | −0.03995 | Falafel in Pita | 0.038149 |
| | Stuffed | | | | Bread Freq | |
| | Cookies, | | | | | |
| | Waffles or | | | | | |
| | Biscuits Freq | | | | | |
| sucrose | SF_Cooked | −0.03833 | SF_Sugar | −0.03463 | SF_Water_wt | −0.0324 |
| | mushrooms_wt | | substitute_wt | | | |
| formimino- | Wholemeal or | −0.05219 | Dried Fruits | −0.05004 | Fish Cooked, | 0.043564 |
| glutamate | Rye Bread | | Freq | | Baked or | |
| | Freq | | | | Grilled Freq | |
| arachidoyl- | Light Bread | −0.1099 | SF_Tomatoes_wt | −0.07916 | SF_Couscous_wt | −0.07128 |
| carnitine (C20)* | Freq | | | | | |
| ximenoyl-carnitine | SF_Vegetable | 0.102459 | Lettuce Freq | 0.045823 | Avocado Freq | 0.044495 |
| (C26:1)* | Salad_wt | | | | | |
| hydroquinone | SF_Coffee_wt | 0.095988 | SF_Wholemeal | 0.0807 | SF_Cereals_wt | 0.048285 |
| sulfate | | | Bread_wt | | | |
| caprylate (8:0) | SF_Coffee_wt | 0.079323 | Carrots, Fresh | −0.06543 | SF_Yellow | 0.061268 |
| | | | or Cooked, | | Cheese_wt | |
| | | | Carrot Juice | | | |
| | | | Freq | | | |
| 3-methylcytidine | SF_WhiteWheat_g_wt | 0.090598 | SF_Coffee_wt | −0.07365 | Beer Freq | 0.069208 |
| riboflavin | SF_Natural | 0.090506 | 0.5-3% White | 0.070039 | SF_Coffee_wt | 0.04713 |
| (Vitamin B2) | Yogurt_wt | | Cheese, | | | |
| | | | Cottage Freq | | | |
| X - 14662 | SF_Apple_wt | −0.09769 | SF_Coffee_wt | −0.09098 | White or | 0.053462 |
| | | | | | Brown Sugar | |
| | | | | | Freq | |
| Fibrinopeptide | SF_Bread_wt | −0.04739 | Beer Freq | −0.02094 | Processed | −0.01091 |
| A(5-16)* | | | | | Meat Free | |
| | | | | | Products Freq | |
| X - 17335 | Pear Fresh, | −0.07045 | Nuts, | 0.06263 | Parsley, | 0.062528 |
| | Cooked or | | almonds, | | Celery, | |
| | Canned Freq | | pistachios | | Fennel, Dill, | |
| | | | Freq | | Cilantro, | |
| | | | | | Green Onion | |
| | | | | | Freq | |
| 3-hydroxy-3- | Apple Freq | 0.058912 | SF_Wholemeal | 0.057302 | Artificial | 0.039903 |
| methylglutarate | | | Bread_wt | | Sweeteners | |
| | | | | | Freq | |
| N-palmitoyl- | SF_Cucumber_wt | −0.11084 | >=16% Yellow | 0.10569 | Coffee Freq | 0.095998 |
| heptadeca- | | | Cheese Freq | | | |
| sphingosine | | | | | | |
| (d17:1/16:0)* | | | | | | |
| methyl-4- | SF_Potatoes_wt | −0.12041 | SF_Water_wt | 0.076849 | SF_WhiteWheat_g_wt | −0.03501 |
| hydroxybenzoate | | | | | | |
| sulfate | | | | | | |
| N-acetyl- | Pastrami or | 0.074605 | SF_Schnitzel_wt | 0.049129 | 3% Milk Freq | 0.03658 |
| cadaverine | Smoked Turkey | | | | | |
| | Breast Freq | | | | | |
| kynurenine | SF_Rice_wt | 0.051933 | 3-5% Natural | 0.041535 | SF_Coffee_wt | 0.036335 |
| | | | Yogurt Freq | | | |
| 5alpha-androstan- | Beer Freq | 0.089175 | Fries Freq | 0.066337 | SF_Beef_wt | 0.050897 |
| 3alpha,17beta-diol | | | | | | |
| monosulfate (1) | | | | | | |
| X - 21807 | SF_Wholemeal | 0.054191 | SF_Cucumber_wt | 0.049252 | SF_Granola_wt | 0.049025 |
| | Bread_wt | | | | | |
| X - 16946 | Red Pepper | −0.08129 | Beer Freq | 0.051737 | SF_Beer_wt | 0.047456 |
| | Freq | | | | | |
| X - 11485 | SF_Pickled | 0.109611 | Beer Freq | 0.060967 | Parsley, | 0.057116 |
| | cucumber_wt | | | | Celery, | |
| | | | | | Fennel, Dill, | |
| | | | | | Cilantro, | |
| | | | | | Green Onion | |
| | | | | | Freq | |
| methionine | Sugar | −0.04551 | SF_WhiteWheat_g_wt | −0.04156 | SF_Diet | −0.0375 |
| sulfone | Sweetened | | | | Coke_wt | |
| | Chocolate | | | | | |
| | Milk Freq | | | | | |
| 3-methoxycatechol | SF_Coffee_wt | 0.104167 | SF_WholeWheat_g_wt | 0.048877 | Coffee Freq | 0.0302 |
| sulfate (1) | | | | | | |
| N1-methyladenosine | SF_Cooked | −0.06155 | SF_Yellow | 0.045843 | Falafel in Pita | 0.045711 |
| | Sweet | | Cheese_wt | | Bread Freq | |
| | potato_wt | | | | | |
| andro steroid | SF_Tahini_wt | −0.1439 | 5-9% White | −0.06178 | SF_Coffee_wt | −0.05481 |
| monosulfate | | | Cheese, | | | |
| C19H28O6S (1)* | | | Cottage Freq | | | |
| X - 12712 | SF_Coffee_wt | 0.140458 | Banana Freq | −0.03517 | SF_Tahini_wt | 0.02072 |
| X - 21470 | SF_Coffee_wt | −0.11582 | Beer Freq | 0.096722 | Egg Recipes | 0.039388 |
| | | | | | Freq | |
| 1-oleoyl-2- | SF_Salmon_wt | 0.054117 | Couscous, | 0.046698 | SF_Onion_wt | −0.03554 |
| docosahexaenoyl- | | | Burgul, | | | |
| GPE (18:1/22:6)* | | | Mamaliga, | | | |
| | | | Groats Freq | | | |
| gamma-CEHC | SF_Tahini_wt | −0.12423 | Beer Freq | −0.06859 | SF_Schnitzel_wt | 0.033138 |
| glucuronide* | | | | | | |
| glycocholate | SF_Milk_wt | −0.04726 | Pastrami or | −0.04259 | 1% Milk Freq | −0.03616 |
| | | | Smoked Turkey | | | |
| | | | Breast Freq | | | |
| carboxyethyl-GABA | Pastrami or | −0.0866 | Sausages | −0.06704 | Cooked | 0.031391 |
| | Smoked Turkey | | such as | | Legumes Freq | |
| | Breast Freq | | Salami Freq | | | |
| N2,N2-dimethyl- | SF_Yellow | 0.098234 | Fried Fish | 0.066074 | SF_Sugar Free | −0.06334 |
| guanosine | Cheese_wt | | Freq | | Gum_wt | |
| X - 21310 | SF_Coffee_wt | 0.071409 | SF_Carrots_wt | −0.06521 | 5-9% White | 0.05211 |
| | | | | | Cheese, | |
| | | | | | Cottage Freq | |
| glycocheno- | SF_Coffee_wt | −0.0613 | Regular Tea | −0.04606 | 3% Milk Freq | −0.04532 |
| deoxycholate | | | Freq | | | |
| sulfate | | | | | | |
| N-acetyl-2- | SF_Tahini_wt | 0.137033 | Peanuts Freq | 0.059463 | SF_Milk_wt | −0.04204 |
| aminooctanoate* | | | | | | |
| X - 24410 | Coffee Freq | 0.087269 | SF_Water_wt | −0.05474 | Schnitzel | 0.039184 |
| | | | | | Turkey or | |
| | | | | | Chicken Freq | |
| 1-linoleoyl-2- | Beef, Veal, | −0.06829 | Nuts, | 0.032334 | SF_Omelette_wt | −0.02916 |
| linolenoyl-GPC | Lamb, Pork, | | almonds, | | | |
| (18:2/18:3)* | Steak, Golash | | pistachios | | | |
| | Freq | | Freq | | | |
| glycerophospho- | SF_Onion_wt | −0.07733 | Egg, Hard | 0.064763 | Hummus | −0.04904 |
| ethanolamine | | | Boiled or Soft | | Salad Freq | |
| | | | Freq | | | |
| X - 21792 | SF_Tahini_wt | −0.19733 | Tahini Salad | −0.10689 | Butter Freq | 0.061936 |
| | | | Freq | | | |
| 5-hydroxymethyl- | SF_Coffee_wt | 0.177999 | Coffee Freq | 0.077824 | SF_Tahini_wt | −0.04553 |
| 2-furoic acid | | | | | | |
| pipecolate | Brussels | 0.085255 | Butter Freq | −0.04196 | SF_Lentils_wt | 0.038667 |
| | Sprouts, | | | | | |
| | Green or Red | | | | | |
| | Cabbage Freq | | | | | |
| linoleoyl- | Nuts, | 0.058086 | SF_Hummus | 0.048527 | Butter Freq | −0.03714 |
| linoleoyl-glycerol | almonds, | | Salad_wt | | | |
| (18:2/18:2) [1]* | pistachios | | | | | |
| | Freq | | | | | |
| 3-hydroxy-2- | Simple | −0.05275 | Beef, Veal, | 0.045623 | SF_Yellow | 0.042843 |
| ethylpropionate | Cookies or | | Lamb, Pork, | | Cheese_wt | |
| | Biscuits Freq | | Steak, Golash | | | |
| | | | Freq | | | |
| 6-hydroxyindole | SF_Coffee_wt | 0.076349 | 5-9% White | 0.06381 | SF_Carrots_wt | −0.05916 |
| sulfate | | | Cheese, | | | |
| | | | Cottage Freq | | | |
| ectoine | Pastrami or | 0.084927 | Schnitzel | 0.044951 | SF_Chicken | 0.043943 |
| | Smoked Turkey | | Turkey or | | legs_wt | |
| | Breast Freq | | Chicken Freq | | | |
| 3-methyladipate | SF_WhiteWheat_g_wt | −0.09169 | White or | −0.07128 | SF_Apple_wt | 0.071033 |
| | | | Brown Sugar | | | |
| | | | Freq | | | |
| 3-hydroxyiso- | Dried Fruits | −0.05896 | SF_Cappuccino_wt | 0.050394 | SF_Natural | 0.049106 |
| butyrate | Freq | | | | Yogurt_wt | |
| 1-palmitoyl- | SF_Tahini_wt | −0.05885 | Pita Freq | −0.04177 | SF_Ice | 0.037925 |
| GPE (16:0) | | | | | cream_wt | |
| 1-palmitoyl-2- | SF_Tahini_wt | −0.10439 | SF_Hummus | −0.04759 | SF_Ice | 0.032992 |
| oleoyl-GPC | | | Salad_wt | | cream_wt | |
| (16:0/18:1) | | | | | | |
| laurate (12:0) | SF_Tahini_wt | −0.04977 | SF_Butter_wt | 0.035766 | Butter Freq | 0.033592 |
| X - 21441 | SF_Coffee_wt | −0.10118 | Green Tea | 0.05392 | Beer Freq | 0.040751 |
| | | | Freq | | | |
| X - 15674 | SF_Beef_wt | −0.08944 | Red Pepper | 0.069277 | SF_WhiteWheat_g_wt | −0.06332 |
| | | | Freq | | | |
| X - 21258 | SF_Wine_wt | 0.063455 | Alcoholic | 0.040641 | SF_Almonds_wt | 0.023999 |
| | | | Drinks Freq | | | |
| sulfate* | SF_Natural | 0.042297 | Pasta or | −0.04072 | SF_Coffee_wt | 0.028779 |
| | Yogurt_wt | | Flakes Freq | | | |
| docosahexaenoyl- | Fish Cooked, | 0.164689 | Fish (not | 0.056762 | SF_Beer_wt | 0.037362 |
| carnitine | Baked or | | Tuna) Pickled, | | | |
| (C22:6)* | Grilled Freq | | Dried, Smoked, | | | |
| | | | Canned Freq | | | |
| fumarate | SF_Bread_wt | 0.033833 | SF_Roll_wt | −0.02981 | Schnitzel | −0.02939 |
| | | | | | Turkey or | |
| | | | | | Chicken Freq | |
| propionylglycine | SF_Coffee_wt | 0.076691 | SF_Water_wt | 0.06895 | Egg, Hard | 0.040405 |
| | | | | | Boiled or Soft | |
| | | | | | Freq | |
| 1-ribosyl- | SF_Milk_wt | −0.05071 | Tahini Salad | 0.027727 | SF_Hummus_wt | 0.02567 |
| imidazoleacetate* | | | Freq | | | |
| 16a-hydroxy | SF_Tahini_wt | −0.07884 | SF_Coffee_wt | −0.07576 | Canned Tuna | 0.04132 |
| DHEA 3-sulfate | | | | | or Tuna Salad | |
| | | | | | Freq | |
| androstenediol | Beer Freq | 0.121029 | SF_WhiteWheat_g_wt | 0.079168 | SF_Coffee_wt | −0.04547 |
| (3beta,17beta) | | | | | | |
| disulfate (1) | | | | | | |
| pantothenate | Artificial | 0.072037 | SF_Tomatoes_wt | 0.032786 | Avocado Freq | 0.031684 |
| | Sweeteners | | | | | |
| | Freq | | | | | |
| X - 15461 | Chicken or | 0.044132 | Cooked | −0.03696 | SF_Coffee_wt | 0.031195 |
| | Turkey With | | Cereal such as | | | |
| | Skin Freq | | Oatmeal | | | |
| | | | Porridge Freq | | | |
| linoleoylcholine* | SF_Bread_wt | 0.050505 | Artificial | −0.04062 | SF_Tahini_wt | 0.038565 |
| | | | Sweeteners | | | |
| | | | Freq | | | |
| 1-linoleoyl- | Alcoholic | 0.061122 | Pastrami or | −0.05285 | SF_Walnuts_wt | 0.03184 |
| GPE (18:2)* | Drinks Freq | | Smoked Turkey | | | |
| | | | Breast Freq | | | |
| nisinate | SF_Tahini_wt | −0.09478 | Beer Freq | −0.06611 | 0.5-3% White | 0.062821 |
| (24:6n3) | | | | | Cheese, | |
| | | | | | Cottage Freq | |
| arachidate | Chicken or | −0.06088 | 3% Milk Freq | −0.05322 | Ordinary | −0.04074 |
| (20:0) | Turkey | | | | Bread or | |
| | Without Skin | | | | Challah Freq | |
| | Freq | | | | | |
| octadecenedioate | Regular Sodas | −0.05403 | Couscous, | 0.036199 | 3% Milk Freq | −0.0336 |
| (C18:1-DC)* | with Sugar | | Burgul, | | | |
| | Freq | | Mamaliga, | | | |
| | | | Groats Freq | | | |
| 1,2-dilinoleoyl-GPE | Cooked | 0.070297 | 3% Milk Freq | −0.05618 | SF_Coffee_wt | 0.049561 |
| (18:2/18:2)* | Legumes Freq | | | | | |
| acisoga | Coffee Freq | −0.0863 | Falafel in Pita | 0.059705 | SF_Tahini_wt | 0.030911 |
| | | | Bread Freq | | | |
| propionylcarnitine | Shish Kebab | 0.061404 | SF_Coffee_wt | 0.048186 | SF_Sugar Free | −0.04686 |
| (C3) | in Pita Bread | | | | Gum_wt | |
| | Freq | | | | | |
| 1-linoleoyl-GPG | SF_Water_wt | −0.04467 | SF_Natural | −0.03807 | SF_Soymilk_wt | 0.037041 |
| (18:2)* | | | Yogurt_wt | | | |
| X - 12263 | SF_Coffee_wt | 0.162606 | SF_Tomatoes_wt | −0.06167 | Coffee Freq | 0.053381 |
| X - 13553 | SF_Vegetable | 0.084191 | Cooked | −0.05454 | SF_Almonds_wt | 0.039301 |
| | Salad_wt | | Cereal such as | | | |
| | | | Oatmeal | | | |
| | | | Porridge Freq | | | |
| 5-hydroxyindole | Roll or | −0.04765 | SF_Almonds_wt | 0.046704 | Mandarin or | 0.04397 |
| acetate | Bageles Freq | | | | Clementine | |
| | | | | | Freq | |
| X - 21295 | SF_Coffee_wt | 0.140807 | SF_Wholemeal | 0.077468 | Banana Freq | −0.07549 |
| | | | Bread_wt | | | |
| Fibrinopeptide | SF_Bread_wt | −0.02982 | Beer Freq | −0.01324 | 3% Milk Freq | 0.00634 |
| A (3-16)** | | | | | | |
| N-palmitoyl- | SF_Coffee_wt | 0.051767 | SF_Tahini_wt | −0.04766 | SF_Pretzels_wt | −0.04221 |
| sphingosine | | | | | | |
| (d18:1/16:0) | | | | | | |
| X - 17677 | SF_Coffee_wt | 0.118219 | Coffee Freq | 0.065901 | SF_Wholemeal | 0.053262 |
| | | | | | Bread_wt | |
| 3-hydroxyhexanoate | SF_Carrots_wt | −0.0549 | Nuts, | 0.040265 | Olives Freq | 0.036866 |
| | | | almonds, | | | |
| | | | pistachios | | | |
| | | | Freq | | | |
| sphingomyelin | SF_Hummus | −0.06111 | Fresh | 0.049177 | Hummus | −0.04743 |
| (d18:1/24:1, | Salad_wt | | Vegetable | | Salad Freq | |
| d18:2/24:0)* | | | Salad Without | | | |
| | | | Dressing or | | | |
| | | | Oil Freq | | | |
| 1-carboxyethyl- | SF_Watermelon_wt | 0.043546 | SF_Burekas_wt | 0.042299 | 5-9% Yellow | 0.037741 |
| phenylalanine | | | | | Cheese Freq | |
| 3-hydroxy- | Wholemeal or | −0.03254 | Olives Freq | 0.031156 | Pear Fresh, | −0.02901 |
| butyrate (BHBA) | Rye Bread | | | | Cooked or | |
| | Freq | | | | Canned Freq | |
| X - 15469 | SF_Chocolate | −0.02756 | Olives Freq | 0.027483 | SF_Coffee_wt | −0.0258 |
| | cake_wt | | | | | |
| leucylglycine | SF_Chicken | −0.05293 | SF_Vegetable | −0.04372 | Processed | 0.040161 |
| | breast_wt | | Salad_wt | | Meat Free | |
| | | | | | Products Freq | |
| X - 23587 | Chicken or | 0.068007 | Fish (not | 0.066831 | Tomato Freq | −0.05204 |
| | Turkey With | | Tuna) Pickled, | | | |
| | Skin Freq | | Dried, Smoked, | | | |
| | | | Canned Freq | | | |
| gamma-glutamyl- | Banana Freq | −0.02702 | SF_Vegetable | 0.023917 | SF_Wholemeal | 0.021364 |
| phenylalanine | | | Salad_wt | | Bread_wt | |
| sphingomyelin | Sour Cream | 0.064972 | SF_Milk_wt | 0.056258 | Apple Freq | −0.05404 |
| (d18:1/22:1, | Freq | | | | | |
| d18:2/22:0, | | | | | | |
| d16:1/24:1)* | | | | | | |
| X - 24849 | Ordinary | 0.053709 | SF_Beer_wt | 0.042293 | Red Pepper | −0.03267 |
| | Bread or | | | | Freq | |
| | Challah Freq | | | | | |
| 1-stearoyl-2- | SF_Wholemeal | 0.064931 | SF_Tahini_wt | −0.02729 | SF_Onion_wt | −0.02352 |
| arachidonoyl-GPE | Light | | | | | |
| (18:0/20:4) | Bread_wt | | | | | |
| 17alpha-hydroxy- | SF_Coffee_wt | −0.07834 | SF_Lemon | 0.06481 | Beer Freq | 0.054433 |
| pregnenolone | | | juice_wt | | | |
| 3-sulfate | | | | | | |
| myo-inositol | Zucchini or | 0.056557 | Pasta or | −0.04226 | SF_Wine_wt | 0.034561 |
| | Eggplant Freq | | Flakes Freq | | | |
| 17alpha-hydroxy- | SF_Hummus | 0.106195 | SF_Beer_wt | 0.086303 | Artificial | −0.07952 |
| pregnanolone | Salad_wt | | | | Sweeteners | |
| glucuronide | | | | | Freq | |
| arachidonoyl- | SF_WhiteWheat_g_wt | 0.052902 | Hummus | 0.034309 | SF_Bread_wt | 0.033221 |
| carnitine | | | Salad Freq | | | |
| (C20:4) | | | | | | |
| stearidonate | Fish (not | 0.045552 | Mandarin or | 0.040018 | Canned Tuna | 0.034287 |
| (18:4n3) | Tuna) Pickled, | | Clementine | | or Tuna Salad | |
| | Dried, Smoked, | | Freq | | Freq | |
| | Canned Freq | | | | | |
| gamma-glutamyl- | Green Pepper | 0.039247 | SF_Cappuccino_wt | 0.030677 | Chicken or | 0.029409 |
| alpha-lysine | Freq | | | | Turkey | |
| | | | | | Without Skin | |
| | | | | | Freq | |
| 3-indoxyl sulfate | SF_Coffee_wt | 0.07973 | SF_Carrots_wt | −0.07335 | 5-9% White | 0.06247 |
| | | | | | Cheese, | |
| | | | | | Cottage Freq | |
| 1-stearoyl-2- | Nuts, | 0.05006 | SF_Tahini_wt | 0.043015 | SF_Potatoes_wt | −0.02857 |
| linoleoyl-GPC | almonds, | | | | | |
| (18:0/18:2)* | pistachios | | | | | |
| | Freq | | | | | |
| X - 17327 | SF_Yellow | 0.130344 | SF_Wholemeal | −0.06456 | Milk or Dark | −0.04598 |
| | Cheese_wt | | Bread_wt | | Chocolate | |
| | | | | | Freq | |
| 1-stearoyl-2- | SF_Dark | 0.050532 | Thousand | −0.0405 | SF_Tahini_wt | −0.02715 |
| oleoyl-GPC | Chocolate_wt | | Island | | | |
| (18:0/18:1) | | | Dressing, | | | |
| | | | Garlic | | | |
| | | | Dressing Freq | | | |
| 1-stearoyl-GPC | Nuts, | 0.048795 | SF_Tomatoes_wt | −0.03172 | Thousand | −0.01745 |
| (18:0) | almonds, | | | | Island | |
| | pistachios | | | | Dressing, | |
| | Freq | | | | Garlic | |
| | | | | | Dressing Freq | |
| X - 23593 | SF_Rice | 0.047886 | SF_Tomatoes_wt | 0.030574 | SF_Vegetable | 0.030164 |
| | crackers_wt | | | | Salad_wt | |
| 1-linoleoyl-GPI | Chicken or | −0.07118 | SF_Rice | 0.052388 | >=16% Yellow | −0.02918 |
| (18:2)* | Turkey | | crackers_wt | | Cheese Freq | |
| | Without Skin | | | | | |
| | Freq | | | | | |
| linolenate | Nuts, | 0.082233 | Chicken or | −0.03234 | Regular Sodas | −0.03105 |
| [alpha or gamma; | almonds, | | Turkey | | with Sugar | |
| (18:3n3 or 6)] | pistachios | | Without Skin | | Freq | |
| | Freq | | Freq | | | |
| glucuronate | Cooked | 0.053612 | Olives Freq | 0.048299 | SF_Tea_wt | −0.04478 |
| | Vegetable | | | | | |
| | Salads Freq | | | | | |
| cerotoylcarnitine | SF_Dark | 0.065789 | SF_Vegetable | 0.05387 | Beef, Veal, | 0.048883 |
| (C26)* | Chocolate_wt | | Salad_wt | | Lamb, Pork, | |
| | | | | | Steak, Golash | |
| | | | | | Freq | |
| alpha-tocopherol | Regular Sodas | −0.0752 | Zucchini or | 0.044517 | Pita Freq | −0.03676 |
| | with Sugar | | Eggplant Freq | | | |
| | Freq | | | | | |
| cystine | SF_White | 0.06269 | SF_Milk_wt | −0.05379 | Processed | −0.03521 |
| | Cheese_wt | | | | Meat Free | |
| | | | | | Products Freq | |
| vanillic alcohol | 3% Milk Freq | −0.06089 | Regular Tea | −0.05546 | Zucchini or | 0.05366 |
| sulfate | | | Freq | | Eggplant Freq | |
| palmitoleate | Regular Sodas | −0.05418 | Apricot Fresh | 0.022006 | Artificial | 0.018981 |
| (16:1n7) | with Sugar | | or Dry, or | | Sweeteners | |
| | Freq | | Loquat Freq | | Freq | |
| o-cresol sulfate | Coffee Freq | 0.095003 | Sugar | −0.0362 | Lemon Freq | 0.027052 |
| | | | Sweetened | | | |
| | | | Chocolate | | | |
| | | | Milk Freq | | | |
| 1-palmitoyl-2- | SF_Wholemeal | 0.046446 | SF_Dried | −0.04394 | SF_Tahini_wt | −0.04326 |
| arachidonoyl-GPC | Light | | dates_wt | | | |
| (16:0/20:4n6) | Bread_wt | | | | | |
| methylsuccinoyl- | SF_Hummus | −0.0525 | Cooked | −0.0439 | SF_Natural | 0.043251 |
| carnitine (1) | Salad_wt | | Tomatoes, | | Yogurt_wt | |
| | | | Tomato | | | |
| | | | Sauce, | | | |
| | | | Tomato Soup | | | |
| | | | Freq | | | |
| X - 24972 | SF_Egg_wt | −0.08948 | SF_Yellow | −0.05579 | SF_Butter_wt | −0.03895 |
| | | | Cheese_wt | | | |
| X - 23666 | SF_WhiteWheat_g_wt | 0.068366 | Sausages Freq | 0.041272 | Salty Snacks | 0.030829 |
| | | | | | Freq | |
| decanoylcarnitine | Olives Freq | 0.054851 | SF_Watermel on_wt | −0.03923 | 1% Milk Freq | −0.02785 |
| (C10) | | | | | | |
| X - 21353 | Nuts, | 0.059715 | Falafel in Pita | 0.05262 | SF_Tahini_wt | 0.041466 |
| | almonds, | | Bread Freq | | | |
| | pistachios | | | | | |
| | Freq | | | | | |
| etiocholanolone | Beer Freq | 0.060124 | SF_Onion_wt | 0.044929 | Sugar | 0.035631 |
| glucuronide | | | | | Sweetened | |
| | | | | | Chocolate | |
| | | | | | Milk Freq | |
| X - 17353 | SF_Sugar Free | 0.079919 | 5-9% White | 0.032881 | Cooked | 0.026736 |
| | Gum_wt | | Cheese, | | Cereal such as | |
| | | | Cottage Freq | | Oatmeal | |
| | | | | | Porridge Freq | |
| X - 24329 | Falafel in Pita | 0.052792 | 1% Milk Freq | −0.03275 | SF_Potatoes_wt | 0.026598 |
| | Bread Freq | | | | | |
| 2-arachidonoyl- | Regular Sodas | 0.090073 | SF_Rice_wt | 0.072147 | SF_WhiteWheat_g_wt | 0.052247 |
| glycerol (20:4) | with Sugar | | | | | |
| | Freq | | | | | |
| sarcosine | Egg, Hard | 0.061378 | SF_Omelette_wt | 0.043441 | SF_WhiteWheat_g_wt | 0.037801 |
| | Boiled or Soft | | | | | |
| | Freq | | | | | |
| alpha-ketobutyrate | Fish Cooked, | 0.089386 | SF_Tofu_wt | −0.05264 | Granola or | −0.04186 |
| | Baked or | | | | Bernflaks | |
| | Grilled Freq | | | | Freq | |
| citrate | SF_Lettuce_wt | −0.05888 | Light Bread | −0.05104 | SF_Carrots_wt | −0.0482 |
| | | | Freq | | | |
| pregnenolone | Beer Freq | 0.065808 | SF_Coffee_wt | −0.05694 | SF_Lemon | 0.036754 |
| sulfate | | | | | juice_wt | |
| eicosenoate | Yeast Cakes | −0.0319 | SF_Noodles_wt | −0.02962 | Simple | −0.0269 |
| (20:1) | and Cookies | | | | Cookies or | |
| | as Rogallach, | | | | Biscuits Freq | |
| | Croissant or | | | | | |
| | Donut Freq | | | | | |
| 5alpha-androstan- | Beer Freq | 0.089884 | Fries Freq | 0.070706 | SF_Pita_wt | 0.049846 |
| 3beta,17beta-diol | | | | | | |
| monosulfate (2) | | | | | | |
| hypotaurine | Cooked | 0.043805 | Processed | 0.039617 | SF_Cappuccino_wt | −0.03939 |
| | Legumes Freq | | Meat Free | | | |
| | | | Products Freq | | | |
| tauro-beta- | SF_Sugar Free | 0.073393 | Shish Kebab | −0.05382 | 3% Milk Freq | −0.04577 |
| muricholate | Gum_wt | | in Pita Bread | | | |
| | | | Freq | | | |
| eicosapentaenoyl- | SF_Tahini_wt | −0.12604 | Fish Cooked, | 0.106876 | SF_Salmon_wt | 0.088145 |
| choline | | | Baked or | | | |
| | | | Grilled Freq | | | |
| 1-oleoyl-GPE | 3% Milk Freq | −0.05434 | Pastrami or | −0.04671 | SF_Yellow | −0.02447 |
| (18:1) | | | Smoked Turkey | | Cheese_wt | |
| | | | Breast Freq | | | |
| 1-palmitoyl-2- | SF_Wholemeal | 0.067457 | SF_Tahini_wt | −0.04766 | Onion Freq | 0.037292 |
| arachidonoyl-GPE | Light | | | | | |
| (16:0/20:4)* | Bread_wt | | | | | |
| androsterone | Beer Freq | 0.089625 | Fries Freq | 0.027494 | SF_Coffee_wt | −0.02314 |
| sulfate | | | | | | |
| 2-acetamidophenol | SF_Wholemeal | 0.090403 | Granola or | 0.067783 | Cooked | 0.056602 |
| sulfate | Bread_wt | | Bernflaks | | Cereal such as | |
| | | | Freq | | Oatmeal | |
| | | | | | Porridge Freq | |
| X - 01911 | SF_Milk_wt | −0.0681 | Kiwi or | −0.05011 | Apricot Fresh | −0.04798 |
| | | | Strawberries | | or Dry, or | |
| | | | Freq | | Loquat Freq | |
| nicotinamide | SF_Bread_wt | 0.071635 | SF_Coffee_wt | −0.03908 | SF_Water_wt | 0.026042 |
| X - 11522 | Ordinary | 0.044847 | SF_Beer_wt | 0.031155 | SF_Rice_wt | 0.023121 |
| | Bread or | | | | | |
| | Challah Freq | | | | | |
| X - 12753 | SF_Onion_wt | 0.09065 | Milk or Dark | −0.05508 | SF_Bread_wt | −0.02556 |
| | | | Chocolate | | | |
| | | | Freq | | | |
| N-palmitoyl- | Coffee Freq | 0.096446 | Tomato Freq | −0.08704 | SF_Coffee_wt | 0.058111 |
| sphinganine | | | | | | |
| (d18:0/16:0) | | | | | | |
| X - 12844 | Fried Fish | 0.04782 | SF_Carrots_wt | −0.04441 | Milk or Dark | −0.03873 |
| | Freq | | | | Chocolate | |
| | | | | | Freq | |
| X - 12410 | SF_Banana_wt | 0.056995 | Orange or | −0.02864 | SF_Avocado_wt | 0.027351 |
| | | | Grapefruit | | | |
| | | | Juice Freq | | | |
| erucate | Fish (not | 0.107709 | Cauliflower or | 0.032695 | White or | −0.02819 |
| (22:1n9) | Tuna) Pickled, | | Broccoli Freq | | Brown Sugar | |
| | Dried, Smoked, | | | | Freq | |
| | Canned Freq | | | | | |
| X - 16964 | SF_Cranberries_wt | 0.101215 | SF_Vegetable | 0.075652 | SF_Yellow | −0.0591 |
| | | | Salad_wt | | Cheese_wt | |
| palmitoyl- | SF_Beef_wt | 0.046691 | Beef, Veal, | 0.044311 | SF_WhiteWheat_g_wt | 0.03838 |
| carnitine (C16) | | | Lamb, Pork, | | | |
| | | | Steak, Golash | | | |
| | | | Freq | | | |
| glyco-beta- | SF_Beef_wt | −0.06478 | Peas, Green | 0.063065 | 0.5-3% White | −0.04681 |
| muricholate** | | | Beans or Okra | | Cheese, | |
| | | | Cooked Freq | | Cottage Freq | |
| X - 21628 | Beer Freq | −0.06377 | SF_WhiteWheat_g_wt | −0.02921 | White or | −0.0239 |
| | | | | | Brown Sugar | |
| | | | | | Freq | |
| gamma- | SF_Tomatoes_wt | −0.05188 | SF_Tahini_wt | 0.034775 | Orange or | 0.030931 |
| glutamylglycine | | | | | Grapefruit | |
| | | | | | Freq | |
| kynurenate | SF_Vegetable | 0.051277 | 0-1.5% | 0.038151 | SF_Lentils_wt | −0.03395 |
| | Salad_wt | | Natural | | | |
| | | | Yogurt Freq | | | |
| proline | SF_WhiteWheat_g_wt | 0.071788 | 5-9% White | 0.039607 | SF_Lentils_wt | −0.03648 |
| | | | Cheese, | | | |
| | | | Cottage Freq | | | |
| X - 21285 | Beer Freq | 0.071763 | SF_Coffee_wt | −0.06569 | SF_Rice | −0.04881 |
| | | | | | crackers_wt | |
| 3-hydroxyoctanoate | Butter Freq | 0.099174 | Nuts, | 0.049921 | Carrots, Fresh | −0.04729 |
| | | | almonds, | | or Cooked, | |
| | | | pistachios | | Carrot Juice | |
| | | | Freq | | Freq | |
| N6,N6,N6- | SF_Vegetable | 0.067066 | Beer Freq | 0.031592 | SF_Omelette_wt | 0.030373 |
| trimethyllysine | Salad_wt | | | | | |
| phenylacetate | SF_WhiteWheat_g_wt | −0.07144 | SF_Mayonnaise_wt | −0.04729 | Onion Freq | −0.04418 |
| glutamine | Hummus | 0.033603 | Tahini Salad | 0.027003 | Beer Freq | 0.023909 |
| | Salad Freq | | Freq | | | |
| homocitrulline | SF_WhiteWheat_g_wt | −0.06447 | SF_Egg_wt | 0.055245 | SF_Natural | 0.048659 |
| | | | | | Yogurt_wt | |
| X - 21659 | SF_Milk_wt | −0.09211 | Onion Freq | 0.063348 | SF_Soda | 0.057046 |
| | | | | | water_wt | |
| N-acetyltyrosine | SF_Cappuccino_wt | 0.094836 | SF_Coffee_wt | 0.058616 | SF_Hummus_wt | −0.03856 |
| X - 21474 | SF_Milk_wt | −0.07991 | SF_Beer_wt | 0.0649 | SF_Pickled | 0.05981 |
| | | | | | cucumber_wt | |
| X - 12026 | Processed | −0.08968 | SF_Yellow | 0.076298 | SF_Carrots_wt | −0.03611 |
| | Meat Free | | Cheese_wt | | | |
| | Products Freq | | | | | |
| xylose | Nuts, | 0.098204 | 3% Milk Freq | −0.05523 | Beef, Veal, | −0.04884 |
| | almonds, | | | | Lamb, Pork, | |
| | pistachios | | | | Steak, Golash | |
| | Freq | | | | Freq | |
| dihomo-linolenoyl- | SF_WhiteWheat_g_wt | 0.041331 | SF_Bread_wt | 0.037511 | Lettuce Freq | −0.0354 |
| choline | | | | | | |
| X - 24106 | SF_Schnitzel_wt | −0.04488 | 5-9% Yellow | −0.03897 | SF_WholeWheat_g_wt | −0.03771 |
| | | | Cheese Freq | | | |
| X - 14095 | SF_Bread_wt | 0.077635 | SF_Hummus | −0.03217 | SF_Butter_wt | 0.025451 |
| | | | Salad_wt | | | |
| tyrosine | 5-9% Yellow | 0.027014 | 5-9% White | 0.022504 | SF_Wholemeal | 0.021459 |
| | Cheese Freq | | Cheese, | | Bread_wt | |
| | | | Cottage Freq | | | |
| dihomo-linoleoyl- | SF_Tahini_wt | 0.168036 | Turkey | −0.07754 | SF_Tomatoes_wt | −0.04487 |
| carnitine | | | Meatballs, | | | |
| (C20:2)* | | | Beef, Chicken | | | |
| | | | Freq | | | |
| asparagine | Cooked | 0.039672 | SF_Noodles_wt | 0.036839 | SF_Rice | 0.026258 |
| | Legumes Freq | | | | crackers_wt | |
| N-acetylmethionine | SF_Bread_wt | 0.011027 | SF_Roll_wt | −0.00322 | SF_Butter_wt | 0.002863 |
| X - 21364 | Beer Freq | 0.075149 | SF_Coffee_wt | −0.03726 | SF_Beer_wt | 0.033377 |
| X - 25116 | SF_Burekas_wt | 0.036163 | SF_Natural | −0.03369 | SF_Coffee_wt | −0.02773 |
| | | | Yogurt_wt | | | |
| 3beta- | Alcoholic | 0.077874 | SF_White | −0.03951 | SF_Salmon_wt | −0.03235 |
| hydroxy-5- | Drinks Freq | | Cheese_wt | | | |
| cholestenoate | | | | | | |
| dopamine 4- | SF_Banana_wt | 0.070655 | Sugar | −0.06142 | SF_Wholemeal | 0.050857 |
| sulfate | | | Sweetened | | Bread_wt | |
| | | | Chocolate | | | |
| | | | Milk Freq | | | |
| pyridoxate | Roll or | −0.07028 | Green Pepper | 0.056616 | Lettuce Freq | 0.051359 |
| | Bageles Freq | | Freq | | | |
| N-acetyl-1- | Beef, Veal, | 0.078307 | Beef or | 0.045135 | SF_Chicken | 0.04307 |
| methylhistidine* | Lamb, Pork, | | Chicken Soup | | legs_wt | |
| | Steak, Golash | | Freq | | | |
| | Freq | | | | | |
| guanidinoacetate | SF_Vegetable | 0.074438 | Tahini Salad | 0.040045 | Garlic Freq | −0.03967 |
| | Salad_wt | | Freq | | | |
| 21-hydroxy- | SF_Vegetable | −0.07337 | Fries Freq | 0.049259 | SF_Coffee_wt | −0.04457 |
| pregnenolone | Salad_wt | | | | | |
| disulfate | | | | | | |
| malate | SF_Bread_wt | 0.032741 | Light Bread | −0.02165 | SF_Butter_wt | 0.014048 |
| | | | Freq | | | |
| oleoylcarnitine | Olives Freq | 0.077644 | SF_Couscous_ wt | −0.03024 | SF_Ketchup_wt | −0.02392 |
| (C18:1) | | | | | | |
| X - 12206 | Red Pepper | 0.046815 | SF_Mandarin_wt | 0.043388 | Turkey | −0.03816 |
| | Freq | | | | Meatballs, | |
| | | | | | Beef, Chicken | |
| | | | | | Freq | |
| X - 12063 | SF_Sugar Free | −0.0584 | SF_WhiteWheat_g_wt | 0.054733 | Pastrami or | 0.033261 |
| | Gum_wt | | | | Smoked Turkey | |
| | | | | | Breast Freq | |
| oleoyl | White or | −0.03498 | Small Burekas | −0.03307 | Yeast Cakes | −0.0258 |
| ethanolamide | Brown Sugar | | Freq | | and Cookies | |
| | Freq | | | | as Rogallach, | |
| | | | | | Croissant or | |
| | | | | | Donut Freq | |
| glutamate | SF_Bread_wt | 0.036395 | Orange or | −0.01802 | SF_WhiteWheat_g_wt | 0.017001 |
| | | | Grapefruit | | | |
| | | | Freq | | | |
| phenylacetyl- | SF_Natural | 0.048783 | SF_WhiteWheat_g_wt | −0.04844 | SF_Coffee_wt | 0.03918 |
| glutamine | Yogurt_wt | | | | | |
| X - 12096 | SF_WholeWheat_g_wt | 0.066136 | SF_Baguette_wt | 0.059752 | SF_WhiteWheat_g_wt | 0.0588 |
| 1-linoleoyl- | SF_Cake_wt | −0.0673 | SF_Schnitzel_wt | −0.05655 | 3% Milk Freq | −0.04898 |
| GPA (18:2)* | | | | | | |
| X - 23654 | SF_WhiteWheat_g_wt | 0.077858 | 3-5% Natural | 0.044109 | SF_Omelette_wt | 0.034925 |
| | | | Yogurt Freq | | | |
| glycosyl-N- | SF_Milk_wt | 0.0557 | SF_Omelette_wt | −0.04808 | SF_Hummus | −0.04643 |
| stearoyl- | | | | | Salad_wt | |
| sphingosine | | | | | | |
| (d18:1/18:0) | | | | | | |
| X - 12906 | Pita Freq | −0.05466 | SF_Milk_wt | −0.04795 | Sugar | −0.04737 |
| | | | | | Sweetened | |
| | | | | | Chocolate | |
| | | | | | Milk Freq | |
| 3-sulfo-L-alanine | SF_Bread_wt | 0.061042 | Salty Snacks | 0.028345 | SF_Pretzels_wt | 0.022106 |
| | | | Freq | | | |
| X - 24498 | SF_Coffee_wt | 0.138837 | Coffee Freq | 0.055923 | SF_Rice | 0.047868 |
| | | | | | crackers_wt | |
| phosphate | SF_Pita_wt | −0.03662 | SF_WhiteWheat_g_wt | −0.03078 | Pasta or | −0.0207 |
| | | | | | Flakes Freq | |
| S-carboxymethyl- | SF_Orange_wt | −0.1069 | SF_Watermelon_wt | 0.051148 | SF_Mandarin_wt | −0.04797 |
| L-cysteine | | | | | | |
| N-oleoyltaurine | Olives Freq | 0.050767 | Lemon Freq | 0.046478 | Cauliflower or | 0.046371 |
| | | | | | Broccoli Freq | |
| cysteinylglycine | SF_Apple_wt | −0.0625 | Potatoes | 0.060617 | Shish Kebab | 0.025836 |
| | | | Boiled, | | in Pita Bread | |
| | | | Baked, | | Freq | |
| | | | Mashed, | | | |
| | | | Potatoes | | | |
| | | | Salad Freq | | | |
| X - 24699 | Falafel in Pita | 0.05733 | Beer Freq | 0.046028 | Coffee Freq | −0.04054 |
| | Bread Freq | | | | | |
| N6-succinyl- | Falafel in Pita | 0.098688 | Coffee Freq | −0.06662 | SF_Banana_wt | 0.037984 |
| adenosine | Bread Freq | | | | | |
| sphingomyelin | SF_Wholemeal | 0.023853 | SF_Banana_wt | −0.01897 | SF_Butter_wt | 0.018366 |
| (d18:0/18:0, | Light | | | | | |
| d19:0/17:0)* | Bread_wt | | | | | |
| azelate | Nuts, | 0.057165 | White or | −0.05126 | SF_Bread_wt | −0.0466 |
| (nonanedioate) | almonds, | | Brown Sugar | | | |
| | pistachios | | Freq | | | |
| | Freq | | | | | |
| X - 24813 | SF_Bread_wt | −0.04071 | SF_Cottage | 0.035005 | SF_Red | 0.033898 |
| | | | cheese_wt | | pepper_wt | |
| gamma-glutamyl-2- | Beef or | 0.048252 | Green Pepper | 0.046289 | Canned Tuna | 0.022489 |
| aminobutyrate | Chicken Soup | | Freq | | or Tuna Salad | |
| | Freq | | | | Freq | |
| 2-docosahexaenoyl- | Fish Cooked, | 0.224924 | Canned Tuna | 0.109362 | Tahini Salad | −0.06066 |
| glycerol | Baked or | | or Tuna Salad | | Freq | |
| (22:6)* | Grilled Freq | | Freq | | | |
| indoleacetate | SF_Peach_wt | 0.037143 | Carrots, Fresh | −0.03442 | Schnitzel | 0.029018 |
| | | | or Cooked, | | Turkey or | |
| | | | Carrot Juice | | Chicken Freq | |
| | | | Freq | | | |
| cis-4-decenoyl- | Artificial | −0.03686 | SF_Tahini_wt | 0.035194 | Falafel in Pita | 0.034064 |
| carnitine (C10:1) | Sweeteners | | | | Bread Freq | |
| | Freq | | | | | |
| glycerol | SF_Hummus | −0.046 | Regular Sodas | −0.04527 | Tomato Freq | −0.04509 |
| | Salad_wt | | with Sugar | | | |
| | | | Freq | | | |
| 2′-deoxyuridine | SF_Beef_wt | 0.046898 | SF_Tahini_wt | 0.044832 | SF_Bread_wt | 0.042087 |
| laurylcarnitine | Olives Freq | 0.048493 | SF_Coffee_wt | −0.03528 | SF_Yellow | 0.030481 |
| (C12) | | | | | Cheese_wt | |
| X - 12015 | Shish Kebab | 0.09333 | Green Pepper | 0.087069 | SF_Milk_wt | −0.07985 |
| | in Pita Bread | | Freq | | | |
| | Freq | | | | | |
| pro-hydroxy-pro | Orange or | 0.05136 | SF_WholeWheat_g_wt | −0.03896 | Diet Soda | −0.0292 |
| | Grapefruit | | | | Freq | |
| | Juice Freq | | | | | |
| adipate | SF_Vegetable | −0.06926 | SF_Coffee_wt | 0.064768 | SF_Potatoes_wt | −0.04173 |
| | Soup_wt | | | | | |
| malonate | SF_WhiteWheat_g_wt | −0.04652 | SF_Potatoes_wt | −0.03324 | SF_Lettuce_w t | −0.0315 |
| cystathionine | SF_Peas_wt | −0.06647 | SF_Sushi_wt | −0.03407 | SF_Cappuccino_wt | 0.026946 |
| 4-hydroxy- | SF_Tomatoes_wt | 0.043924 | SF_Wholemeal | 0.041546 | SF_WholeWheat_g_wt | 0.029764 |
| hippurate | | | Bread_wt | | | |
| eugenol sulfate | SF_Bread_wt | −0.03555 | SF_Lettuce_wt | 0.023125 | SF_Tahini_wt | 0.020809 |
| X - 24812 | Alcoholic | 0.044176 | Peach, | −0.04414 | Parsley, | 0.035591 |
| | Drinks Freq | | Nectarine, | | Celery, | |
| | | | Plum Freq | | Fennel, Dill, | |
| | | | | | Cilantro, | |
| | | | | | Green Onion | |
| | | | | | Freq | |
| 4-guanidino- | Cooked | 0.052793 | SF_Yellow | −0.04886 | SF_Wholemeal | 0.045254 |
| butanoate | Legumes Freq | | Cheese_wt | | Bread_wt | |
| X - 12718 | SF_Natural | 0.066011 | Processed | −0.04088 | SF_Coffee_wt | 0.039037 |
| | Yogurt_wt | | Meat Free | | | |
| | | | Products Freq | | | |
| X - 24519 | SF_Olives_wt | 0.060406 | Beer Freq | 0.048529 | SF_Olive | 0.039632 |
| | | | | | oil_wt | |
| 3-amino-2- | Apple Freq | 0.029171 | Peanuts Freq | 0.027707 | SF_Vegetable | 0.019886 |
| piperidone | | | | | Salad_wt | |
| N6-carbamoyl- | Falafel in Pita | 0.080872 | SF_Yellow | 0.041434 | SF_WhiteWheat_g_wt | 0.023162 |
| threonyladenosine | Bread Freq | | Cheese_wt | | | |
| 4-imidazoleacetate | SF_Wholemeal | 0.04959 | 3% Milk Freq | −0.04394 | Lemon Freq | 0.038844 |
| | Bread_wt | | | | | |
| corticosterone | SF_Rice_wt | 0.04424 | SF_Ketchup_wt | 0.035671 | SF_Hummus_wt | 0.032285 |
| DSGEGDFXAE | SF_Bread_wt | −0.03161 | Processed | −0.01426 | Beer Freq | −0.01299 |
| GGGVR* | | | Meat Free | | | |
| | | | Products Freq | | | |
| 5alpha-pregnan- | SF_Rice | −0.02416 | Pasta or | 0.022412 | Egg Recipes | 0.020874 |
| 3beta,20beta-diol | crackers_wt | | Flakes Freq | | Freq | |
| monosulfate (1) | | | | | | |
| N-acetylalliin | SF_Cucumber_wt | −0.05811 | Garlic Freq | 0.048409 | SF_Onion_wt | 0.047219 |
| salicylate | SF_Potatoes_wt | −0.03208 | Lemon Freq | 0.015662 | 5-9% Yellow | 0.014349 |
| | | | | | Cheese Freq | |
| X - 16570 | Falafel in Pita | 0.123415 | SF_Tomatoes_wt | −0.0664 | SF_Brown | −0.02451 |
| | Bread Freq | | | | Rice_wt | |
| 2-hydroxydecanoate | Nuts, | 0.073362 | 3% Milk Freq | −0.043 | Cooked | 0.037346 |
| | almonds, | | | | Legumes Freq | |
| | pistachios | | | | | |
| | Freq | | | | | |
| isovalerylglycine | SF_Coffee_wt | 0.05993 | Egg, Hard | 0.046294 | Artificial | 0.044144 |
| | | | Boiled or Soft | | Sweeteners | |
| | | | Freq | | Freq | |
| sphingomyelin | Coffee Freq | 0.058736 | SF_Wholemeal | 0.039402 | SF_Dark | 0.026623 |
| (d18:0/20:0, | | | Light | | Chocolate_wt | |
| d16:0/22:0)* | | | Bread_wt | | | |
| alliin | Garlic Freq | 0.07817 | SF_Onion_wt | 0.066297 | Diet Yogurt | −0.0454 |
| | | | | | Freq | |
| docosapentaenoate | SF_Vegetable | −0.04399 | SF_Cookies_wt | −0.03842 | SF_Egg_wt | 0.038342 |
| (n6 DPA; 22:5n6) | Salad_wt | | | | | |
| dodecadienoate | Nuts, | 0.055041 | SF_Tahini_wt | 0.05432 | Tahini Salad | 0.033912 |
| (12:2)* | almonds, | | | | Freq | |
| | pistachios | | | | | |
| | Freq | | | | | |
| 2-methoxyresorcinol | SF_Coffee_wt | 0.062075 | SF_WholeWheat_g_wt | 0.041962 | Coffee Freq | 0.03172 |
| sulfate | | | | | | |
| biliverdin | Alcoholic | 0.044794 | Brussels | −0.03934 | Beer Freq | 0.037637 |
| | Drinks Freq | | Sprouts, | | | |
| | | | Green or Red | | | |
| | | | Cabbage Freq | | | |
| oleate/vaccenate | Regular Sodas | −0.02705 | SF_Noodles_wt | −0.02665 | Olives Freq | 0.025082 |
| (18:1) | with Sugar | | | | | |
| | Freq | | | | | |
| 1,2-dipalmitoyl- | SF_Tahini_wt | −0.05504 | Peach, | 0.021556 | Artificial | 0.017402 |
| GPC | | | Nectarine, | | Sweeteners | |
| (16:0/16:0) | | | Plum Freq | | Freq | |
| X - 23787 | SF_Peas_wt | 0.041056 | SF_Coffee_wt | −0.03616 | SF_Dark | 0.033285 |
| | | | | | Chocolate_wt | |
| 5alpha-androstan- | Beer Freq | 0.071782 | SF_Ice | 0.026726 | SF_Brown | −0.02326 |
| 3beta,17alpha- | | | cream_wt | | Rice_wt | |
| diol disulfate | | | | | | |
| N-acetylleucine | Processed | −0.04816 | SF_Carrots_wt | −0.04546 | Banana Freq | −0.04531 |
| | Meat Free | | | | | |
| | Products Freq | | | | | |
| X - 16397 | SF_Tahini_wt | −0.11933 | SF_WhiteWheat_g_wt | −0.03252 | Granola or | −0.02613 |
| | | | | | Bernflaks | |
| | | | | | Freq | |
| hypoxanthine | >=16% Yellow | 0.030625 | SF_Bread_wt | 0.019789 | SF_Hummus | −0.01735 |
| | Cheese Freq | | | | Salad_wt | |
| guanidinosuccinate | SF_Cottage | 0.027991 | Beef or | 0.027637 | SF_Vegetable | 0.024513 |
| | cheese_wt | | Chicken Soup | | Salad_wt | |
| | | | Freq | | | |
| oleoylcholine | SF_Bread_wt | 0.036108 | Sugar | 0.030004 | Apricot Fresh | 0.02974 |
| | | | Sweetened | | or Dry, or | |
| | | | Chocolate | | Loquat Freq | |
| | | | Milk Freq | | | |
| X - 11530 | Ordinary | 0.038735 | SF_Beer_wt | 0.03738 | Red Pepper | −0.01961 |
| | Bread or | | | | Freq | |
| | Challah Freq | | | | | |
| sphingomyelin | Beer Freq | −0.05029 | SF_Hummus | −0.03659 | SF_WhiteWheat_g_wt | −0.03544 |
| (d18:2/16:0, | | | Salad_wt | | | |
| d18:1/16:1)* | | | | | | |
| 1-stearoyl-2- | Beef, Veal, | −0.05587 | SF_Rice | 0.038722 | SF_Coffee_wt | 0.027619 |
| linoleoyl-GPE | Lamb, Pork, | | crackers_wt | | | |
| (18:0/18:2)* | Steak, Golash | | | | | |
| | Freq | | | | | |
| phenyllactate | SF_White | 0.027312 | Beer Freq | 0.024407 | Kiwi or | −0.01453 |
| (PLA) | beans_wt | | | | Strawberries | |
| | | | | | Freq | |
| methylsuccinate | Coffee Freq | 0.089331 | SF_Coffee_wt | 0.082275 | SF_Tzfatit | 0.030701 |
| | | | | | Cheese_wt | |
| X - 18887 | Artificial | −0.04104 | Tahini Salad | 0.03989 | SF_Potatoes_wt | 0.024166 |
| | Sweeteners | | Freq | | | |
| | Freq | | | | | |
| X - 21286 | SF_Natural | 0.041114 | Parsley, | −0.03748 | SF_White | 0.035784 |
| | Yogurt_wt | | Celery, | | Cheese_wt | |
| | | | Fennel, Dill, | | | |
| | | | Cilantro, | | | |
| | | | Green Onion | | | |
| | | | Freq | | | |
| gamma-glutamyl- | SF_Tomatoes_wt | −0.05988 | SF_Vegetable | 0.053782 | Coffee Freq | −0.04005 |
| citrulline* | | | Salad_wt | | | |
| glycodeoxy- | SF_Tahini_wt | −0.04515 | Fresh | −0.03848 | Green Tea | −0.03742 |
| cholate sulfate | | | Vegetable | | Freq | |
| | | | Salad Without | | | |
| | | | Dressing or | | | |
| | | | Oil Freq | | | |
| 3-hydroxylaurate | SF_Yellow | 0.05357 | Olives Freq | 0.030034 | SF_WhiteWheat_g_wt | −0.01863 |
| | Cheese_wt | | | | | |
| sulfate of | SF_Pickled | 0.083888 | Parsley, | 0.059971 | SF_Milk_wt | −0.04173 |
| piperine | cucumber_wt | | Celery, | | | |
| metabolite | | | Fennel, Dill, | | | |
| C16H19NO3 | | | Cilantro, | | | |
| (2)* | | | Green Onion | | | |
| | | | Freq | | | |
| 1-carboxyethyl- | 5-9% Yellow | 0.041844 | Wholemeal or | −0.04121 | SF_Fried | −0.03209 |
| leucine | Cheese Freq | | Rye Bread | | eggplant_wt | |
| | | | Freq | | | |
| sebacate | Sausages | 0.037883 | SF_Yellow | 0.036507 | Carrots, Fresh | −0.03597 |
| (decanedioate) | such as | | Cheese_wt | | or Cooked, | |
| | Salami Freq | | | | Carrot Juice | |
| | | | | | Freq | |
| N-acetylneuraminate | SF_Hummus | −0.00926 | SF_Bread_wt | 0.009013 | Olives Freq | 0.003914 |
| | Salad_wt | | | | | |
| N-formylanthranilic | Processed | −0.09354 | SF_Natural | 0.066743 | Onion Freq | −0.04453 |
| acid | Meat Free | | Yogurt_wt | | | |
| | Products Freq | | | | | |
| picolinate | SF_Coffee_wt | 0.071362 | Coffee Freq | 0.059671 | SF_WholeWheat_g_wt | −0.04863 |
| 4-hydroxybenzoate | SF_Cranberries_wt | −0.03406 | SF_Tea_wt | 0.029731 | SF_Yellow | 0.027116 |
| | | | | | Cheese_wt | |
| 2- hydroxybehenate | SF_WhiteWheat_g_wt | −0.04678 | SF_Noodles_wt | −0.03738 | Tomato Freq | −0.03107 |
| 5-dodecenoate | Regular Sodas | −0.06199 | SF_Yellow | 0.035471 | SF_Milk_wt | 0.021621 |
| (12:1n7) | with Sugar | | Cheese_wt | | | |
| | Freq | | | | | |
| X - 12831 | SF_Wholemeal | 0.023572 | SF_Soymilk_wt | 0.022402 | SF_WhiteWheat_g_wt | 0.017332 |
| | Bread_wt | | | | | |
| glycerol 3-phosphate | SF_Pita_wt | −0.0328 | SF_Bread_wt | 0.016143 | SF_Cottage | −0.01372 |
| | | | | | cheese_wt | |
| N-palmitoyltaurine | SF_Olives_wt | 0.032981 | SF_Butter_wt | 0.028811 | Butter Freq | 0.027231 |
| octadecadiene | SF_Cottage | 0.053773 | SF_Rice_wt | 0.051693 | Red Pepper | 0.042027 |
| dioate (C18:2- | cheese_wt | | | | Freq | |
| DC)* | | | | | | |
| 1-stearoyl-GPE | SF_Coffee_wt | 0.027216 | Salty Cheese, | 0.026333 | SF_Diet | −0.02553 |
| (18:0) | | | Tzfatit, | | Coke_wt | |
| | | | Bulgarian, | | | |
| | | | Brinza, Thick | | | |
| | | | Slice Freq | | | |
| bilirubin (E, E)* | Alcoholic | 0.050502 | Beer Freq | 0.032377 | SF_Rice_wt | 0.026276 |
| | Drinks Freq | | | | | |
| N-acetylthreonine | SF_WhiteWheat_g_wt | 0.052422 | Orange or | 0.042283 | 3% Milk Freq | −0.02683 |
| | | | Grapefruit | | | |
| | | | Freq | | | |
| homoarginine | SF_Potatoes_wt | 0.070383 | SF_Water_wt | −0.04607 | SF_Vegetable | 0.033306 |
| | | | | | Salad_wt | |
| tetradecanedioate | Tahini Salad | −0.11566 | SF_Tahini_wt | −0.08221 | Fish Cooked, | 0.048859 |
| | Freq | | | | Baked or | |
| | | | | | Grilled Freq | |
| 12-HETE | SF_Bread_wt | 0.026539 | SF_Cottage | −0.02202 | SF_Cake_wt | −0.01692 |
| | | | cheese_wt | | | |
| X - 11843 | Parsley, | −0.02759 | Oil as an | −0.02729 | SF_Soda | −0.02582 |
| | Celery, | | addition for | | water_wt | |
| | Fennel, Dill, | | Salads or | | | |
| | Cilantro, | | Stews Freq | | | |
| | Green Onion | | | | | |
| | Freq | | | | | |
| X - 22771 | Carrots, Fresh | 0.063908 | SF_Vegetable | 0.042727 | SF_Cranberries_wt | 0.042558 |
| | or Cooked, | | Salad_wt | | | |
| | Carrot Juice | | | | | |
| | Freq | | | | | |
| 2,3-dihydroxy- | Cooked | −0.05082 | SF_Vegetable | 0.044911 | SF_Sugar Free | −0.02946 |
| 5-methylthio- | Cereal such as | | Salad_wt | | Gum_wt | |
| 4-pentenoate | Oatmeal | | | | | |
| (DMTPA)* | Porridge Freq | | | | | |
| myristoleoyl- | Olives Freq | 0.064021 | SF_Coffee_wt | −0.04737 | 1% Milk Freq | −0.02303 |
| carnitine | | | | | | |
| (C14:1)* | | | | | | |
| orotidine | Falafel in Pita | 0.044403 | Pastrami or | 0.033915 | SF_Tomatoes_wt | −0.0332 |
| | Bread Freq | | Smoked Turkey | | | |
| | | | Breast Freq | | | |
| X - 18345 | Wholemeal or | −0.08058 | SF_Water_wt | 0.037649 | Ordinary | −0.03263 |
| | Rye Bread | | | | Bread or | |
| | Freq | | | | Challah Freq | |
| N-palmitoyl- | SF_Hummus | −0.046 | SF_Potatoes_wt | −0.02982 | SF_WhiteWheat_g_wt | −0.0291 |
| sphingadienine | Salad_wt | | | | | |
| (d18:2/16:0)* | | | | | | |
| glutarate | SF_Chicken | 0.039986 | Beef, Veal, | 0.031258 | Coated or | 0.02802 |
| (pentanedioate) | breast_wt | | Lamb, Pork, | | Stuffed | |
| | | | Steak, Golash | | Cookies, | |
| | | | Freq | | Waffles or | |
| | | | | | Biscuits Freq | |
| ornithine | SF_Vegetable | 0.068277 | White or | −0.03168 | Apple Freq | 0.023569 |
| | Salad_wt | | Brown Sugar | | | |
| | | | Freq | | | |
| 1-palmitoyl-2- | SF_Rice | 0.051376 | Beef, Veal, | −0.04192 | Turkey | −0.02903 |
| linoleoyl-GPE | crackers_wt | | Lamb, Pork, | | Meatballs, | |
| (16:0/18:2) | | | Steak, Golash | | Beef, Chicken | |
| | | | Freq | | Freq | |
| X - 24512 | SF_Coffee_wt | 0.042437 | SF_White | 0.034453 | Mandarin or | 0.032431 |
| | | | beans_wt | | Clementine | |
| | | | | | Freq | |
| dopamine 3- | SF_Banana_wt | 0.026065 | SF_Wholemeal | 0.024085 | SF_Tomatoes_wt | 0.02404 |
| O-sulfate | | | Bread_wt | | | |
| isovalerate | SF_Carrots_wt | −0.0503 | SF_Schnitzel_wt | 0.020979 | White or | −0.01881 |
| | | | | | Brown Sugar | |
| | | | | | Freq | |
| 1-palmitoyl- | SF_Onion_wt | −0.02934 | Peanuts Freq | −0.02909 | SF_Carrots_wt | −0.02579 |
| GPG (16:0)* | | | | | | |
| 14-HDoHE/17- | SF_Bread_wt | 0.022108 | Fish Cooked, | 0.007253 | SF_Mandarin_wt | 0.00551 |
| HDoHE | | | Baked or | | | |
| | | | Grilled Freq | | | |
| 1-palmitoyl- | SF_Tahini_wt | −0.02778 | SF_Ice | 0.021235 | SF_Almonds_wt | −0.02079 |
| GPI (16:0) | | | cream_wt | | | |
| trans- | SF_Pizza_wt | 0.019236 | Fresh | 0.018702 | SF_Ice | 0.01836 |
| urocanate | | | Vegetable | | cream_wt | |
| | | | Salad Without | | | |
| | | | Dressing or | | | |
| | | | Oil Freq | | | |
| X - 21842 | SF_Tahini_wt | 0.028064 | Egg, Hard | 0.027219 | SF_Hummus_wt | 0.020722 |
| | | | Boiled or Soft | | | |
| | | | Freq | | | |
| xanthurenate | SF_Omelette_wt | 0.112054 | SF_Natural | 0.093045 | SF_Sugar_wt | −0.07047 |
| | | | Yogurt_wt | | | |
| N-acetylglutamate | SF_Couscous_wt | −0.02509 | SF_Coffee_wt | 0.020418 | SF_Tomatoes_wt | −0.01222 |
| phospho- | SF_Cottage | −0.03097 | Schnitzel | −0.01953 | SF_Water_wt | 0.019053 |
| ethanolamine | cheese_wt | | Turkey or | | | |
| | | | Chicken Freq | | | |
| 1-(1-enyl- | Hummus | −0.06382 | Beef or | 0.043133 | Orange or | 0.042737 |
| palmitoyl)-2- | Salad Freq | | Chicken Soup | | Grapefruit | |
| palmitoyl-GPC | | | Freq | | Freq | |
| (P-16:0/16:0)* | | | | | | |
| hexadecene- | SF_Tahini_wt | −0.05817 | Carrots, Fresh | −0.03807 | Tahini Salad | −0.03629 |
| dioate (C16:1- | | | or Cooked, | | Freq | |
| DC)* | | | Carrot Juice | | | |
| | | | Freq | | | |
| X - 12822 | SF_Coffee_wt | −0.03808 | SF_Apple_wt | −0.03269 | Wholemeal or | −0.02946 |
| | | | | | Rye Bread | |
| | | | | | Freq | |
| X - 21607 | Tahini Salad | 0.089491 | SF_Tahini_wt | 0.074356 | Nuts, | 0.054303 |
| | Freq | | | | almonds, | |
| | | | | | pistachios | |
| | | | | | Freq | |
| epiandrosterone | Beer Freq | 0.086832 | SF_Pita_wt | 0.025957 | Salty Cheese, | −0.0197 |
| sulfate | | | | | Tzfatit, | |
| | | | | | Bulgarian, | |
| | | | | | Brinza, Thin | |
| | | | | | Slice Freq | |
| 2-keto-3-deoxy- | SF_Almonds_wt | 0.062034 | Falafel in Pita | 0.052251 | SF_Cappuccino_wt | −0.02988 |
| gluconate | | | Bread Freq | | | |
| hydroxy- | SF_Sugar Free | −0.03736 | SF_Carrots_wt | −0.03496 | SF_Yellow | 0.022331 |
| asparagine** | Gum_wt | | | | Cheese_wt | |
| uridine | SF_Bread_wt | 0.03592 | Onion Freq | 0.009274 | SF_Rice_wt | 0.00823 |
| 5-(galactosyl- | SF_Sugar Free | −0.08282 | Pastrami or | 0.026033 | SF_Carrots_wt | −0.01667 |
| hydroxy)-L-lysine | Gum_wt | | Smoked Turkey | | | |
| | | | Breast Freq | | | |
| ceramide | Cooked | −0.07797 | SF_Jam_wt | 0.052299 | SF_Natural | 0.04184 |
| (d16:1/24:1, | Legumes Freq | | | | Yogurt_wt | |
| d18:1/22:1)* | | | | | | |
| glycosyl | SF_Milk_wt | 0.073216 | Butter Freq | 0.050512 | Fresh | 0.037208 |
| ceramide | | | | | Vegetable | |
| (d18:1/20:0, | | | | | Salad With | |
| d16:1/22:0)* | | | | | Dressing or | |
| | | | | | Oil Freq | |
| 1-stearoyl-2- | SF_WhiteWheat_g_wt | −0.07191 | SF_Bread_wt | −0.02015 | SF_Mayonnaise_wt | −0.01374 |
| oleoyl-GPI | | | | | | |
| (18:0/18:1)* | | | | | | |
| X - 12013 | SF_Schnitzel_wt | 0.037638 | Oil as an | −0.03406 | SF_Water_wt | 0.033615 |
| | | | addition for | | | |
| | | | Salads or | | | |
| | | | Stews Freq | | | |
| 3-hydroxydecanoate | Butter Freq | 0.063398 | SF_Yellow | 0.03525 | Nuts, | 0.034922 |
| | | | Cheese_wt | | almonds, | |
| | | | | | pistachios | |
| | | | | | Freq | |
| anthranilate | SF_Natural | 0.064806 | Parsley, | −0.04542 | 5-9% Yellow | 0.038353 |
| | Yogurt_wt | | Celery, | | Cheese Freq | |
| | | | Fennel, Dill, | | | |
| | | | Cilantro, | | | |
| | | | Green Onion | | | |
| | | | Freq | | | |
| 5-methyluridine | Chicken or | −0.03894 | Olives Freq | 0.024302 | SF_Hummus | 0.022257 |
| (ribothymidine) | Turkey | | | | Salad_wt | |
| | Without Skin | | | | | |
| | Freq | | | | | |
| 5-bromotryptophan | SF_Coffee_wt | −0.04578 | Fries Freq | 0.030686 | SF_Diet | −0.02692 |
| | | | | | Coke_wt | |
| 1-(1-enyl- | Alcoholic | 0.09033 | SF_Potatoes_wt | −0.035 | 5-9% Yellow | −0.03055 |
| palmitoyl)-2- | Drinks Freq | | | | Cheese Freq | |
| linoleoyl-GPC | | | | | | |
| (P-16:0/18:2)* | | | | | | |
| 3-hydroxybutyryl- | Falafel in Pita | 0.054557 | Peach, | −0.04312 | Herbal Tea | −0.0317 |
| carnitine (2) | Bread Freq | | Nectarine, | | Freq | |
| | | | Plum Freq | | | |
| pregnanolone/ | SF_Pizza_wt | 0.038135 | Peanuts Freq | −0.03626 | Tahini Salad | −0.03566 |
| allopregnanolone | | | | | Freq | |
| sulfate | | | | | | |
| X - 24728 | Falafel in Pita | 0.110368 | Chicken or | −0.06747 | SF_Olives_wt | 0.055402 |
| | Bread Freq | | Turkey | | | |
| | | | Without Skin | | | |
| | | | Freq | | | |
| 1-oleoyl-GPI | Sweet Potato | 0.032519 | SF_Cooked | −0.03121 | SF_Hummus | −0.03033 |
| (18:1)* | Freq | | mushrooms_wt | | Salad_wt | |
| glycine | SF_Cold | −0.02109 | SF_Potatoes_wt | −0.01852 | Cooked | 0.017126 |
| | cut_wt | | | | Legumes Freq | |
| dihomo- | Regular Sodas | −0.03101 | Simple | −0.02365 | 5-9% White | −0.01606 |
| linoleate | with Sugar | | Cookies or | | Cheese, | |
| (20:2n6) | Freq | | Biscuits Freq | | Cottage Freq | |
| 2-linoleoyl- | SF_WhiteWheat_g_wt | 0.028344 | Coffee Freq | −0.01592 | SF_Egg_wt | −0.01307 |
| glycerol (18:2) | | | | | | |
| citrulline | SF_Vegetable | 0.057484 | Apple Freq | 0.041661 | Garlic Freq | −0.02262 |
| | Salad_wt | | | | | |
| lactosyl-N- | SF_WholeWheat_g_wt | 0.06849 | Light Bread | −0.03841 | SF_Raisins_wt | 0.03672 |
| behenoyl- | | | Freq | | | |
| sphingosine | | | | | | |
| (d18:1/22:0)* | | | | | | |
| 1-palmitoleoyl- | Beef, Veal, | −0.05869 | SF_Olives_wt | −0.04186 | Egg Recipes | −0.03806 |
| 2-linolenoyl- | Lamb, Pork, | | | | Freq | |
| GPC | Steak, Golash | | | | | |
| (16:1/18:3)* | Freq | | | | | |
| bilirubin (Z, Z) | Ordinary | 0.060268 | SF_Rice_wt | 0.03322 | Beer Freq | 0.013835 |
| | Bread or | | | | | |
| | Challah Freq | | | | | |
| 4-acetamido- | SF_Cucumber_wt | 0.028783 | SF_Red | 0.025129 | Tahini Salad | 0.022158 |
| benzoate | | | pepper_wt | | Freq | |
| docosadienoate | Regular Sodas | −0.03938 | Simple | −0.02318 | Nuts, | 0.018016 |
| (22:2n6) | with Sugar | | Cookies or | | almonds, | |
| | Freq | | Biscuits Freq | | pistachios | |
| | | | | | Freq | |
| vanillactate | 3% Milk Freq | −0.08107 | SF_Coffee_wt | 0.049414 | SF_Olives_wt | 0.042424 |
| taurodeoxy- | SF_Tahini_wt | −0.07236 | SF_Hummus | −0.05778 | Falafel in Pita | −0.05085 |
| cholic acid 3- | | | Salad_wt | | Bread Freq | |
| sulfate | | | | | | |
| X - 12126 | SF_Natural | 0.108942 | SF_Coffee_wt | 0.087501 | Mandarin or | 0.050183 |
| | Yogurt_wt | | | | Clementine | |
| | | | | | Freq | |
| stearate (18:0) | Simple | −0.01505 | Wholemeal or | −0.01393 | Juice Freq | −0.00952 |
| | Cookies or | | Rye Bread | | | |
| | Biscuits Freq | | Freq | | | |
| indolelactate | Sausages Freq | 0.033497 | Beer Freq | 0.032095 | SF_Omelette_wt | 0.01488 |
| X - 13684 | SF_Coffee_wt | −0.07093 | SF_Apple_wt | −0.04044 | SF_WhiteWheat_g_wt | 0.037778 |
| sulfate of | Parsley, | 0.064539 | SF_Pickled | 0.055137 | Beer Freq | 0.035846 |
| piperine | Celery, | | cucumber_wt | | | |
| metabolite | Fennel, Dill, | | | | | |
| C16H19NO3 | Cilantro, | | | | | |
| (3)* | Green Onion | | | | | |
| | Freq | | | | | |
| X - 24309 | Butter Freq | 0.081048 | SF_Butter_wt | 0.037678 | Fresh | −0.03729 |
| | | | | | Vegetable | |
| | | | | | Salad Without | |
| | | | | | Dressing or | |
| | | | | | Oil Freq | |
| 1-(1-enyl- | SF_Hummus | −0.05849 | Orange or | 0.041467 | Hummus | −0.0208 |
| palmitoyl)-2- | Salad_wt | | Grapefruit | | Salad Freq | |
| palmitoleoyl-GPC | | | Freq | | | |
| (P-16:0/16:1)* | | | | | | |
| N-acetyl-S- | SF_Pizza_wt | 0.04455 | SF_Pita_wt | 0.024971 | SF_Tabbouleh | 0.01793 |
| allyl-L-cysteine | | | | | Salad_wt | |
| 2-oxoarginine* | SF_Apple_wt | 0.032075 | Baguette Freq | −0.02751 | Cooked | 0.025905 |
| | | | | | Legumes Freq | |
| dihomo- | Egg, Hard | −0.02306 | 0.5-3% White | 0.02025 | Light Bread | 0.017183 |
| linolenate | Boiled or Soft | | Cheese, | | Freq | |
| (20:3n3 or n6) | Freq | | Cottage Freq | | | |
| glycochenode | SF_Water_wt | −0.04156 | SF_Rice_wt | 0.033314 | 3% Milk Freq | −0.03251 |
| oxycholate | | | | | | |
| glucuronide | | | | | | |
| (1) | | | | | | |
| N,N-dimethyl-5- | >=16% Yellow | −0.0339 | Fries Freq | −0.0291 | SF_Omelette_wt | −0.01767 |
| aminovalerate | Cheese Freq | | | | | |
| taurocholate | SF_Cereals_wt | 0.034716 | SF_Peas_wt | −0.03336 | SF_Milk_wt | −0.03277 |
| 2-hydroxyadipate | SF_Cappuccino_wt | 0.089041 | White or | −0.03949 | Coffee Freq | 0.032804 |
| | | | Brown Sugar | | | |
| | | | Freq | | | |
| mannose | Simple | −0.0374 | Onion Freq | 0.022124 | SF_Couscous_wt | −0.01827 |
| | Cookies or | | | | | |
| | Biscuits Freq | | | | | |
| X - 19561 | 5-9% Yellow | 0.068141 | Green Tea | −0.04406 | SF_White | 0.039535 |
| | Cheese Freq | | Freq | | Cheese_wt | |
| N-acetylalanine | SF_Yellow | 0.039334 | SF_Cooked | −0.01135 | SF_Tomatoes_wt | −0.01106 |
| | Cheese_wt | | Sweet | | | |
| | | | potato_wt | | | |
| phenylpyruvate | Egg Recipes | 0.050362 | SF_Wholemeal | 0.009452 | 5-9% Yellow | 0.006684 |
| | Freq | | Bread_wt | | Cheese Freq | |
| stearoylcholine* | SF_Bread_wt | 0.04418 | Apricot Fresh | 0.035031 | SF_Salty | 0.0263 |
| | | | or Dry, or | | Cheese_wt | |
| | | | Loquat Freq | | | |
| palmitoleoyl- | Olives Freq | 0.090714 | SF_Coffee_wt | −0.03917 | Simple | −0.03007 |
| carnitine | | | | | Cookies or | |
| (C16:1)* | | | | | Biscuits Freq | |
| 2-palmitoleoyl- | SF_Tahini_wt | −0.0444 | SF_Water_wt | −0.04329 | SF_White | 0.043042 |
| GPC (16:1)* | | | | | Cheese_wt | |
| phenol sulfate | Artificial | 0.066369 | Cake, Torte | −0.062 | SF_Cookies_wt | −0.03456 |
| | Sweeteners | | Cakes, | | | |
| | Freq | | Chocolate | | | |
| | | | Cake Freq | | | |
| X - 23739 | 3% Milk Freq | −0.02238 | 5-9% White | −0.00982 | SF_Yellow | −0.009 |
| | | | Cheese, | | Cheese_wt | |
| | | | Cottage Freq | | | |
| 2-stearoyl-GPE | Pita Freq | −0.0259 | SF_Coffee_wt | 0.024649 | Salty Cheese, | 0.020803 |
| (18:0)* | | | | | Tzfatit, | |
| | | | | | Bulgarian, | |
| | | | | | Brinza, Thick | |
| | | | | | Slice Freq | |
| glycerate | Red Pepper | 0.034476 | Green Pepper | 0.031018 | SF_WhiteWheat_g_wt | −0.02396 |
| | Freq | | Freq | | | |
| X - 12100 | SF_Rice_wt | 0.026018 | SF_Tomatoes_wt | 0.010053 | 3-5% Natural | 0.00783 |
| | | | | | Yogurt Freq | |
| 5alpha-pregnan- | Mandarin or | −0.03349 | Egg Recipes | 0.027443 | SF_Water_wt | 0.024725 |
| 3beta,20alpha- | Clementine | | Freq | | | |
| diol disulfate | Freq | | | | | |
| phenylalanyl- | SF_Cake_wt | −0.06233 | SF_Hummus | −0.04755 | SF_Wholemeal | −0.03926 |
| glycine | | | Salad_wt | | Bread_wt | |
| heptanoate | SF_Tomatoes_wt | −0.04937 | SF_Tahini_wt | 0.043777 | Sugar | −0.0332 |
| (7:0) | | | | | Sweetened | |
| | | | | | Chocolate | |
| | | | | | Milk Freq | |
| 4-acetamido- | Apple Freq | 0.042723 | SF_Hummus | −0.03426 | SF_Sweet | −0.02447 |
| butanoate | | | Salad_wt | | potato_wt | |
| thyroxine | SF_Vegetable | −0.05101 | SF_Banana_wt | −0.04419 | SF_Hummus | −0.04165 |
| | Salad_wt | | | | Salad_wt | |
| 1-oleoyl-GPC | Light Bread | −0.02775 | Chicken or | −0.02671 | 5-9% Yellow | −0.01823 |
| (18:1) | Freq | | Turkey | | Cheese Freq | |
| | | | Without Skin | | | |
| | | | Freq | | | |
| linoleate | Nuts, | 0.054444 | Chicken or | −0.03123 | Regular Sodas | −0.02419 |
| (18:2n6) | almonds, | | Turkey | | with Sugar | |
| | pistachios | | Without Skin | | Freq | |
| | Freq | | Freq | | | |
| galactonate | SF_Coffee_wt | 0.085652 | 3% Milk Freq | 0.054521 | SF_Bread_wt | −0.0472 |
| octanoyl- | Olives Freq | 0.046119 | SF_Watermelon_wt | −0.0244 | 1% Milk Freq | −0.02394 |
| carnitine (C8) | | | | | | |
| piperine | Parsley, | 0.050012 | SF_Pickled | 0.037475 | Onion Freq | 0.023818 |
| | Celery, | | cucumber_wt | | | |
| | Fennel, Dill, | | | | | |
| | Cilantro, | | | | | |
| | Green Onion | | | | | |
| | Freq | | | | | |
| N-acetylproline | SF_Olive | 0.062883 | SF_Bread_wt | −0.0477 | 0-1.5% | −0.03521 |
| | oil_wt | | | | Lebbem, | |
| | | | | | Eshel Freq | |
| X - 12216 | SF_Coffee_wt | 0.052934 | SF_Natural | 0.044457 | 5-9% White | 0.039397 |
| | | | Yogurt_wt | | Cheese, | |
| | | | | | Cottage Freq | |
| 2-hydroxyglutarate | SF_Coffee_wt | 0.044363 | SF_Wine_wt | 0.039629 | SF_Cooked | −0.02253 |
| | | | | | beets_wt | |
| choline | SF_Bread_wt | 0.015375 | Orange or | −0.00538 | SF_Chocolate | 0.004498 |
| | | | Grapefruit | | _wt | |
| | | | Freq | | | |
| 2,2′-Methylene- | SF_Yellow | −0.10353 | SF_Tea_wt | −0.07441 | SF_Rice_wt | −0.06332 |
| bis(6-tert- | Cheese_wt | | | | | |
| butyl-p-cresol) | | | | | | |
| 5,6-dihydrouridine | Chicken or | −0.05223 | Falafel in Pita | 0.032329 | Egg, Hard | −0.03073 |
| | Turkey | | Bread Freq | | Boiled or Soft | |
| | Without Skin | | | | Freq | |
| | Freq | | | | | |
| cis-4-decenoate | SF_Tahini_wt | 0.040137 | Nuts, | 0.03645 | Tahini Salad | 0.019534 |
| (10:1n6)* | | | almonds, | | Freq | |
| | | | pistachios | | | |
| | | | Freq | | | |

| | Top | Directional | Top | Directional | Diet | |
|---|---|---|---|---|---|---|
| | predictor | SHAP value | predictor | SHAP value | Pearson | Diet |
| BIOCHEMICAL | #4 | #4 | #5 | #5 | R | p-value |
| 1-methylxanthine | 3% Milk Freq | 0.056886 | Alcoholic | 0.044545 | 0.739589 | 2.31E−83 |
| | | | Drinks Freq | | | |
| 3-carboxy-4- | Simple | −0.06085 | SF_Dark | 0.053774 | 0.736143 | 3.25E−82 |
| methyl-5- | Cookies or | | Chocolate_wt | | | |
| propyl-2- | Biscuits Freq | | | | | |
| furanpropanoate | | | | | | |
| (CMPF) | | | | | | |
| hydroxy-CMPF* | Tahini Salad | −0.05219 | SF_Tahini_wt | −0.04784 | 0.71885 | 1.03E−76 |
| | Freq | | | | | |
| quinate | Apricot Fresh | 0.039115 | SF_Rice | 0.032074 | 0.716823 | 4.29E−76 |
| | or Dry, or | | crackers_wt | | | |
| | Loquat Freq | | | | | |
| X - 21442 | SF_Wine_wt | 0.064685 | Beer Freq | 0.036059 | 0.715901 | 8.16E−76 |
| 1-methylurate | 3% Milk Freq | 0.035725 | SF_Tomatoes_wt | −0.03072 | 0.695027 | 8.90E−70 |
| 1,3-dimethylurate | SF_Onion_wt | −0.06041 | 3% Milk Freq | 0.058214 | 0.694824 | 1.01E−69 |
| 1,3,7-trimethylurate | SF_Wine_wt | 0.071726 | SF_Fried | −0.04764 | 0.684333 | 7.01E−67 |
| | | | onions_wt | | | |
| X - 24811 | SF_Rice | 0.08607 | SF_Carrots_wt | −0.04638 | 0.684028 | 8.45E−67 |
| | crackers_wt | | | | | |
| theophylline | SF_Wine_wt | 0.073244 | Regular Sodas | −0.05714 | 0.681862 | 3.15E−66 |
| | | | with Sugar | | | |
| | | | Freq | | | |
| 5-acetylamino- | SF_Cappuccino_wt | 0.053248 | >=16% Yellow | 0.036118 | 0.680865 | 5.73E−66 |
| 6-amino-3- | | | Cheese Freq | | | |
| methyluracil | | | | | | |
| 1,7-dimethylurate | Cooked | −0.04896 | SF_Wine_wt | 0.048168 | 0.675881 | 1.12E−64 |
| | Legumes Freq | | | | | |
| caffeine | SF_Cappuccino_wt | 0.035141 | Cooked | −0.03506 | 0.666618 | 2.39E−62 |
| | | | Legumes Freq | | | |
| paraxanthine | SF_Noodles_wt | −0.0856 | SF_Wine_wt | 0.075814 | 0.647124 | 1.05E−57 |
| X - 23655 | SF_Natural | 0.057576 | Mixed | 0.041744 | 0.628911 | 1.15E−53 |
| | Yogurt_wt | | Chicken or | | | |
| | | | Turkey Dishes | | | |
| | | | Freq | | | |
| X - 13835 | Chicken or | 0.103375 | Processed | −0.09108 | 0.625356 | 6.56E−53 |
| | Turkey | | Meat Free | | | |
| | Without Skin | | Products Freq | | | |
| | Freq | | | | | |
| saccharin | Diet Soda | 0.01876 | SF_Beer_wt | −0.01812 | 0.613653 | 1.75E−50 |
| | Freq | | | | | |
| 3-methyl catechol | Butter Freq | 0.050491 | SF_Fried | −0.03913 | 0.611563 | 4.62E−50 |
| sulfate (1) | | | onions_wt | | | |
| 3-hydroxypyridine | SF_Cappuccino_wt | 0.034677 | SF_Natural | 0.03045 | 0.610799 | 6.58E−50 |
| sulfate | | | Yogurt_wt | | | |
| X - 23652 | Chicken or | 0.073229 | Processed | −0.06307 | 0.602815 | 2.51E−48 |
| | Turkey | | Meat Free | | | |
| | Without Skin | | Products Freq | | | |
| | Freq | | | | | |
| trigonelline (N′- | SF_Rice | 0.053792 | Regular Sodas | −0.04124 | 0.59323 | 1.74E−46 |
| methylnicotinate) | crackers_wt | | with Sugar | | | |
| | | | Freq | | | |
| X - 11315 | SF_Rice | 0.061804 | White or | −0.05896 | 0.590039 | 6.89E−46 |
| | crackers_wt | | Brown Sugar | | | |
| | | | Freq | | | |
| 1-methyl-5- | Chicken or | 0.083141 | Processed | −0.0737 | 0.587075 | 2.45E−45 |
| imidazoleacetate | Turkey | | Meat Free | | | |
| | Without Skin | | Products Freq | | | |
| | Freq | | | | | |
| 1-(1-enyl-palmitoyl)- | Egg, Hard | 0.087188 | Cooked | −0.07198 | 0.582208 | 1.91E−44 |
| 2-arachidonoyl-GPE | Boiled or Soft | | Legumes Freq | | | |
| (P-16:0/20:4)* | Freq | | | | | |
| X - 11858 | Hummus | 0.064557 | SF_Vegetable | 0.042072 | 0.577807 | 1.18E−43 |
| | Salad Freq | | Salad_wt | | | |
| 1-(1-enyl-stearoyl)- | Beef or | 0.093112 | Egg Recipes | 0.063881 | 0.572323 | 1.11E−42 |
| 2-arachidonoyl-GPE | Chicken Soup | | Freq | | | |
| (P-18:0/20:4)* | Freq | | | | | |
| X - 21339 | SF_Pita_wt | 0.062503 | SF_Hummus | 0.046357 | 0.56864 | 4.88E−42 |
| | | | Salad_wt | | | |
| 3-methylhistidine | SF_Salmon_wt | 0.054075 | Turkey | 0.046941 | 0.566964 | 9.51E−42 |
| | | | Meatballs, | | | |
| | | | Beef, Chicken | | | |
| | | | Freq | | | |
| X - 23649 | Ice Cream or | −0.0848 | Fresh | 0.055651 | 0.564258 | 2.77E−41 |
| | Popsicle which | | Vegetable | | | |
| | contains | | Salad With | | | |
| | Dairy Freq | | Dressing or | | | |
| | | | Oil Freq | | | |
| 4-ethylcatechol | Ice Cream or | −0.03467 | SF_Wine_wt | 0.031844 | 0.564161 | 2.88E−41 |
| sulfate | Popsicle which | | | | | |
| | contains | | | | | |
| | Dairy Freq | | | | | |
| X - 11880 | Salty Snacks | 0.073951 | SF_Coffee_wt | −0.06127 | 0.560703 | 1.11E−40 |
| | Freq | | | | | |
| X - 11308 | Beer Freq | 0.076051 | SF_Water_wt | −0.06578 | 0.560464 | 1.22E−40 |
| 2,3-dihydroxypyridine | SF_Cappuccino_wt | 0.047721 | Beef or | 0.042644 | 0.559514 | 1.76E−40 |
| | | | Chicken Soup | | | |
| | | | Freq | | | |
| beta-cryptoxanthin | SF_Orange_wt | 0.098657 | SF_Almonds_wt | 0.058808 | 0.557779 | 3.45E−40 |
| X - 13844 | Carrots, Fresh | 0.106691 | SF_Cappuccino_wt | 0.075613 | 0.557547 | 3.77E−40 |
| | or Cooked, | | | | | |
| | Carrot Juice | | | | | |
| | Freq | | | | | |
| X - 11372 | Oil as an | −0.07006 | SF_WhiteWheat_g_wt | 0.058058 | 0.556573 | 5.47E−40 |
| | addition for | | | | | |
| | Salads or | | | | | |
| | Stews Freq | | | | | |
| 1-palmitoyl-2- | SF_Tahini_wt | −0.05173 | Tahini Salad | −0.0373 | 0.540962 | 1.86E−37 |
| docosahexaenoyl-GPC | | | Freq | | | |
| (16:0/22:6) | | | | | | |
| X - 24949 | Beer Freq | 0.055873 | SF_Tzfatit | −0.0452 | 0.536216 | 1.03E−36 |
| | | | Cheese_wt | | | |
| X - 18914 | SF_Cottage | 0.065682 | SF_Olive | −0.05659 | 0.534199 | 2.11E−36 |
| | cheese_wt | | oil_wt | | | |
| X - 21661 | SF_Hummus | 0.059876 | Beer Freq | 0.057561 | 0.529844 | 9.82E−36 |
| | Salad_wt | | | | | |
| sphingomyelin | 5-9% White | 0.071071 | SF_Milk_wt | 0.069379 | 0.528447 | 1.60E−35 |
| (d17:1/16:0, | Cheese, | | | | | |
| d18:1/15:0, | Cottage Freq | | | | | |
| d16:1/17:0)* | | | | | | |
| X - 21752 | Internal | −0.06466 | SF_Natural | 0.056562 | 0.525177 | 4.97E−35 |
| | Organs Freq | | Yogurt_wt | | | |
| X - 12816 | Fries Freq | −0.09704 | Fresh | 0.059619 | 0.521149 | 1.98E−34 |
| | | | Vegetable | | | |
| | | | Salad With | | | |
| | | | Dressing or | | | |
| | | | Oil Freq | | | |
| 5alpha-androstan- | SF_Vegetable | 0.08957 | SF_Potatoes_wt | 0.069328 | 0.519896 | 3.03E−34 |
| 3alpha,17beta-diol | Salad_wt | | | | | |
| monosulfate (2) | | | | | | |
| stachydrine | SF_Mandarin_wt | 0.054964 | Orange or | 0.046129 | 0.518796 | 4.39E−34 |
| | | | Grapefruit | | | |
| | | | Freq | | | |
| X - 23639 | SF_Wine_wt | 0.047004 | SF_Rice | 0.045695 | 0.517285 | 7.30E−34 |
| | | | crackers_wt | | | |
| sphingomyelin | Falafel in Pita | −0.06567 | Hummus | −0.06423 | 0.513521 | 2.57E−33 |
| (d18:1/17:0, | Bread Freq | | Salad Freq | | | |
| d17:1/18:0, | | | | | | |
| d19:1/16:0) | | | | | | |
| X - 11381 | Pastrami or | 0.050351 | Beef, Veal, | 0.047009 | 0.510043 | 8.08E−33 |
| | Smoked Turkey | | Lamb, Pork, | | | |
| | Breast Freq | | Steak, Golash | | | |
| | | | Freq | | | |
| X - 24637 | SF_Pullet_wt | 0.01826 | Popsicle | 0.01729 | 0.509643 | 9.21E−33 |
| | | | Without Dairy | | | |
| | | | Freq | | | |
| X - 17185 | SF_WhiteWheat_g_wt | −0.05965 | SF_Bread_wt | −0.0539 | 0.508287 | 1.44E−32 |
| 5-acetylamino-6- | SF_Wine_wt | 0.041202 | SF_Walnuts_wt | −0.03496 | 0.507583 | 1.80E−32 |
| formylamino- | | | | | | |
| 3-methyluracil | | | | | | |
| X - 17145 | Dried Fruits | 0.071214 | White or | −0.05247 | 0.503748 | 6.24E−32 |
| | Freq | | Brown Sugar | | | |
| | | | Freq | | | |
| X - 11847 | SF_Hummus | 0.068976 | SF_Vegetable | 0.054953 | 0.502148 | 1.04E−31 |
| | Salad_wt | | Salad_wt | | | |
| 1,5-anhydroglucitol | SF_Apple_wt | −0.07966 | SF_Potatoes_wt | 0.058481 | 0.500762 | 1.62E−31 |
| (1,5-AG) | | | | | | |
| X - 18249 | Pastrami or | 0.067435 | SF_Milk_wt | 0.063078 | 0.49921 | 2.65E−31 |
| | Smoked Turkey | | | | | |
| | Breast Freq | | | | | |
| citraconate/ | 0.5-3% White | 0.046264 | SF_Cappuccino_wt | 0.039676 | 0.497666 | 4.31E−31 |
| glutaconate | Cheese, | | | | | |
| | Cottage Freq | | | | | |
| X - 12329 | Ice Cream or | −0.05105 | SF_Chicken | 0.032979 | 0.497287 | 4.86E−31 |
| | Popsicle which | | soup_wt | | | |
| | contains | | | | | |
| | Dairy Freq | | | | | |
| sphingomyelin | 3% Milk Freq | 0.065105 | Salty Cheese, | 0.062947 | 0.492709 | 2.03E−30 |
| (d18:1/19:0, | | | Tzfatit, | | | |
| d19:1/18:0)* | | | Bulgarian, | | | |
| | | | Brinza, Thick | | | |
| | | | Slice Freq | | | |
| X - 14939 | SF_Cappuccino_wt | −0.05836 | Processed | 0.048595 | 0.487672 | 9.54E−30 |
| | | | Meat Free | | | |
| | | | Products Freq | | | |
| acesulfame | SF_Diet | 0.074192 | SF_Diet Fruit | 0.062933 | 0.483786 | 3.09E−29 |
| | Coke_wt | | Drink_wt | | | |
| 1-stearoyl-2- | Jachnun, | −0.04281 | SF_Dark | 0.034822 | 0.483211 | 3.68E−29 |
| docosahexaenoyl-GPC | Mlawah, | | Chocolate_wt | | | |
| (18:0/22:6) | Kubana, | | | | | |
| | Cigars Freq | | | | | |
| 5alpha-androstan- | SF_Milk_wt | −0.0609 | SF_Vegetable | 0.05559 | 0.482126 | 5.09E−29 |
| 3alpha,17beta- | | | Salad_wt | | | |
| diol disulfate | | | | | | |
| tryptophan | 5-9% White | −0.05 | Peanuts Freq | 0.036135 | 0.478678 | 1.42E−28 |
| betaine | Cheese, | | | | | |
| | Cottage Freq | | | | | |
| gamma- | Pastrami or | 0.061609 | Tahini Salad | −0.04992 | 0.478459 | 1.51E−28 |
| glutamylvaline | Smoked Turkey | | Freq | | | |
| | Breast Freq | | | | | |
| daidzein | SF_Rice_wt | −0.01795 | Zucchini or | 0.014287 | 0.475213 | 3.93E−28 |
| sulfate (2) | | | Eggplant Freq | | | |
| sphingomyelin | Butter Freq | 0.081809 | SF_Dried | −0.06003 | 0.473984 | 5.63E−28 |
| (d18:1/25:0, | | | dates_wt | | | |
| d19:0/24:1, | | | | | | |
| d20:1/23:0, | | | | | | |
| d19:1/24:0)* | | | | | | |
| sphingomyelin | 5-9% White | 0.061768 | 3% Milk Freq | 0.06142 | 0.472036 | 9.90E−28 |
| (d18:1/14:0, | Cheese, | | | | | |
| d16:1/16:0)* | Cottage Freq | | | | | |
| X - 24475 | SF_Grapes_wt | 0.058532 | SF_WhiteWheat_g_wt | −0.05048 | 0.47104 | 1.32E−27 |
| methyl | Mandarin or | 0.075145 | Apple Freq | 0.068622 | 0.469282 | 2.19E−27 |
| glucopyranoside | Clementine | | | | | |
| (alpha + beta) | Freq | | | | | |
| X - 11795 | Turkey | −0.09559 | SF_Apple_wt | 0.051731 | 0.468553 | 2.70E−27 |
| | Meatballs, | | | | | |
| | Beef, Chicken | | | | | |
| | Freq | | | | | |
| docosahexaenoate | Simple | −0.06249 | SF_Salmon_wt | 0.048854 | 0.463115 | 1.26E−26 |
| (DHA; 22:6n3) | Cookies or | | | | | |
| | Biscuits Freq | | | | | |
| X - 11849 | SF_Wine_wt | 0.04672 | Grapes or | 0.044163 | 0.460034 | 2.98E−26 |
| | | | Raisins Freq | | | |
| X - 18922 | Artificial | −0.06254 | Tahini Salad | 0.054076 | 0.45954 | 3.42E−26 |
| | Sweeteners | | Freq | | | |
| | Freq | | | | | |
| S-methylcysteine | SF_Potatoes_wt | −0.04241 | SF_Lentils_wt | 0.032798 | 0.459207 | 3.75E−26 |
| sulfoxide | | | | | | |
| perfluorooctane- | Chicken or | 0.048935 | Herbal Tea | −0.044 | 0.453276 | 1.91E−25 |
| sulfonic acid | Turkey With | | Freq | | | |
| (PFOS) | Skin Freq | | | | | |
| 3-hydroxystachydrine* | Orange or | 0.075756 | Orange or | 0.068873 | 0.452535 | 2.34E−25 |
| | Grapefruit | | Grapefruit | | | |
| | Freq | | Juice Freq | | | |
| sphingomyelin | SF_Tahini_wt | −0.06725 | Cooked | −0.06432 | 0.451541 | 3.06E−25 |
| (d18:2/23:1)* | | | Legumes Freq | | | |
| maleate | 0.5-3% White | 0.031706 | Milk or Dark | 0.027896 | 0.4509 | 3.64E−25 |
| | Cheese, | | Chocolate | | | |
| | Cottage Freq | | Freq | | | |
| eicosenedioate | SF_Dark | −0.06387 | SF_Butter_wt | −0.05514 | 0.442637 | 3.29E−24 |
| (C20:1-DC)* | Chocolate_wt | | | | | |
| homostachydrine* | Potatoes | −0.06012 | SF_Cucumber_wt | 0.0464 | 0.440766 | 5.37E−24 |
| | Boiled, | | | | | |
| | Baked, | | | | | |
| | Mashed, | | | | | |
| | Potatoes | | | | | |
| | Salad Freq | | | | | |
| creatine | SF_Onion_wt | −0.05296 | SF_Vegetable | −0.04866 | 0.440324 | 6.02E−24 |
| | | | Salad_wt | | | |
| X - 17653 | Cooked | 0.055492 | SF_Egg_wt | −0.0525 | 0.434164 | 2.95E−23 |
| | Legumes Freq | | | | | |
| catechol | Wholemeal or | 0.052213 | Red Pepper | 0.045469 | 0.431796 | 5.39E−23 |
| sulfate | Rye Bread | | Freq | | | |
| | Freq | | | | | |
| X - 16935 | Artificial | −0.08278 | SF_WholeWheat_g_wt | −0.06553 | 0.431754 | 5.44E−23 |
| | Sweeteners | | | | | |
| | Freq | | | | | |
| sphingomyelin | SF_Milk_wt | 0.062056 | SF_Tomatoes_wt | −0.05112 | 0.429145 | 1.05E−22 |
| (d18:2/21:0, | | | | | | |
| d16:2/23:0)* | | | | | | |
| sphingomyelin | Hummus | −0.05922 | 5-9% White | 0.057783 | 0.428361 | 1.28E−22 |
| (d17:2/16:0, | Salad Freq | | Cheese, | | | |
| d18:2/15:0)* | | | Cottage Freq | | | |
| S-methylcysteine | Fresh | 0.04016 | SF_Cooked | 0.038905 | 0.427534 | 1.57E−22 |
| | Vegetable | | cauliflower_wt | | | |
| | Salad With | | | | | |
| | Dressing or | | | | | |
| | Oil Freq | | | | | |
| N-(2-furoyl)glycine | SF_Fried | −0.03011 | Ice Cream or | −0.02755 | 0.425786 | 2.43E−22 |
| | onions_wt | | Popsicle which | | | |
| | | | contains | | | |
| | | | Dairy Freq | | | |
| 2,6-dihydroxybenzoic | Pastrami or | −0.05537 | Sweet Dry | 0.054464 | 0.425667 | 2.50E−22 |
| acid | Smoked Turkey | | Wine, | | | |
| | Breast Freq | | Cocktails Freq | | | |
| X - 12837 | SF_Olive | 0.057798 | Pear Fresh, | −0.04673 | 0.423939 | 3.84E−22 |
| | oil_wt | | Cooked or | | | |
| | | | Canned Freq | | | |
| pyroglutamine* | Turkey | −0.04632 | Regular Sodas | 0.045205 | 0.422804 | 5.08E−22 |
| | Meatballs, | | with Sugar | | | |
| | Beef, Chicken | | Freq | | | |
| | Freq | | | | | |
| N-delta- | SF_Avocado_wt | 0.059246 | SF_Vegetable | 0.044284 | 0.422436 | 5.56E−22 |
| acetylornithine | | | Salad_wt | | | |
| X - 21736 | Carrots, Fresh | −0.05267 | SF_Olives_wt | 0.052412 | 0.422216 | 5.87E−22 |
| | or Cooked, | | | | | |
| | Carrot Juice | | | | | |
| | Freq | | | | | |
| tridecenedioate | SF_Milk_wt | 0.079938 | Butter Freq | 0.064098 | 0.421426 | 7.12E−22 |
| (C13:1-DC)* | | | | | | |
| heneicosa- | Simple | −0.06039 | 0.5-3% White | 0.059638 | 0.420245 | 9.50E−22 |
| pentaenoate | Cookies or | | Cheese, | | | |
| (21:5n3) | Biscuits Freq | | Cottage Freq | | | |
| 2-aminobutyrate | Olives Freq | 0.046964 | Canned Tuna | 0.043994 | 0.420111 | 9.82E−22 |
| | | | or Tuna Salad | | | |
| | | | Freq | | | |
| X - 11378 | Oil as an | −0.07381 | Chicken or | −0.06575 | 0.419887 | 1.04E−21 |
| | addition for | | Turkey | | | |
| | Salads or | | Without Skin | | | |
| | Stews Freq | | Freq | | | |
| 2-hydroxylaurate | SF_Coffee_wt | −0.05685 | SF_WhiteWheat_g_wt | 0.041425 | 0.418576 | 1.43E−21 |
| 17-methylstearate | SF_Butter_wt | 0.042047 | Coated or | −0.03047 | 0.418485 | 1.46E−21 |
| | | | Stuffed | | | |
| | | | Cookies, | | | |
| | | | Waffles or | | | |
| | | | Biscuits Freq | | | |
| 15-methylpalmitate | SF_Tahini_wt | −0.05704 | Cooked | −0.05242 | 0.417042 | 2.07E−21 |
| | | | Legumes Freq | | | |
| sphingomyelin | Egg Recipes | −0.06736 | Sour Cream | 0.064164 | 0.415691 | 2.86E−21 |
| (d18:2/14:0, | Freq | | Freq | | | |
| d18:1/14:l)* | | | | | | |
| hippurate | SF_Potatoes_wt | −0.03792 | Regular Sodas | −0.03789 | 0.415062 | 3.32E−21 |
| | | | with Sugar | | | |
| | | | Freq | | | |
| X - 12730 | Ice Cream or | −0.03589 | SF_Salmon_wt | −0.03151 | 0.413674 | 4.63E−21 |
| | Popsicle which | | | | | |
| | contains | | | | | |
| | Dairy Freq | | | | | |
| 1-(1-enyl-palmitoyl)- | Beef or | 0.049868 | Chicken or | 0.047927 | 0.411153 | 8.43E−21 |
| 2-arachidonoyl-GPC | Chicken Soup | | Turkey | | | |
| (P-16:0/20:4)* | Freq | | Without Skin | | | |
| | | | Freq | | | |
| caffeic acid | Ice Cream or | −0.04549 | SF_Wholemeal | 0.041568 | 0.408155 | 1.71E−20 |
| sulfate | Popsicle which | | Bread_wt | | | |
| | contains | | | | | |
| | Dairy Freq | | | | | |
| 1-(1-enyl- | >=16% Yellow | 0.05373 | SF_Dark | 0.048545 | 0.406098 | 2.76E−20 |
| stearoyl)-GPE | Cheese Freq | | Chocolate_wt | | | |
| (P-18:0)* | | | | | | |
| 3-methyl catechol | SF_Natural | 0.063031 | SF_Bread_wt | −0.04462 | 0.405559 | 3.12E−20 |
| sulfate (2) | Yogurt_wt | | | | | |
| oxalate | SF_WhiteWheat_g_wt | −0.05553 | SF_Meatballs_wt | −0.05017 | 0.405418 | 3.23E−20 |
| (ethanedioate) | | | | | | |
| eicosapentaenoate | Simple | −0.07017 | 0.5-3% White | 0.043958 | 0.40463 | 3.87E−20 |
| (EPA; 20:5n3) | Cookies or | | Cheese, | | | |
| | Biscuits Freq | | Cottage Freq | | | |
| X - 12738 | SF_Natural | 0.070084 | SF_Bread_wt | −0.04886 | 0.404165 | 4.31E−20 |
| | Yogurt_wt | | | | | |
| X - 21383 | SF_Olive | −0.04927 | Butter Freq | −0.04848 | 0.403785 | 4.71E−20 |
| | oil_wt | | | | | |
| creatinine | Alcoholic | 0.052069 | SF_Beer_wt | 0.045235 | 0.403706 | 4.80E−20 |
| | Drinks Freq | | | | | |
| gentisate | SF_Butter_wt | −0.05224 | Peas, Green | 0.045827 | 0.403106 | 5.51E−20 |
| | | | Beans or Okra | | | |
| | | | Cooked Freq | | | |
| X - 24951 | Alcoholic | 0.06119 | SF_Brown | −0.04641 | 0.402968 | 5.68E−20 |
| | Drinks Freq | | Rice_wt | | | |
| X - 17654 | Alcoholic | 0.067916 | SF_WholeWheat_g_wt | 0.052957 | 0.402542 | 6.27E−20 |
| | Drinks Freq | | | | | |
| tiglylcarnitine | SF_Natural | 0.057641 | Chicken or | 0.055828 | 0.40231 | 6.61E−20 |
| (C5:1-DC) | Yogurt_wt | | Turkey With | | | |
| | | | Skin Freq | | | |
| 2-aminoheptanoate | 3% Milk Freq | −0.05284 | SF_Cottage | −0.04291 | 0.398862 | 1.45E−19 |
| | | | cheese_wt | | | |
| phytanate | SF_Butter_wt | 0.053456 | 5-9% White | 0.050306 | 0.397034 | 2.19E−19 |
| | | | Cheese, | | | |
| | | | Cottage Freq | | | |
| androsterone | Beef, Veal, | 0.045773 | SF_Beer_wt | 0.043302 | 0.396289 | 2.60E−19 |
| glucuronide | Lamb, Pork, | | | | | |
| | Steak, Golash | | | | | |
| | Freq | | | | | |
| 4-vinylguaiacol | SF_Salmon_wt | −0.08545 | SF_Wholemeal | 0.0801 | 0.395545 | 3.07E−19 |
| sulfate | | | Bread_wt | | | |
| 1-docosahexaenoyl- | Pita Freq | −0.05528 | SF_Salmon_wt | 0.044281 | 0.395373 | 3.19E−19 |
| glycerol (22:6) | | | | | | |
| 2-aminophenol | SF_Cereals_wt | 0.074577 | Wholemeal or | 0.049861 | 0.394949 | 3.51E−19 |
| sulfate | | | Rye Bread | | | |
| | | | Freq | | | |
| N2,N5-diacetylornithine | SF_Brown | 0.051766 | SF_Quinoa_wt | 0.051267 | 0.394696 | 3.71E−19 |
| | Rice_wt | | | | | |
| X - 17676 | Regular Tea | −0.06549 | SF_WhiteWheat_g_wt | −0.04848 | 0.393674 | 4.66E−19 |
| | Freq | | | | | |
| carotene diol (2) | SF_Potatoes_wt | −0.04741 | Fresh | 0.044641 | 0.392248 | 6.40E−19 |
| | | | Vegetable | | | |
| | | | Salad With | | | |
| | | | Dressing or | | | |
| | | | Oil Freq | | | |
| 4-ethylphenylsulfate | SF_Wine_wt | 0.03036 | Roll or | −0.02981 | 0.391656 | 7.30E−19 |
| | | | Bageles Freq | | | |
| 2-aminoadipate | Artificial | 0.04248 | SF_Tea_wt | −0.04163 | 0.390848 | 8.72E−19 |
| | Sweeteners | | | | | |
| | Freq | | | | | |
| O-methylcatechol | Avocado Freq | 0.03663 | SF_WholeWheat_g_wt | 0.035324 | 0.390244 | 9.96E−19 |
| sulfate | | | | | | |
| X - 24655 | SF_Sushi_wt | 0.014172 | Cooked | 0.012424 | 0.388101 | 1.59E−18 |
| | | | Legumes Freq | | | |
| ceramide | 5-9% White | 0.071636 | >=16% Yellow | 0.069378 | 0.387214 | 1.94E−18 |
| (d18:1/14:0, | Cheese, | | Cheese Freq | | | |
| d16:1/16:0)* | Cottage Freq | | | | | |
| X - 17325 | Fried Fish | −0.03827 | Egg Recipes | −0.03532 | 0.383891 | 3.98E−18 |
| | Freq | | Freq | | | |
| N1-Methyl-2-pyridone- | Chicken or | 0.04899 | SF_Salmon_wt | 0.048479 | 0.383476 | 4.35E−18 |
| 5-carboxamide | Turkey | | | | | |
| | Without Skin | | | | | |
| | Freq | | | | | |
| urate | SF_Milk_wt | −0.05192 | SF_Potatoes_wt | 0.044827 | 0.382399 | 5.48E−18 |
| carotene diol (3) | SF_WhiteWheat_g_wt | −0.02943 | SF_Vegetable | 0.027763 | 0.379593 | 9.97E−18 |
| | | | Salad_wt | | | |
| 1-methylhistidine | Processed | −0.05225 | Pastrami or | 0.051223 | 0.377947 | 1.41E−17 |
| | Meat Free | | Smoked Turkey | | | |
| | Products Freq | | Breast Freq | | | |
| 3-acetylphenol | SF_Cappuccino_wt | 0.031901 | SF_Wine_wt | 0.023843 | 0.37676 | 1.81E−17 |
| sulfate | | | | | | |
| theobromine | SF_Dark | 0.074842 | Beef or | −0.0264 | 0.375799 | 2.22E−17 |
| | Chocolate_wt | | Chicken Soup | | | |
| | | | Freq | | | |
| N-methylproline | SF_Mandarin | 0.039602 | SF_Vegetable | 0.029372 | 0.375553 | 2.34E−17 |
| | _wt | | Salad_wt | | | |
| dihydrocaffeate | Green Pepper | 0.038352 | Lettuce Freq | 0.03572 | 0.370926 | 6.11E−17 |
| sulfate (2) | Freq | | | | | |
| threonate | SF_Butter_wt | −0.05228 | Turkey | −0.0474 | 0.370249 | 7.03E−17 |
| | | | Meatballs, | | | |
| | | | Beef, Chicken | | | |
| | | | Freq | | | |
| X - 12221 | SF_Bread_wt | −0.06191 | Coffee Freq | 0.060087 | 0.369124 | 8.85E−17 |
| myristoyl | Beer Freq | −0.04834 | 0.5-3% White | 0.047404 | 0.367845 | 1.15E−16 |
| dihydrosphingo- | | | Cheese, | | | |
| myelin | | | Cottage Freq | | | |
| (d18:0/14:0)* | | | | | | |
| X - 17367 | Potatoes | −0.04261 | Egg Recipes | −0.04036 | 0.367768 | 1.17E−16 |
| | Boiled, | | Freq | | | |
| | Baked, | | | | | |
| | Mashed, | | | | | |
| | Potatoes | | | | | |
| | Salad Freq | | | | | |
| 4-methyl-2- | White or | −0.04939 | Olives Freq | 0.04369 | 0.366956 | 1.38E−16 |
| oxopentanoate | Brown Sugar | | | | | |
| | Freq | | | | | |
| 1-myristoyl-2- | SF_Tahini_wt | −0.06294 | SF_WhiteWheat_g_wt | 0.05446 | 0.365079 | 2.01E−16 |
| palmitoyl-GPC | | | | | | |
| (14:0/16:0) | | | | | | |
| arabonate/xylonate | SF_Rice | 0.041739 | Beef, Veal, | −0.03616 | 0.364071 | 2.47E−16 |
| | crackers_wt | | Lamb, Pork, | | | |
| | | | Steak, Golash | | | |
| | | | Freq | | | |
| leucine | Beef, Veal, | 0.039325 | Dried Fruits | −0.03856 | 0.363323 | 2.87E−16 |
| | Lamb, Pork, | | Freq | | | |
| | Steak, Golash | | | | | |
| | Freq | | | | | |
| 5alpha-androstan- | SF_Beer_wt | 0.059412 | SF_Pita_wt | 0.038293 | 0.3628 | 3.19E−16 |
| 3beta,17beta- | | | | | | |
| diol disulfate | | | | | | |
| 3-methylxanthine | SF_Dark | 0.103324 | Beef or | −0.05476 | 0.360778 | 4.77E−16 |
| | Chocolate_wt | | Chicken Soup | | | |
| | | | Freq | | | |
| X - 16087 | White or | −0.06196 | Simple | −0.05461 | 0.360488 | 5.05E−16 |
| | Brown Sugar | | Cookies or | | | |
| | Freq | | Biscuits Freq | | | |
| 3-methyl-2- | SF_Beef_wt | 0.052248 | Olives Freq | 0.039103 | 0.359631 | 5.99E−16 |
| oxovalerate | | | | | | |
| 2-hydroxybutyrate/ | SF_Cereals_wt | −0.04741 | Fish (not | 0.043758 | 0.358057 | 8.17E−16 |
| 2-hydroxyisobutyrate | | | Tuna) Pickled, | | | |
| | | | Dried, Smoked, | | | |
| | | | Canned Freq | | | |
| ergothioneine | SF_Schnitzel_wt | −0.04274 | Fresh | 0.042489 | 0.357018 | 1.00E−15 |
| | | | Vegetable | | | |
| | | | Salad With | | | |
| | | | Dressing or | | | |
| | | | Oil Freq | | | |
| 1-lignoceroyl-GPC | Roll or | −0.06077 | Peanuts Freq | 0.056537 | 0.356222 | 1.17E−15 |
| (24:0) | Bageles Freq | | | | | |
| linoleoylcarnitine | Beer Freq | 0.059653 | Hummus | 0.053653 | 0.355664 | 1.31E−15 |
| (C18:2)* | | | Salad Freq | | | |
| N-acetylcarnosine | Wholemeal or | −0.05137 | SF_Beef_wt | 0.048939 | 0.355399 | 1.38E−15 |
| | Rye Bread | | | | | |
| | Freq | | | | | |
| N-trimethyl 5- | SF_Coffee_wt | 0.041994 | Salty Cheese, | 0.041497 | 0.354891 | 1.52E−15 |
| aminovalerate | | | Tzfatit, | | | |
| | | | Bulgarian, | | | |
| | | | Brinza, Thick | | | |
| | | | Slice Freq | | | |
| sphingomyelin | Salty Cheese, | 0.051802 | Beer Freq | −0.04486 | 0.354618 | 1.60E−15 |
| (d18:1/22:2, | Tzfatit, | | | | | |
| d18:2/22:1, | Bulgarian, | | | | | |
| d16:1/24:2)* | Brinza, | | | | | |
| | Medium Slice | | | | | |
| | Freq | | | | | |
| urea | Cooked | −0.04419 | SF_Natural | 0.043918 | 0.354161 | 1.75E−15 |
| | Cereal such as | | Yogurt_wt | | | |
| | Oatmeal | | | | | |
| | Porridge Freq | | | | | |
| 3-carboxy-4- | Fresh | 0.050826 | Sausages | 0.048362 | 0.352926 | 2.23E−15 |
| methyl-5- | Vegetable | | such as | | | |
| pentyl-2- | Salad With | | Salami Freq | | | |
| furanpropionate | Dressing or | | | | | |
| (3-CMPFP)** | Oil Freq | | | | | |
| Fibrinopeptide | Processed | −0.01278 | SF_Tahini_wt | −0.01213 | 0.352507 | 2.41E−15 |
| A(7-16)* | Meat Free | | | | | |
| | Products Freq | | | | | |
| 3-(4-hydroxy- | 5-9% Yellow | 0.052535 | Cooked | −0.04648 | 0.351439 | 2.96E−15 |
| phenyl)lactate | Cheese Freq | | Cereal such as | | | |
| | | | Oatmeal | | | |
| | | | Porridge Freq | | | |
| 1-(1-enyl- | Egg, Hard | 0.055643 | Processed | −0.04832 | 0.351396 | 2.99E−15 |
| palmitoyl)-2- | Boiled or Soft | | Meat Free | | | |
| linoleoyl-GPE | Freq | | Products Freq | | | |
| (P-16:0/18:2)* | | | | | | |
| X - 24948 | Canned Tuna | 0.043396 | SF_WhiteWheat_g_wt | 0.043345 | 0.351043 | 3.20E−15 |
| | or Tuna Salad | | | | | |
| | Freq | | | | | |
| 1-(1-enyl-stearoyl)- | SF_WhiteWheat_g_wt | −0.04951 | SF_Onion_wt | −0.04387 | 0.350153 | 3.79E−15 |
| 2-oleoyl-GPE | | | | | | |
| (P-18:0/18:1) | | | | | | |
| 3-hydroxybutyryl- | Olives Freq | 0.053049 | Wholemeal or | −0.04305 | 0.349047 | 4.69E−15 |
| carnitine (1) | | | Rye Bread | | | |
| | | | Freq | | | |
| X - 19183 | Avocado Freq | 0.036242 | Coffee Freq | −0.03184 | 0.348713 | 5.00E−15 |
| X - 23659 | Cooked | 0.039292 | 3% Milk Freq | −0.03427 | 0.34782 | 5.92E−15 |
| | Legumes Freq | | | | | |
| 7-methylurate | SF_Dark | 0.048154 | SF_Lentils_wt | −0.03192 | 0.347816 | 5.93E−15 |
| | Chocolate_wt | | | | | |
| X - 24757 | Carrots, Fresh | 0.051412 | Coffee Freq | 0.046139 | 0.347733 | 6.02E−15 |
| | or Cooked, | | | | | |
| | Carrot Juice | | | | | |
| | Freq | | | | | |
| X - 24328 | Beer Freq | 0.053836 | SF_Hummus | 0.052723 | 0.347635 | 6.13E−15 |
| | | | Salad_wt | | | |
| pregn steroid | SF_Rice | −0.04032 | SF_Beer_wt | 0.039884 | 0.346265 | 7.95E−15 |
| monosulfate | crackers_wt | | | | | |
| C21H34O5S* | | | | | | |
| ethyl | Parsley, | 0.016401 | SF_Pita_wt | 0.015055 | 0.34588 | 8.55E−15 |
| glucuronide | Celery, | | | | | |
| | Fennel, Dill, | | | | | |
| | Cilantro, | | | | | |
| | Green Onion | | | | | |
| | Freq | | | | | |
| 3-hydroxyhippurate | SF_Wholemeal | 0.041614 | SF_Jam_wt | 0.041016 | 0.345164 | 9.78E−15 |
| sulfate | Crackers_wt | | | | | |
| 7-methylxanthine | SF_Coffee_wt | 0.075186 | Beef or | −0.05062 | 0.34498 | 1.01E−14 |
| | | | Chicken Soup | | | |
| | | | Freq | | | |
| X - 18886 | Peach, | −0.05565 | SF_Olives_wt | 0.05243 | 0.344884 | 1.03E−14 |
| | Nectarine, | | | | | |
| | Plum Freq | | | | | |
| glycine | SF_Diet | −0.05595 | Cucumber | −0.04961 | 0.344431 | 1.12E−14 |
| conjugate of | Coke_wt | | Freq | | | |
| C10H14O2 (1)* | | | | | | |
| caprate (10:0) | 3% Milk Freq | 0.052666 | SF_Tahini_wt | −0.04831 | 0.343847 | 1.25E−14 |
| dihydroferulic | SF_Wholemeal | 0.078961 | Sugar | −0.06382 | 0.342386 | 1.65E−14 |
| acid | Bread_wt | | Sweetened | | | |
| | | | Chocolate | | | |
| | | | Milk Freq | | | |
| X - 12306 | SF_Hummus_wt | 0.05638 | Apple Freq | 0.05467 | 0.342141 | 1.72E−14 |
| leucylalanine | Sausages Freq | −0.02017 | SF_WholeWheat_g_wt | −0.00951 | 0.339579 | 2.77E−14 |
| N1-methylinosine | SF_Soymilk_wt | −0.03325 | Orange or | −0.02788 | 0.339464 | 2.83E−14 |
| | | | Grapefruit | | | |
| | | | Juice Freq | | | |
| X - 12544 | SF_WhiteWheat_g_wt | 0.052027 | SF_Tea_wt | 0.047978 | 0.339085 | 3.03E−14 |
| androstenediol | Lemon Freq | −0.04738 | SF_Pita_wt | 0.040231 | 0.337347 | 4.17E−14 |
| (3alpha,17alpha) | | | | | | |
| monosulfate (3) | | | | | | |
| argininate* | SF_Apple_wt | 0.036457 | SF_Lentils_wt | 0.033548 | 0.337039 | 4.41E−14 |
| ferulic acid 4- | SF_Bread_wt | −0.05366 | Jachnun, | −0.02485 | 0.336545 | 4.83E−14 |
| sulfate | | | Mlawah, | | | |
| | | | Kubana, | | | |
| | | | Cigars Freq | | | |
| pregnen-diol | Lemon Freq | −0.02386 | Coffee Freq | −0.02354 | 0.334663 | 6.80E−14 |
| disulfate | | | | | | |
| C21H34O8S2* | | | | | | |
| N-acetyl-3- | Pastrami or | 0.064586 | 0.5-3% White | 0.055006 | 0.334575 | 6.91E−14 |
| methylhistidine* | Smoked Turkey | | Cheese, | | | |
| | Breast Freq | | Cottage Freq | | | |
| X - 17655 | SF_Vegetable | 0.054329 | SF_Milk_wt | −0.04166 | 0.334257 | 7.32E−14 |
| | Salad_wt | | | | | |
| X - 24693 | Zucchini or | 0.051715 | Vegetable | 0.046437 | 0.334182 | 7.42E−14 |
| | Eggplant Freq | | Soup Freq | | | |
| S-methylmethionine | SF_Apple_wt | 0.064711 | SF_Milk_wt | −0.06431 | 0.332853 | 9.43E−14 |
| X - 23314 | SF_Wine_wt | 0.041034 | Orange or | 0.037983 | 0.331446 | 1.21E−13 |
| | | | Grapefruit | | | |
| | | | Freq | | | |
| sphingomyelin | White or | 0.039429 | Beef, Veal, | −0.03463 | 0.330379 | 1.47E−13 |
| (d18:1/20:2, | Brown Sugar | | Lamb, Pork, | | | |
| d18:2/20:1, | Freq | | Steak, Golash | | | |
| d16:1/22:2)* | | | Freq | | | |
| androstenediol | SF_Carrots_wt | 0.052597 | SF_Rice | −0.05118 | 0.329787 | 1.63E−13 |
| (3alpha,17alpha) | | | crackers_wt | | | |
| monosulfate (2) | | | | | | |
| alpha-hydroxy- | Sausages Freq | 0.026157 | SF_WhiteWheat_g_wt | 0.026134 | 0.329164 | 1.82E−13 |
| isocaproate | | | | | | |
| X - 24473 | 3% Milk Freq | −0.04528 | SF_Grapes_wt | 0.042605 | 0.329097 | 1.84E−13 |
| X - 24337 | Regular Sodas | 0.05234 | Fresh | −0.05186 | 0.328477 | 2.06E−13 |
| | with Sugar | | Vegetable | | | |
| | Freq | | Salad Without | | | |
| | | | Dressing or | | | |
| | | | Oil Freq | | | |
| X - 21829 | SF_WhiteWheat_g_wt | −0.06322 | Olives Freq | 0.063048 | 0.327598 | 2.41E−13 |
| X - 23780 | Grapes or | −0.03421 | SF_Rice | 0.033074 | 0.327324 | 2.52E−13 |
| | Raisins Freq | | crackers_wt | | | |
| deoxycarnitine | Chicken or | 0.050117 | Shish Kebab | 0.045183 | 0.325373 | 3.56E−13 |
| | Turkey With | | in Pita Bread | | | |
| | Skin Freq | | Freq | | | |
| N,N,N-trimethyl- | Falafel in Pita | 0.047549 | Beer Freq | 0.046313 | 0.325337 | 3.58E−13 |
| alanylproline | Bread Freq | | | | | |
| betaine (TMAP) | | | | | | |
| Fibrinopeptide | SF_Roasted | −0.01936 | Cauliflower or | 0.018019 | 0.325192 | 3.67E−13 |
| B (1-13)** | eggplant_wt | | Broccoli Freq | | | |
| stearoylcarnitine | Couscous, | −0.04283 | Sausages | 0.033821 | 0.324693 | 4.01E−13 |
| (C18) | Burgul, | | such as | | | |
| | Mamaliga, | | Salami Freq | | | |
| | Groats Freq | | | | | |
| myristate (14:0) | Butter Freq | 0.039914 | Regular Sodas | −0.03953 | 0.324623 | 4.06E−13 |
| | | | with Sugar | | | |
| | | | Freq | | | |
| histidine | SF_Cereals_wt | 0.052599 | SF_Hummus | −0.04732 | 0.323506 | 4.93E−13 |
| | | | Salad_wt | | | |
| isovaleryl- | Egg Recipes | 0.048097 | Processed | −0.03721 | 0.322882 | 5.49E−13 |
| carnitine (C5) | Freq | | Meat Free | | | |
| | | | Products Freq | | | |
| X - 13431 | Fish (not | 0.049331 | Fish Cooked, | 0.047978 | 0.32243 | 5.94E−13 |
| | Tuna) Pickled, | | Baked or | | | |
| | Dried, Smoked, | | Grilled Freq | | | |
| | Canned Freq | | | | | |
| X - 13255 | SF_Rice | 0.059722 | SF_Yellow | 0.053973 | 0.320938 | 7.68E−13 |
| | crackers_wt | | Cheese_wt | | | |
| X - 21319 | Coated or | 0.04195 | SF_Cappuccino_wt | −0.03998 | 0.320446 | 8.36E−13 |
| | Stuffed | | | | | |
| | Cookies, | | | | | |
| | Waffles or | | | | | |
| | Biscuits Freq | | | | | |
| X - 13866 | Fish (not | 0.050089 | Beef or | 0.041531 | 0.320354 | 8.49E−13 |
| | Tuna) Pickled, | | Chicken Soup | | | |
| | Dried, Smoked, | | Freq | | | |
| | Canned Freq | | | | | |
| 3-methyl-2- | SF_Apple_wt | −0.02619 | SF_Coffee_wt | −0.02532 | 0.319895 | 9.19E−13 |
| oxobutyrate | | | | | | |
| X - 07765 | Coated or | 0.057179 | 3-4.5% | 0.037393 | 0.316208 | 1.72E−12 |
| | Stuffed | | Pudding, | | | |
| | Cookies, | | Cheese With | | | |
| | Waffles or | | Additions | | | |
| | Biscuits Freq | | Freq | | | |
| X - 22509 | SF_Apple_wt | 0.021902 | 3-4.5% | 0.0217 | 0.315541 | 1.93E−12 |
| | | | Lebben, Eshel | | | |
| | | | Freq | | | |
| 2,3-dihydroxy- | Cooked | 0.054212 | Pasta or | −0.04029 | 0.315044 | 2.10E−12 |
| 2-methylbutyrate | Vegetable | | Flakes Freq | | | |
| | Salads Freq | | | | | |
| ADpSGEGDFX | Vegetable | 0.031872 | SF_WhiteWheat_g_wt | −0.02536 | 0.314514 | 2.29E−12 |
| AEGGGVR* | Soup Freq | | | | | |
| 5alpha-androstan- | SF_Coffee_wt | −0.04871 | Shish Kebab | 0.043108 | 0.313926 | 2.53E−12 |
| 3alpha,17alpha- | | | in Pita Bread | | | |
| diol monosulfate | | | Freq | | | |
| X - 24832 | Beef, Veal, | 0.053751 | Dried Fruits | −0.04756 | 0.313391 | 2.77E−12 |
| | Lamb, Pork, | | Freq | | | |
| | Steak, Golash | | | | | |
| | Freq | | | | | |
| carotene diol | SF_Carrots_wt | 0.039772 | SF_Chicken | −0.03954 | 0.313221 | 2.85E−12 |
| (1) | | | breast_wt | | | |
| 2-methylserine | SF_WhiteWheat_g_wt | −0.0551 | Pear Fresh, | 0.046295 | 0.312658 | 3.13E−12 |
| | | | Cooked or | | | |
| | | | Canned Freq | | | |
| N-methylhydroxy- | SF_Mandarin_wt | 0.047633 | SF_Banana_wt | 0.026113 | 0.312648 | 3.13E−12 |
| proline** | | | | | | |
| catechol | SF_WhiteWheat_g_wt | −0.03101 | SF_Bread_wt | −0.02845 | 0.3126 | 3.16E−12 |
| glucuronide | | | | | | |
| 3-hydroxyhippurate | SF_WholeWheat_g_wt | 0.066147 | SF_Wholemeal | 0.043477 | 0.311264 | 3.95E−12 |
| | | | Bread_wt | | | |
| X - 18899 | 5-9% White | −0.06269 | SF_Olives_wt | −0.04944 | 0.310712 | 4.33E−12 |
| | Cheese, | | | | | |
| | Cottage Freq | | | | | |
| pregnenetriol | Coffee Freq | −0.02994 | SF_Apple_wt | −0.02991 | 0.310417 | 4.54E−12 |
| disulfate* | | | | | | |
| N-stearoyl- | SF_Avocado_wt | −0.05429 | Cooked | −0.04721 | 0.310022 | 4.85E−12 |
| sphingosine | | | Legumes Freq | | | |
| (d18:1/18:0)* | | | | | | |
| 10-undecenoate | SF_Milk_wt | 0.061107 | 3% Milk Freq | 0.052872 | 0.308837 | 5.90E−12 |
| (11:1n1) | | | | | | |
| X - 15503 | SF_Tomatoes_wt | −0.06039 | Alcoholic | −0.05866 | 0.308375 | 6.36E−12 |
| | | | Drinks Freq | | | |
| 1-palmitoyl-2- | Tahini Salad | −0.041 | Wholemeal | 0.036322 | 0.307733 | 7.07E−12 |
| palmitoleoyl-GPC | Freq | | Crackers Freq | | | |
| (16:0/16:1)* | | | | | | |
| X - 15486 | SF_Tomatoes_wt | −0.03777 | Herbal Tea | −0.03149 | 0.307631 | 7.19E−12 |
| | | | Freq | | | |
| gamma-tocopherol/ | SF_Hummus | 0.042454 | SF_Sugar Free | −0.04028 | 0.30664 | 8.45E−12 |
| beta-tocopherol | Salad_wt | | Gum_wt | | | |
| sphingomyelin | Salty Cheese, | 0.046175 | 0.5-3% White | 0.039202 | 0.305718 | 9.82E−12 |
| (d18:1/21:0, | Tzfatit, | | Cheese, | | | |
| d17:1/22:0, | Bulgarian, | | Cottage Freq | | | |
| d16:1/23:0)* | Brinza, Thick | | | | | |
| | Slice Freq | | | | | |
| 1-(1-enyl- | >=16% Yellow | 0.049138 | Beef, Veal, | 0.039788 | 0.305649 | 9.93E−12 |
| palmitoyl)-GPE | Cheese Freq | | Lamb, Pork, | | | |
| (P-16:0)* | | | Steak, Golash | | | |
| | | | Freq | | | |
| isobutyryl- | SF_Coffee_wt | 0.050446 | SF_Apple_wt | 0.03832 | 0.304365 | 1.22E−11 |
| carnitine (C4) | | | | | | |
| X - 18901 | SF_WhiteWheat_g_wt | −0.04052 | SF_Tea_wt | 0.037512 | 0.304305 | 1.24E−11 |
| gamma- | SF_Vegetable | 0.043006 | Banana Freq | −0.04033 | 0.304253 | 1.25E−11 |
| glutamylglutamate | Salad_wt | | | | | |
| X - 15492 | Falafel in Pita | 0.060056 | SF_Hummus | 0.05209 | 0.304004 | 1.30E−11 |
| | Bread Freq | | Salad_wt | | | |
| X - 16580 | SF_WhiteWheat_g_wt | −0.06138 | SF_Cooked | −0.04311 | 0.303593 | 1.39E−11 |
| | | | Sweet | | | |
| | | | potato_wt | | | |
| sphingomyelin | White or | 0.042974 | SF_Olive | −0.04157 | 0.303253 | 1.46E−11 |
| (d18:2/24:2)* | Brown Sugar | | oil_wt | | | |
| | Freq | | | | | |
| stearoyl | Falafel in Pita | −0.03796 | 5-9% White | 0.036949 | 0.303065 | 1.51E−11 |
| sphingomyelin | Bread Freq | | Cheese, | | | |
| (d18:1/18:0) | | | Cottage Freq | | | |
| N-methyltaurine | Egg, Hard | −0.08128 | Red Pepper | 0.053969 | 0.302497 | 1.65E−11 |
| | Boiled or Soft | | Freq | | | |
| | Freq | | | | | |
| lysine | Chicken or | 0.045408 | SF_Olives_wt | −0.0418 | 0.302457 | 1.66E−11 |
| | Turkey With | | | | | |
| | Skin Freq | | | | | |
| X - 17340 | SF_WhiteWheat_g_wt | 0.073187 | Fresh | 0.038033 | 0.300823 | 2.16E−11 |
| | | | Vegetable | | | |
| | | | Salad With | | | |
| | | | Dressing or | | | |
| | | | Oil Freq | | | |
| X - 13703 | SF_Yellow | 0.046598 | SF_Wholemeal | 0.041295 | 0.300461 | 2.29E−11 |
| | Cheese_wt | | Crackers_wt | | | |
| X - 24706 | SF_Brown | 0.015152 | SF_Tofu_wt | 0.013519 | 0.298699 | 3.03E−11 |
| | Rice_wt | | | | | |
| X - 22716 | SF_Cake_wt | −0.0602 | SF_Chocolate_wt | 0.058223 | 0.298683 | 3.04E−11 |
| X - 14082 | SF_Salmon_wt | −0.0267 | SF_Cappuccino_wt | 0.026149 | 0.298477 | 3.14E−11 |
| 4-allylphenol | SF_Rice_wt | −0.03687 | Lettuce Freq | 0.035869 | 0.298175 | 3.29E−11 |
| sulfate | | | | | | |
| 1-oleoyl-2- | SF_Yellow | −0.03448 | SF_Apple_wt | 0.031487 | 0.297782 | 3.50E−11 |
| docosahexaenoyl- | Cheese_wt | | | | | |
| GPC (18:1/22:6)* | | | | | | |
| X - 17354 | SF_Potatoes_wt | −0.03035 | SF_WhiteWheat_g_wt | −0.02666 | 0.296334 | 4.40E−11 |
| 6-oxopiperidine- | Ordinary | −0.03672 | SF_Omelette_wt | 0.036708 | 0.296239 | 4.46E−11 |
| 2-carboxylate | Bread or | | | | | |
| | Challah Freq | | | | | |
| X - 18240 | SF_Yellow | 0.040042 | Salty Snacks | −0.03397 | 0.296175 | 4.51E−11 |
| | Cheese_wt | | Freq | | | |
| theanine | SF_Tea_wt | 0.072302 | SF_Coffee_wt | −0.05017 | 0.296096 | 4.56E−11 |
| X - 24760 | Coffee Freq | 0.055548 | Thousand | −0.05301 | 0.296008 | 4.63E−11 |
| | | | Island | | | |
| | | | Dressing, | | | |
| | | | Garlic | | | |
| | | | Dressing Freq | | | |
| beta-hydroxyiso- | Beef, Veal, | 0.047254 | SF_Sugar Free | −0.04141 | 0.295258 | 5.20E−11 |
| valerate | Lamb, Pork, | | Gum_wt | | | |
| | Steak, Golash | | | | | |
| | Freq | | | | | |
| dodecenedioate | Salty Snacks | −0.06009 | SF_Wholemeal | 0.058701 | 0.293925 | 6.41E−11 |
| (C12:1-DC)* | Freq | | Bread_wt | | | |
| X - 11478 | Coated or | 0.056785 | Apricot Fresh | −0.05304 | 0.293803 | 6.53E−11 |
| | Stuffed | | or Dry, or | | | |
| | Cookies, | | Loquat Freq | | | |
| | Waffles or | | | | | |
| | Biscuits Freq | | | | | |
| X - 24736 | SF_Vegetable | 0.070155 | 5-9% White | −0.06725 | 0.293213 | 7.15E−11 |
| | Salad_wt | | Cheese, | | | |
| | | | Cottage Freq | | | |
| lactose | Sweet Dry | −0.06695 | SF_Carrots_wt | −0.06585 | 0.292312 | 8.22E−11 |
| | Wine, | | | | | |
| | Cocktails Freq | | | | | |
| 2-hydroxyoctanoate | 0-1.5% | −0.05124 | SF_Tomatoes_wt | −0.0447 | 0.291151 | 9.84E−11 |
| | Natural | | | | | |
| | Yogurt Freq | | | | | |
| trans-4- | Turkey | 0.039291 | Sausages | 0.037699 | 0.290927 | 1.02E−10 |
| hydroxyproline | Meatballs, | | such as | | | |
| | Beef, Chicken | | Salami Freq | | | |
| | Freq | | | | | |
| X - 17351 | Turkey | −0.04116 | SF_Kohlrabi_wt | 0.037389 | 0.290839 | 1.03E−10 |
| | Meatballs, | | | | | |
| | Beef, Chicken | | | | | |
| | Freq | | | | | |
| 1-methylnicotin- | Cooked | −0.04225 | Mandarin or | 0.038825 | 0.290374 | 1.11E−10 |
| amide | Legumes Freq | | Clementine | | | |
| | | | Freq | | | |
| acetoacetate | SF_Olives_wt | 0.051623 | SF_WholeWheat_g_wt | −0.04807 | 0.290273 | 1.13E−10 |
| X - 23782 | Simple | −0.04588 | Vegetable | 0.041358 | 0.290001 | 1.17E−10 |
| | Cookies or | | Soup Freq | | | |
| | Biscuits Freq | | | | | |
| X - 12818 | Pear Fresh, | 0.07774 | SF_WholeWheat_g_wt | 0.062202 | 0.288993 | 1.37E−10 |
| | Cooked or | | | | | |
| | Canned Freq | | | | | |
| 10- nonadecenoate | Simple | −0.0351 | SF_Yellow | 0.031683 | 0.288467 | 1.48E−10 |
| (19:1n9) | Cookies or | | Cheese_wt | | | |
| | Biscuits Freq | | | | | |
| X - 14314 | Coffee Freq | 0.02945 | SF_Cooked | −0.02384 | 0.287334 | 1.76E−10 |
| | | | Pumpkin_wt | | | |
| X - 24544 | Egg Recipes | 0.037427 | Alcoholic | 0.033114 | 0.287082 | 1.83E−10 |
| | Freq | | Drinks Freq | | | |
| gamma-glutamyl- | SF_Sugar Free | −0.03903 | Green Pepper | 0.035201 | 0.286693 | 1.94E−10 |
| leucine | Gum_wt | | Freq | | | |
| glutaryl- | Cooked | −0.04474 | Turkey | 0.025266 | 0.286566 | 1.98E−10 |
| carnitine (C5-DC) | Cereal such as | | Meatballs, | | | |
| | Oatmeal | | Beef, Chicken | | | |
| | Porridge Freq | | Freq | | | |
| hydantoin-5- | White or | −0.04693 | SF_Wine_wt | −0.0362 | 0.286558 | 1.98E−10 |
| propionic acid | Brown Sugar | | | | | |
| | Freq | | | | | |
| X - 12543 | Coffee Freq | 0.055644 | SF_WholeWheat_g_wt | 0.053565 | 0.284627 | 2.65E−10 |
| X - 17337 | Beer Freq | 0.051865 | SF_Tahini_wt | 0.051393 | 0.283435 | 3.16E−10 |
| dodecanedioate | SF_Coffee_wt | 0.056886 | SF_Butter_wt | 0.056491 | 0.283101 | 3.33E−10 |
| androstenediol | Shish Kebab | 0.047282 | Canned Tuna | 0.047157 | 0.283069 | 3.34E−10 |
| (3beta,17beta) | in Pita Bread | | or Tuna Salad | | | |
| monosulfate (1) | Freq | | Freq | | | |
| adipoylcarnitine | Fries Freq | 0.042836 | Beef, Veal, | 0.042155 | 0.282545 | 3.61E−10 |
| (C6-DC) | | | Lamb, Pork, | | | |
| | | | Steak, Golash | | | |
| | | | Freq | | | |
| pristanate | SF_Yellow | 0.057613 | SF_Butter_wt | 0.047975 | 0.282078 | 3.87E−10 |
| | Cheese_wt | | | | | |
| sphingomyelin | Beer Freq | −0.0458 | Pita Freq | −0.04203 | 0.280476 | 4.91E−10 |
| (d18:2/23:0, | | | | | | |
| d18:1/23:1, | | | | | | |
| d17:1/24:1)* | | | | | | |
| X - 24542 | Coffee Freq | 0.051751 | SF_Wholemeal | 0.04465 | 0.279864 | 5.37E−10 |
| | | | Bread_wt | | | |
| X - 22475 | SF_Tahini_wt | −0.05405 | Yeast Cakes | 0.041372 | 0.278663 | 6.40E−10 |
| | | | and Cookies | | | |
| | | | as Rogallach, | | | |
| | | | Croissant or | | | |
| | | | Donut Freq | | | |
| alpha-hydroxyiso- | Herbal Tea | −0.04036 | Sausages Freq | 0.031039 | 0.278512 | 6.55E−10 |
| valerate | Freq | | | | | |
| myristoylcarnitine | Couscous, | −0.0438 | SF_Butter_wt | 0.037691 | 0.278311 | 6.74E−10 |
| (C14) | Burgul, | | | | | |
| | Mamaliga, | | | | | |
| | Groats Freq | | | | | |
| X - 21411 | SF_Tomatoes_wt | −0.06179 | 0-1.5% | −0.04959 | 0.278127 | 6.93E−10 |
| | | | Natural | | | |
| | | | Yogurt Freq | | | |
| 1-(1-enyl- | SF_Tomatoes_wt | −0.03398 | Fish (not | 0.032764 | 0.277637 | 7.44E−10 |
| oleoyl)-GPE | | | Tuna) Pickled, | | | |
| (P-18:1)* | | | Dried, Smoked, | | | |
| | | | Canned Freq | | | |
| Fibrinopeptide | Cauliflower or | 0.015203 | SF_Rice_wt | −0.0111 | 0.277102 | 8.04E−10 |
| A (4-15)** | Broccoli Freq | | | | | |
| X - 11640 | Peanuts Freq | 0.047496 | Tahini Salad | 0.044656 | 0.276828 | 8.37E−10 |
| | | | Freq | | | |
| 2-hydroxy-3- | SF_WhiteWheat_g_wt | 0.034001 | Beef, Veal, | 0.030092 | 0.276598 | 8.65E−10 |
| methylvalerate | | | Lamb, Pork, | | | |
| | | | Steak, Golash | | | |
| | | | Freq | | | |
| dehydroiso- | Lemon Freq | −0.03975 | Canned Tuna | 0.037251 | 0.276405 | 8.90E−10 |
| androsterone | | | or Tuna Salad | | | |
| sulfate (DHEA-S) | | | Freq | | | |
| X - 12726 | Roll or | −0.05627 | 3% Milk Freq | −0.05352 | 0.276225 | 9.13E−10 |
| | Bageles Freq | | | | | |
| X - 13728 | SF_Chocolate_wt | 0.029507 | SF_Cottage | −0.02487 | 0.276 | 9.44E−10 |
| | | | cheese_wt | | | |
| cinnamoylglycine | SF_Water_wt | 0.041743 | SF_Dried | 0.0395 | 0.275153 | 1.07E−09 |
| | | | dates_wt | | | |
| X - 17685 | Coffee Freq | 0.061144 | SF_Soymilk_wt | 0.024588 | 0.274701 | 1.14E−09 |
| X - 12101 | SF_Whipped | 0.026953 | SF_WhiteWheat_g_wt | −0.0269 | 0.274215 | 1.22E−09 |
| | cream_wt | | | | | |
| glycocholenate | Falafel in Pita | 0.04998 | 0-1.5% | −0.02057 | 0.273996 | 1.26E−09 |
| sulfate* | Bread Freq | | Natural | | | |
| | | | Yogurt Freq | | | |
| 4-hydroxyphenyl | SF_Coffee_wt | 0.034855 | 5-9% Yellow | 0.033834 | 0.273101 | 1.43E−09 |
| pyruvate | | | Cheese Freq | | | |
| 1-(1-enyl-palmitoyl)- | SF_WholeWheat_g_wt | −0.04336 | Alcoholic | 0.034819 | 0.271544 | 1.79E−09 |
| 2-oleoyl-GPC | | | Drinks Freq | | | |
| (P-16:0/18:1)* | | | | | | |
| picolinoylglycine | SF_Cottage | 0.043259 | SF_Sugar Free | −0.03989 | 0.271367 | 1.83E−09 |
| | cheese_wt | | Gum_wt | | | |
| isocitrate | SF_Butter_wt | −0.05339 | Zucchini or | 0.050786 | 0.270843 | 1.98E−09 |
| | | | Eggplant Freq | | | |
| X - 24243 | Beef, Veal, | 0.039141 | Tahini Salad | −0.03466 | 0.270696 | 2.02E−09 |
| | Lamb, Pork, | | Freq | | | |
| | Steak, Golash | | | | | |
| | Freq | | | | | |
| androstenediol | SF_Beer_wt | 0.032141 | Fries Freq | 0.028093 | 0.270439 | 2.09E−09 |
| (3beta,17beta) | | | | | | |
| disulfate (2) | | | | | | |
| X - 11261 | Coated or | 0.033748 | SF_Mayonnaise_wt | 0.032668 | 0.269962 | 2.24E−09 |
| | Stuffed | | | | | |
| | Cookies, | | | | | |
| | Waffles or | | | | | |
| | Biscuits Freq | | | | | |
| X - 22162 | SF_Natural | 0.049682 | Dried Fruits | 0.044638 | 0.269887 | 2.26E−09 |
| | Yogurt_wt | | Freq | | | |
| X - 11470 | SF_Lettuce | 0.042756 | Beer Freq | 0.03851 | 0.268709 | 2.67E−09 |
| | Salad_wt | | | | | |
| 2-methylbutyryl | Processed | −0.02757 | SF_Apple_wt | 0.025362 | 0.268206 | 2.86E−09 |
| carnitine (C5) | Meat Free | | | | | |
| | Products Freq | | | | | |
| X - 12798 | SF_Potatoes_wt | −0.03424 | Green Tea | −0.03234 | 0.267623 | 3.11E−09 |
| | | | Freq | | | |
| dimethyl sulfoxide | SF_Onion_wt | 0.036787 | SF_Rice_wt | 0.034199 | 0.267466 | 3.18E−09 |
| (DMSO) | | | | | | |
| 2-aminooctanoate | SF_Beer_wt | 0.043264 | Peanuts Freq | 0.040677 | 0.266761 | 3.51E−09 |
| pentadecanoate | Regular Sodas | −0.03722 | Simple | −0.03633 | 0.26669 | 3.54E−09 |
| (15:0) | with Sugar | | Cookies or | | | |
| | Freq | | Biscuits Freq | | | |
| 1,2-dilinoleoyl- | Simple | 0.053441 | Alcoholic | 0.04957 | 0.266101 | 3.84E−09 |
| GPC (18:2/18:2) | Cookies or | | Drinks Freq | | | |
| | Biscuits Freq | | | | | |
| X - 18921 | SF_Dark | −0.03524 | Processed | 0.034302 | 0.26597 | 3.91E−09 |
| | Chocolate_wt | | Meat Free | | | |
| | | | Products Freq | | | |
| 1,2,3-benzenetriol | SF_Soymilk_wt | 0.016992 | SF_Hummus | 0.014111 | 0.26592 | 3.94E−09 |
| sulfate (2) | | | Salad_wt | | | |
| nonadecanoate | Yeast Cakes | −0.0177 | Potatoes | −0.01756 | 0.265878 | 3.96E−09 |
| (19:0) | and Cookies | | Boiled, | | | |
| | as Rogallach, | | Baked, | | | |
| | Croissant or | | Mashed, | | | |
| | Donut Freq | | Potatoes | | | |
| | | | Salad Freq | | | |
| gentisic acid- | Popsicle | −0.03124 | Cheese Cakes | −0.0283 | 0.265548 | 4.15E−09 |
| 5-glucoside | Without Dairy | | or Cream | | | |
| | Freq | | Cakes Freq | | | |
| X - 18606 | SF_Vegetable | 0.056105 | SF_Avocado_wt | 0.048188 | 0.26523 | 4.34E−09 |
| | Salad_wt | | | | | |
| hydroxy-N6,N6,N6- | Cooked | −0.04566 | SF_Tomatoes_wt | −0.03842 | 0.264635 | 4.71E−09 |
| trimethyllysine* | Cereal such as | | | | | |
| | Oatmeal | | | | | |
| | Porridge Freq | | | | | |
| 3-(3-hydroxy- | Mango Freq | −0.05152 | SF_Potatoes_wt | −0.04955 | 0.264207 | 5.00E−09 |
| phenyl)propionate | | | | | | |
| sulfate | | | | | | |
| cytosine | SF_Peanuts_wt | −0.03469 | SF_Rice | 0.032333 | 0.263535 | 5.48E−09 |
| | | | crackers_wt | | | |
| 2-hydroxynervonate* | Olives Freq | 0.043652 | Sugar | −0.03948 | 0.260982 | 7.77E−09 |
| | | | Sweetened | | | |
| | | | Chocolate | | | |
| | | | Milk Freq | | | |
| 1-(1-enyl-stearoyl)- | SF_Potatoes_wt | −0.0568 | Beef, Veal, | 0.056067 | 0.259863 | 9.05E−09 |
| 2-linoleoyl-GPE | | | Lamb, Pork, | | | |
| (P-18:0/18:2)* | | | Steak, Golash | | | |
| | | | Freq | | | |
| 1-palmitoyl-2- | SF_Smoked | 0.028026 | SF_Salmon_wt | 0.026445 | 0.259077 | 1.01E−08 |
| docosahexaenoyl-GPE | Salmon_wt | | | | | |
| (16:0/22:6)* | | | | | | |
| ADSGEGDFXAE | 5-9% White | 0.07299 | Artificial | 0.049585 | 0.259072 | 1.01E−08 |
| GGGVR* | Cheese, | | Sweeteners | | | |
| | Cottage Freq | | Freq | | | |
| 3-(3-hydroxyphenyl) | Regular Tea | −0.03674 | SF_Banana_wt | −0.03626 | 0.258787 | 1.05E−08 |
| propionate | Freq | | | | | |
| N-stearoyltaurine | SF_Carrots_wt | −0.03829 | SF_Butter_wt | 0.035164 | 0.258464 | 1.09E−08 |
| 4-vinylphenol | SF_Tahini_wt | 0.052734 | SF_Wine_wt | 0.035526 | 0.258277 | 1.12E−08 |
| sulfate | | | | | | |
| N-acetyltaurine | Yeast Cakes | 0.032979 | Beer Freq | 0.032928 | 0.258121 | 1.14E−08 |
| | and Cookies | | | | | |
| | as Rogallach, | | | | | |
| | Croissant or | | | | | |
| | Donut Freq | | | | | |
| X - 24293 | SF_Beer_wt | 0.070061 | SF_Water_wt | −0.01923 | 0.257891 | 1.18E−08 |
| tartronate | Fish (not | −0.03298 | SF_White | −0.02409 | 0.257375 | 1.27E−08 |
| (hydroxymalonate) | Tuna) Pickled, | | Cheese_wt | | | |
| | Dried, Smoked, | | | | | |
| | Canned Freq | | | | | |
| X - 22143 | SF_Vinaigrette_wt | −0.03471 | SF_WhiteWheat_g_wt | 0.034056 | 0.256825 | 1.36E−08 |
| pyrraline | SF_WhiteWheat_g_wt | 0.041669 | Garlic Freq | −0.03848 | 0.256457 | 1.43E−08 |
| 5-oxoproline | SF_Tomatoes_wt | −0.02449 | Granola or | 0.018581 | 0.256075 | 1.51E−08 |
| | | | Bernflaks | | | |
| | | | Freq | | | |
| margarate (17:0) | Olives Freq | 0.020651 | Butter Freq | 0.019122 | 0.255334 | 1.66E−08 |
| aconitate [cis | SF_WhiteWheat_g_wt | −0.04403 | SF_Lettuce_wt | −0.04111 | 0.254946 | 1.75E−08 |
| or trans] | | | | | | |
| 3,7-dimethylurate | Coffee Freq | 0.046929 | SF_Chocolate | 0.043673 | 0.253519 | 2.11E−08 |
| | | | wt | | | |
| 1-stearoyl-2- | SF_Salmon_wt | 0.032658 | SF_Onion_wt | −0.0273 | 0.252798 | 2.32E−08 |
| docosahexaenoyl-GPE | | | | | | |
| (18:0/22:6)* | | | | | | |
| X - 24801 | SF_WhiteWheat_g_wt | 0.039468 | SF_Vegetable | 0.035047 | 0.25267 | 2.36E−08 |
| | | | Salad_wt | | | |
| chiro-inositol | SF_Tomatoes_wt | 0.043455 | SF_Vegetable | 0.028689 | 0.251939 | 2.60E−08 |
| | | | Salad_wt | | | |
| trimethylamine | White or | −0.05219 | SF_Salmon_wt | 0.048754 | 0.251836 | 2.63E−08 |
| N-oxide | Brown Sugar | | | | | |
| | Freq | | | | | |
| 3-phenylpropionate | SF_Tahini_wt | 0.046797 | Coffee Freq | 0.035535 | 0.251731 | 2.67E−08 |
| (hydrocinnamate) | | | | | | |
| X - 12283 | Zucchini or | 0.05001 | SF_Kohlrabi_wt | 0.048317 | 0.251451 | 2.77E−08 |
| | Eggplant Freq | | | | | |
| X - 21410 | SF_Butter_wt | 0.102359 | SF_WholeWheat_g_wt | −0.09586 | 0.251284 | 2.83E−08 |
| vanillyl- | SF_Almonds_wt | 0.054517 | 5-9% White | 0.053657 | 0.250452 | 3.16E−08 |
| mandelate (VMA) | | | Cheese, | | | |
| | | | Cottage Freq | | | |
| N-acetylglycine | SF_Tomatoes_wt | −0.04563 | 5-9% Yellow | −0.04523 | 0.250257 | 3.24E−08 |
| | | | Cheese Freq | | | |
| X - 12812 | Apple Freq | 0.051147 | SF_Water_wt | 0.045874 | 0.250133 | 3.29E−08 |
| glycohyocholate | Regular Tea | −0.04174 | Cooked | 0.034447 | 0.24914 | 3.74E−08 |
| | Freq | | Legumes Freq | | | |
| palmitoyl | SF_Tahini_wt | 0.045093 | Lettuce Freq | 0.032665 | 0.248572 | 4.03E−08 |
| dihydrosphingo- | | | | | | |
| myelin | | | | | | |
| (d18:0/16:0)* | | | | | | |
| gamma-CEHC | Lemon Freq | −0.03876 | Simple | 0.033175 | 0.248418 | 4.11E−08 |
| | | | Cookies or | | | |
| | | | Biscuits Freq | | | |
| X - 12472 | Fried Fish | 0.051858 | SF_Yellow | 0.044072 | 0.247897 | 4.39E−08 |
| | Freq | | Cheese_wt | | | |
| 4-hydroxychloro- | Carrots, Fresh | 0.042961 | SF_Natural | 0.041852 | 0.247819 | 4.44E−08 |
| thalonil | or Cooked, | | Yogurt_wt | | | |
| | Carrot Juice | | | | | |
| | Freq | | | | | |
| 10-heptadecenoate | Butter Freq | 0.02122 | Apricot Fresh | 0.018248 | 0.247254 | 4.77E−08 |
| (17:1n7) | | | or Dry, or | | | |
| | | | Loquat Freq | | | |
| X - 23644 | Cooked | 0.033389 | SF_Tahini_wt | 0.031206 | 0.246648 | 5.16E−08 |
| | Legumes Freq | | | | | |
| X - 21821 | SF_Kohlrabi_wt | 0.035144 | Wholemeal or | 0.032936 | 0.246008 | 5.60E−08 |
| | | | Rye Bread | | | |
| | | | Freq | | | |
| X - 11444 | SF_Sugar Free | −0.04453 | Hummus | 0.04443 | 0.24496 | 6.40E−08 |
| | Gum_wt | | Salad Freq | | | |
| docosahexaenoyl- | Apricot Fresh | 0.036055 | Canned Tuna | 0.034324 | 0.244758 | 6.56E−08 |
| choline | or Dry, or | | or Tuna Salad | | | |
| | Loquat Freq | | Freq | | | |
| gamma-glutamyl- | Vegetable | −0.03889 | Hummus | 0.036507 | 0.244708 | 6.61E−08 |
| glutamine | Soup Freq | | Salad Freq | | | |
| valine | Cooked | −0.04865 | SF_Egg_wt | 0.04686 | 0.244693 | 6.62E−08 |
| | Cereal such as | | | | | |
| | Oatmeal | | | | | |
| | Porridge Freq | | | | | |
| X - 13723 | SF_Wholemeal | 0.034737 | Green Pepper | 0.030349 | 0.243279 | 7.92E−08 |
| | Bread_wt | | Freq | | | |
| indolepropionate | Beef, Veal, | −0.04225 | Beef or | −0.04146 | 0.242867 | 8.34E−08 |
| | Lamb, Pork, | | Chicken Soup | | | |
| | Steak, Golash | | Freq | | | |
| | Freq | | | | | |
| arabitol/xylitol | Mandarin or | 0.030668 | SF_WholeWheat_g_wt | 0.025042 | 0.24261 | 8.61E−08 |
| | Clementine | | | | | |
| | Freq | | | | | |
| carnitine | Green Tea | 0.044347 | SF_Sugar Free | −0.03366 | 0.241914 | 9.40E−08 |
| | Freq | | Gum_wt | | | |
| benzoylcarnitine* | Cooked | −0.05612 | SF_Banana_wt | −0.04617 | 0.24114 | 1.04E−07 |
| | Tomatoes, | | | | | |
| | Tomato | | | | | |
| | Sauce, | | | | | |
| | Tomato Soup | | | | | |
| | Freq | | | | | |
| X - 13729 | SF_Cucumber_wt | −0.05566 | 5-9% White | 0.054652 | 0.241117 | 1.04E−07 |
| | | | Cheese, | | | |
| | | | Cottage Freq | | | |
| X - 12739 | SF_Wholemeal | −0.0529 | Fried Fish | 0.049353 | 0.240909 | 1.07E−07 |
| | Bread_wt | | Freq | | | |
| 9-hydroxystearate | Hummus | −0.04738 | SF_Cucumber_wt | −0.04334 | 0.240733 | 1.09E−07 |
| | Salad Freq | | | | | |
| X - 21851 | SF_Peas_wt | 0.03663 | SF_Sugar_wt | 0.036351 | 0.239542 | 1.26E−07 |
| 13-methylmyristate | Butter Freq | 0.066217 | Sweet Dry | −0.05784 | 0.239418 | 1.28E−07 |
| | | | Wine, | | | |
| | | | Cocktails Freq | | | |
| 7-ethylguanine | SF_Apple_wt | −0.0402 | Beer Freq | 0.034817 | 0.238455 | 1.45E−07 |
| margaroylcarnitine* | Beef, Veal, | 0.038457 | SF_Heavy | 0.031674 | 0.238355 | 1.46E−07 |
| | Lamb, Pork, | | cream_wt | | | |
| | Steak, Golash | | | | | |
| | Freq | | | | | |
| docosapentaenoate | Mandarin or | 0.030573 | SF_Tahini_wt | −0.02998 | 0.238166 | 1.50E−07 |
| (n3 DPA; 22:5n3) | Clementine | | | | | |
| | Freq | | | | | |
| X - 24546 | SF_WholeWheat_g_wt | −0.06035 | Fries Freq | 0.0458 | 0.237124 | 1.70E−07 |
| X - 11787 | Fried Fish | 0.03232 | SF_Egg_wt | 0.028669 | 0.237089 | 1.71E−07 |
| | Freq | | | | | |
| X - 24527 | Fried Fish | 0.051738 | Schnitzel | −0.04649 | 0.236778 | 1.78E−07 |
| | Freq | | Turkey or | | | |
| | | | Chicken Freq | | | |
| 4-acetylphenol | SF_Cucumber_wt | 0.041261 | SF_Cereals_wt | 0.039656 | 0.235938 | 1.97E−07 |
| sulfate | | | | | | |
| sphingomyelin | Hummus | −0.03272 | Wholemeal or | 0.025919 | 0.235772 | 2.01E−07 |
| (d18:2/24:1, | Salad Freq | | Rye Bread | | | |
| d18:1/24:2)* | | | Freq | | | |
| cys-gly, oxidized | SF_Beef_wt | 0.029274 | SF_WhiteWheat_g_wt | 0.02397 | 0.235329 | 2.12E−07 |
| isoleucine | SF_Omelette_wt | 0.031634 | SF_Carrots_wt | −0.03141 | 0.23425 | 2.42E−07 |
| cysteinylglycine | SF_Beef_wt | 0.047552 | SF_WhiteWheat_g_wt | 0.045782 | 0.234121 | 2.46E−07 |
| disulfide* | | | | | | |
| 1-myristoyl-2- | Tahini Salad | −0.0497 | Wholemeal | 0.04605 | 0.234075 | 2.47E−07 |
| arachidonoyl-GPC | Freq | | Crackers Freq | | | |
| (14:0/20:4)* | | | | | | |
| 1-myristoyl- | SF_Coffee_wt | 0.052861 | Artificial | 0.051773 | 0.233586 | 2.62E−07 |
| glycerol (14:0) | | | Sweeteners | | | |
| | | | Freq | | | |
| alpha-ketoglutarate | SF_Omelette_wt | 0.035189 | SF_Cooked | −0.02958 | 0.233302 | 2.71E−07 |
| | | | beets_wt | | | |
| X - 24748 | Tahini Salad | 0.045675 | Sweet Dry | 0.03442 | 0.232703 | 2.92E−07 |
| | Freq | | Wine, | | | |
| | | | Cocktails Freq | | | |
| eicosanodioate | SF_Vegetable | 0.03333 | SF_Apple_wt | −0.03209 | 0.232681 | 2.92E−07 |
| | Salad_wt | | | | | |
| X - 24556 | Pita Freq | −0.05578 | SF_Beef_wt | 0.050743 | 0.232389 | 3.03E−07 |
| X - 23680 | SF_Tilapia_wt | −0.02589 | Cucumber | −0.02351 | 0.231176 | 3.50E−07 |
| | | | Freq | | | |
| acetylcarnitine | Nuts, | 0.042983 | Light Bread | −0.03972 | 0.231018 | 3.57E−07 |
| (C2) | almonds, | | Freq | | | |
| | pistachios | | | | | |
| | Freq | | | | | |
| hexanoylglutamine | SF_Cereals_wt | −0.03829 | 1% Milk Freq | −0.03708 | 0.230275 | 3.90E−07 |
| sphingomyelin | Pita Freq | −0.03438 | Rice Freq | −0.03337 | 0.229759 | 4.15E−07 |
| (d18:1/18:1, | | | | | | |
| d18:2/18:0) | | | | | | |
| sphingomyelin | 3% Milk Freq | 0.041461 | SF_Tomatoes_wt | −0.03591 | 0.229461 | 4.29E−07 |
| (d18:1/20:0, | | | | | | |
| d16:1/22:0)* | | | | | | |
| X - 23974 | White or | −0.04637 | SF_WholeWheat_g_wt | −0.03761 | 0.229335 | 4.36E−07 |
| | Brown Sugar | | | | | |
| | Freq | | | | | |
| X - 12212 | SF_Hummus | 0.063667 | SF_Tahini_wt | 0.047155 | 0.228975 | 4.55E−07 |
| | Salad_wt | | | | | |
| myristoleate | Butter Freq | 0.030639 | Artificial | 0.026067 | 0.228876 | 4.60E−07 |
| (14:1n5) | | | Sweeteners | | | |
| | | | Freq | | | |
| X - 13846 | SF_Wholemeal | 0.027088 | White or | −0.02225 | 0.22827 | 4.94E−07 |
| | Bread_wt | | Brown Sugar | | | |
| | | | Freq | | | |
| X - 21657 | SF_Water_wt | −0.0489 | Fried Fish | 0.04514 | 0.227519 | 5.40E−07 |
| | | | Freq | | | |
| X - 24352 | Cooked | 0.034955 | SF_Wine_wt | 0.024234 | 0.227239 | 5.58E−07 |
| | Legumes Freq | | | | | |
| beta- | SF_Cottage | −0.03389 | SF_Cooked | −0.02842 | 0.226628 | 6.00E−07 |
| citrylglutamate | cheese_wt | | beets_wt | | | |
| gluconate | SF_Hummus | −0.03687 | Wholemeal or | 0.03011 | 0.225883 | 6.54E−07 |
| | Salad_wt | | Rye Bread | | | |
| | | | Freq | | | |
| lignoceroyl- | SF_Olive | 0.035509 | SF_Chicken | −0.03551 | 0.225696 | 6.69E−07 |
| carnitine (C24)* | oil_wt | | breast_wt | | | |
| X - 24831 | SF_Burekas_wt | 0.024968 | Wholemeal or | −0.02427 | 0.225544 | 6.81E−07 |
| | | | Rye Bread | | | |
| | | | Freq | | | |
| Fibrinopeptide | Salty Snacks | −0.02003 | Lettuce Freq | 0.017207 | 0.224888 | 7.35E−07 |
| A (2-15)** | Freq | | | | | |
| gamma-glutamyl- | SF_WhiteWheat_g_wt | 0.029247 | White or | −0.02917 | 0.224408 | 7.77E−07 |
| isoleucine* | | | Brown Sugar | | | |
| | | | Freq | | | |
| X - 12846 | SF_Onion_wt | 0.049906 | SF_Pita_wt | 0.048261 | 0.223263 | 8.87E−07 |
| S-allylcysteine | SF_Pita_wt | 0.042506 | SF_Onion_wt | 0.042127 | 0.223104 | 9.03E−07 |
| tartarate | SF_Wine_wt | 0.043476 | SF_Coffee_wt | 0.029139 | 0.222895 | 9.25E−07 |
| ceramide | SF_Coffee_wt | 0.042692 | Coated or | −0.03819 | 0.222682 | 9.48E−07 |
| (d18:2/24:1, | | | Stuffed | | | |
| d18:1/24:2)* | | | Cookies, | | | |
| | | | Waffles or | | | |
| | | | Biscuits Freq | | | |
| X - 12714 | SF_Bread_wt | −0.05319 | Peach, | 0.030081 | 0.222567 | 9.61E−07 |
| | | | Nectarine, | | | |
| | | | Plum Freq | | | |
| 1-stearoyl-2- | SF_Wholemeal | 0.023354 | SF_Meatballs_wt | −0.02324 | 0.222212 | 1.00E−06 |
| linoleoyl-GPI | Light | | | | | |
| (18:0/18:2) | Bread_wt | | | | | |
| 1-linoleoyl- | 5-9% Yellow | −0.03418 | Light Bread | −0.0282 | 0.222057 | 1.02E−06 |
| GPC (18:2) | Cheese Freq | | Freq | | | |
| gamma-glutamyl- | 5-9% Yellow | 0.031077 | SF_Fried | −0.02981 | 0.221981 | 1.03E−06 |
| tyrosine | Cheese Freq | | eggplant_wt | | | |
| N-acetyl- | SF_Tahini_wt | 0.020461 | SF_WholeWheat_g_wt | −0.0182 | 0.221341 | 1.11E−06 |
| isoputreanine* | | | | | | |
| hexanoyl- | 1% Milk Freq | −0.03642 | SF_Wine_wt | 0.027807 | 0.21931 | 1.39E−06 |
| carnitine (C6) | | | | | | |
| X - 16944 | Egg, Hard | −0.03398 | SF_WhiteWheat_g_wt | 0.032391 | 0.2191 | 1.43E−06 |
| | Boiled or Soft | | | | | |
| | Freq | | | | | |
| sucrose | SF_Milk_wt | −0.03044 | SF_Whipped | −0.02593 | 0.218142 | 1.59E−06 |
| | | | cream_wt | | | |
| formimino- | SF_Egg_wt | 0.036909 | 5-9% Yellow | 0.03563 | 0.217446 | 1.72E−06 |
| glutamate | | | Cheese Freq | | | |
| arachidoyl- | SF_Egg_wt | 0.068078 | SF_Vegetable | 0.064361 | 0.217162 | 1.77E−06 |
| carnitine (C20)* | | | Salad_wt | | | |
| ximenoyl-carnitine | Roll or | −0.02959 | Coffee Freq | 0.026603 | 0.216738 | 1.86E−06 |
| (C26:1)* | Bageles Freq | | | | | |
| hydroquinone | White or | −0.03713 | Wholemeal or | 0.026508 | 0.216453 | 1.92E−06 |
| sulfate | Brown Sugar | | Rye Bread | | | |
| | Freq | | Freq | | | |
| caprylate (8:0) | SF_Butter_wt | 0.057074 | SF_Chocolate_wt | 0.042709 | 0.216 | 2.02E−06 |
| 3-methylcytidine | SF_Dark | −0.06036 | SF_Tahini_wt | −0.04877 | 0.215928 | 2.04E−06 |
| | Chocolate_wt | | | | | |
| riboflavin | 0-1.5% | 0.046853 | Orange or | 0.045733 | 0.215777 | 2.07E−06 |
| (Vitamin B2) | Natural | | Grapefruit | | | |
| | Yogurt Freq | | Freq | | | |
| X - 14662 | SF_Water_wt | −0.05161 | Vegetable | −0.04097 | 0.215721 | 2.08E−06 |
| | | | Soup Freq | | | |
| Fibrinopeptide | 3% Milk Freq | 0.010231 | SF_Cottage | 0.005469 | 0.215719 | 2.08E−06 |
| A(5-16)* | | | cheese_wt | | | |
| X - 17335 | Olives Freq | 0.055813 | SF_Tahini_wt | 0.052579 | 0.215692 | 2.09E−06 |
| 3-hydroxy-3- | White or | −0.0366 | Mayonnaise | −0.03014 | 0.214105 | 2.49E−06 |
| methylglutarate | Brown Sugar | | Including | | | |
| | Freq | | Light Freq | | | |
| N-palmitoyl- | Artificial | 0.073831 | Pear Fresh, | −0.06499 | 0.213887 | 2.55E−06 |
| heptadeca- | Sweeteners | | Cooked or | | | |
| sphingosine | Freq | | Canned Freq | | | |
| (d17:1/16:0)* | | | | | | |
| methyl-4- | SF_Omelette_wt | −0.0289 | SF_Coffee_wt | 0.027893 | 0.21387 | 2.56E−06 |
| hydroxybenzoate | | | | | | |
| sulfate | | | | | | |
| N-acetyl- | SF_Olive | −0.03452 | SF_WhiteWheat_g_wt | 0.031265 | 0.213562 | 2.65E−06 |
| cadaverine | oil_wt | | | | | |
| kynurenine | SF_Vegetable | 0.034849 | Apple Freq | 0.03172 | 0.212924 | 2.84E−06 |
| | Salad_wt | | | | | |
| 5alpha-androstan- | SF_WhiteWheat_g_wt | 0.044035 | SF_Coffee_wt | −0.04269 | 0.212505 | 2.97E−06 |
| 3alpha,17beta-diol | | | | | | |
| monosulfate (1) | | | | | | |
| X - 21807 | SF_Tea_wt | 0.045968 | SF_WhiteWheat_g_wt | −0.04431 | 0.211198 | 3.43E−06 |
| X - 16946 | Yeast Cakes | 0.041822 | Mandarin or | −0.0417 | 0.210387 | 3.74E−06 |
| | and Cookies | | Clementine | | | |
| | as Rogallach, | | Freq | | | |
| | Croissant or | | | | | |
| | Donut Freq | | | | | |
| X - 11485 | Red Pepper | 0.052431 | Light Bread | −0.05116 | 0.210384 | 3.75E−06 |
| | Freq | | Freq | | | |
| methionine | Avocado Freq | 0.037449 | Pasta or | −0.03732 | 0.210184 | 3.83E−06 |
| sulfone | | | Flakes Freq | | | |
| 3-methoxycatechol | SF_Soymilk_wt | 0.015205 | SF_Hummus | 0.011009 | 0.209983 | 3.91E−06 |
| sulfate (1) | | | Salad_wt | | | |
| N1-methyladenosine | Olives Freq | 0.033459 | Cooked | −0.02976 | 0.209787 | 4.00E−06 |
| | | | Legumes Freq | | | |
| andro steroid | SF_Rice | −0.05382 | Tahini Salad | −0.05136 | 0.209095 | 4.31E−06 |
| monosulfate | crackers_wt | | Freq | | | |
| C19H28O6S (1)* | | | | | | |
| X - 12712 | SF_Wholemeal | 0.012731 | SF_Potatoes_wt | 0.012558 | 0.208113 | 4.79E−06 |
| | Bread_wt | | | | | |
| X - 21470 | Fries Freq | 0.035121 | 5-9% White | −0.03463 | 0.208048 | 4.82E−06 |
| | | | Cheese, | | | |
| | | | Cottage Freq | | | |
| 1-oleoyl-2- | SF_Diet | −0.03429 | Butter Freq | −0.03057 | 0.208 | 4.84E−06 |
| docosahexaenoyl- | Coke_wt | | | | | |
| GPE (18:1/22:6)* | | | | | | |
| gamma-CEHC | SF_Roll_wt | 0.030995 | Simple | 0.024969 | 0.207064 | 5.36E−06 |
| glucuronide* | | | Cookies or | | | |
| | | | Biscuits Freq | | | |
| glycocholate | SF_Olive | 0.031883 | Sausages Freq | −0.03058 | 0.207005 | 5.39E−06 |
| | oil_wt | | | | | |
| carboxyethyl-GABA | SF_Date | −0.0288 | Sausages Freq | −0.02853 | 0.206737 | 5.55E−06 |
| | honey_wt | | | | | |
| N2,N2-dimethyl- | Couscous, | −0.05847 | Falafel in Pita | 0.051005 | 0.206381 | 5.76E−06 |
| guanosine | Burgul, | | Bread Freq | | | |
| | Mamaliga, | | | | | |
| | Groats Freq | | | | | |
| X - 21310 | SF_Canned | −0.03237 | 3% Milk Freq | 0.029754 | 0.206366 | 5.77E−06 |
| | Tuna Fish_wt | | | | | |
| glycocheno- | Coffee Freq | −0.04221 | SF_Schnitzel_wt | −0.02378 | 0.206165 | 5.89E−06 |
| deoxycholate | | | | | | |
| sulfate | | | | | | |
| N-acetyl-2- | White or | −0.02893 | SF_Cereals_wt | −0.0287 | 0.204614 | 6.95E−06 |
| aminooctanoate* | Brown Sugar | | | | | |
| | Freq | | | | | |
| X - 24410 | SF_Olives_wt | 0.034043 | Internal | 0.030694 | 0.20429 | 7.19E−06 |
| | | | Organs Freq | | | |
| 1-linoleoyl-2- | Couscous, | 0.027012 | Chicken or | −0.02318 | 0.204266 | 7.21E−06 |
| linolenoyl-GPC | Burgul, | | Turkey | | | |
| (18:2/18:3)* | Mamaliga, | | Without Skin | | | |
| | Groats Freq | | Freq | | | |
| glycerophospho- | Roll or | −0.03703 | SF_Wholemeal | −0.0367 | 0.204048 | 7.37E−06 |
| ethanolamine | Bageles Freq | | Bread_wt | | | |
| X - 21792 | SF_Hummus | −0.05434 | Olives Freq | 0.046019 | 0.203958 | 7.44E−06 |
| | Salad_wt | | | | | |
| 5-hydroxymethyl- | 5-9% Yellow | 0.034617 | SF_Carrots_wt | −0.03409 | 0.203854 | 7.52E−06 |
| 2-furoic acid | Cheese Freq | | | | | |
| pipecolate | SF_Brown | 0.035863 | SF_Tomatoes_wt | 0.032794 | 0.203201 | 8.06E−06 |
| | Rice_wt | | | | | |
| linoleoyl- | SF_Vegetable | 0.019081 | Cooked | 0.016292 | 0.203137 | 8.11E−06 |
| linoleoyl-glycerol | Salad_wt | | Legumes Freq | | | |
| (18:2/18:2) [1]* | | | | | | |
| 3-hydroxy-2- | SF_Beef_wt | 0.039663 | SF_Wine_wt | 0.036226 | 0.202718 | 8.48E−06 |
| ethylpropionate | | | | | | |
| 6-hydroxyindole | SF_Tomatoes_wt | −0.04018 | SF_Natural | 0.032374 | 0.20208 | 9.06E−06 |
| sulfate | | | Yogurt_wt | | | |
| ectoine | Sausages Freq | 0.035185 | SF_Potatoes_wt | 0.030595 | 0.201936 | 9.20E−06 |
| 3-methyladipate | SF_Tahini_wt | −0.0571 | SF_Coffee_wt | 0.04709 | 0.201769 | 9.36E−06 |
| 3-hydroxyiso- | White or | −0.04669 | Mandarin or | 0.04492 | 0.201677 | 9.45E−06 |
| butyrate | Brown Sugar | | Clementine | | | |
| | Freq | | Freq | | | |
| 1-palmitoyl- | SF_Rice | 0.034712 | SF_Chocolate_wt | 0.03144 | 0.201646 | 9.48E−06 |
| GPE (16:0) | crackers_wt | | | | | |
| 1-palmitoyl-2- | Lettuce Freq | 0.026417 | Tahini Salad | −0.0251 | 0.201385 | 9.74E−06 |
| oleoyl-GPC | | | Freq | | | |
| (16:0/18:1) | | | | | | |
| laurate (12:0) | Regular Sodas | −0.03317 | SF_Chocolate_wt | 0.031227 | 0.201362 | 9.76E−06 |
| | with Sugar | | | | | |
| | Freq | | | | | |
| X - 21441 | SF_Apple_wt | −0.0393 | SF_Red | 0.038817 | 0.201256 | 9.87E−06 |
| | | | pepper_wt | | | |
| X - 15674 | SF_Potatoes_wt | −0.05877 | Artificial | 0.057227 | 0.201037 | 1.01E−05 |
| | | | Sweeteners | | | |
| | | | Freq | | | |
| X - 21258 | Dried Fruits | 0.023898 | SF_Lettuce_wt | 0.020678 | 0.20092 | 1.02E−05 |
| | Freq | | | | | |
| sulfate* | SF_Hummus | −0.02733 | SF_Tahini_wt | −0.02677 | 0.199886 | 1.14E−05 |
| | Salad_wt | | | | | |
| docosahexaenoyl- | SF_Schnitzel_wt | −0.03707 | Canned Tuna | 0.03318 | 0.199601 | 1.17E−05 |
| carnitine | | | or Tuna Salad | | | |
| (C22:6)* | | | Freq | | | |
| fumarate | Granola or | 0.028395 | >=16% Yellow | 0.018041 | 0.199402 | 1.20E−05 |
| | Bernflaks | | Cheese Freq | | | |
| | Freq | | | | | |
| propionylglycine | SF_Rice_wt | −0.03042 | Herbal Tea | 0.026809 | 0.199252 | 1.21E−05 |
| | | | Freq | | | |
| 1-ribosyl- | SF_Cooked | 0.025185 | SF_Vegetable | 0.025109 | 0.198938 | 1.25E−05 |
| imidazoleacetate* | cauliflower_wt | | Salad_wt | | | |
| 16a-hydroxy | Tahini Salad | −0.04126 | 5-9% White | −0.03793 | 0.198708 | 1.28E−05 |
| DHEA 3-sulfate | Freq | | Cheese, | | | |
| | | | Cottage Freq | | | |
| androstenediol | SF_Tahini_wt | −0.03316 | Fries Freq | 0.033153 | 0.198299 | 1.34E−05 |
| (3beta,17beta) | | | | | | |
| disulfate (1) | | | | | | |
| pantothenate | White or | −0.03044 | Lettuce Freq | 0.026934 | 0.198254 | 1.34E−05 |
| | Brown Sugar | | | | | |
| | Freq | | | | | |
| X - 15461 | SF_Cooked | −0.02838 | Schnitzel | 0.02601 | 0.198187 | 1.35E−05 |
| | Sweet | | Turkey or | | | |
| | potato_wt | | Chicken Freq | | | |
| linoleoylcholine* | Sugar | 0.03653 | Sweet Potato | 0.03109 | 0.197571 | 1.44E−05 |
| | Sweetened | | Freq | | | |
| | Chocolate | | | | | |
| | Milk Freq | | | | | |
| 1-linoleoyl- | SF_Rice | 0.03124 | SF_Coffee_wt | 0.028794 | 0.197503 | 1.45E−05 |
| GPE (18:2)* | crackers_wt | | | | | |
| nisinate | SF_Sushi_wt | 0.061065 | Fish Cooked, | 0.045237 | 0.197461 | 1.46E−05 |
| (24:6n3) | | | Baked or | | | |
| | | | Grilled Freq | | | |
| arachidate | SF_Raisins_wt | 0.037987 | SF_WhiteWheat_g_wt | −0.02837 | 0.197399 | 1.47E−05 |
| (20:0) | | | | | | |
| octadecenedioate | SF_Onion_wt | −0.03005 | SF_Wholemeal | 0.024611 | 0.196535 | 1.60E−05 |
| (C18:1-DC)* | | | Bread_wt | | | |
| 1,2-dilinoleoyl-GPE | SF_Tahini_wt | 0.043381 | SF_Banana_wt | −0.03691 | 0.19616 | 1.66E−05 |
| (18:2/18:2)* | | | | | | |
| acisoga | 1% Milk Freq | −0.02684 | Fries Freq | 0.023845 | 0.19604 | 1.68E−05 |
| propionylcarnitine | SF_WhiteWheat_g_wt | 0.043198 | Processed | −0.04207 | 0.195829 | 1.72E−05 |
| (C3) | | | Meat Free | | | |
| | | | Products Freq | | | |
| 1-linoleoyl-GPG | SF_Milk_wt | −0.03395 | Cooked | 0.033922 | 0.194581 | 1.95E−05 |
| (18:2)* | | | Legumes Freq | | | |
| X - 12263 | SF_Wholemeal | 0.043779 | Green Pepper | 0.04186 | 0.194366 | 1.99E−05 |
| | Bread_wt | | Freq | | | |
| X - 13553 | Cooked | −0.03527 | SF_Tomatoes_wt | −0.03475 | 0.194158 | 2.03E−05 |
| | Tomatoes, | | | | | |
| | Tomato | | | | | |
| | Sauce, | | | | | |
| | Tomato Soup | | | | | |
| | Freq | | | | | |
| 5-hydroxyindole | Apple Freq | 0.03995 | SF_Apple_wt | 0.03013 | 0.193696 | 2.13E−05 |
| acetate | | | | | | |
| X - 21295 | SF_WhiteWheat_g_wt | 0.038392 | Canned Tuna | 0.030332 | 0.1934 | 2.19E−05 |
| | | | or Tuna Salad | | | |
| | | | Freq | | | |
| Fibrinopeptide | SF_Meatballs_wt | 0.003791 | Processed | −0.00339 | 0.192825 | 2.32E−05 |
| A (3-16)** | | | Meat Free | | | |
| | | | Products Freq | | | |
| N-palmitoyl- | Coffee Freq | 0.030033 | Artificial | 0.02767 | 0.192811 | 2.33E−05 |
| sphingosine | | | Sweeteners | | | |
| (d18:1/16:0) | | | Freq | | | |
| X - 17677 | SF_Chicken | 0.04053 | Granola or | 0.029364 | 0.192639 | 2.37E−05 |
| | soup_wt | | Bernflaks | | | |
| | | | Freq | | | |
| 3-hydroxyhexanoate | Butter Freq | 0.035739 | SF_Yellow | 0.031216 | 0.191465 | 2.66E−05 |
| | | | Cheese_wt | | | |
| sphingomyelin | SF_Chocolate | −0.03649 | SF_Tahini_wt | −0.03128 | 0.190812 | 2.84E−05 |
| (d18:1/24:1, | spread_wt | | | | | |
| d18:2/24:0)* | | | | | | |
| 1-carboxyethyl- | Tahini Salad | −0.02825 | SF_White | 0.022235 | 0.190617 | 2.89E−05 |
| phenylalanine | Freq | | Cheese_wt | | | |
| 3-hydroxy- | SF_WhiteWheat_g_wt | −0.02869 | SF_WholeWheat_g_wt | −0.02762 | 0.190569 | 2.91E−05 |
| butyrate (BHBA) | | | | | | |
| X - 15469 | Artificial | −0.01778 | SF_Wine_wt | 0.014844 | 0.189997 | 3.07E−05 |
| | Sweeteners | | | | | |
| | Freq | | | | | |
| leucylglycine | 5-9% White | −0.03481 | Pastrami or | −0.02909 | 0.189282 | 3.30E−05 |
| | Cheese, | | Smoked Turkey | | | |
| | Cottage Freq | | Breast Freq | | | |
| X - 23587 | SF_Onion_wt | −0.03805 | SF_Milk_wt | −0.03623 | 0.189237 | 3.31E−05 |
| gamma-glutamyl- | SF_Tomatoes_wt | −0.01742 | 5-9% Yellow | 0.015729 | 0.188976 | 3.40E−05 |
| phenylalanine | | | Cheese Freq | | | |
| sphingomyelin | Fish Cooked, | 0.049286 | Hummus | −0.04367 | 0.188841 | 3.44E−05 |
| (d18:1/22:1, | Baked or | | Salad Freq | | | |
| d18:2/22:0, | Grilled Freq | | | | | |
| d16:1/24:1)* | | | | | | |
| X - 24849 | SF_Potatoes_wt | 0.030353 | SF_Tomatoes_wt | 0.029985 | 0.18881 | 3.45E−05 |
| 1-stearoyl-2- | Onion Freq | 0.020547 | Beef, Veal, | −0.01732 | 0.188755 | 3.47E−05 |
| arachidonoyl-GPE | | | Lamb, Pork, | | | |
| (18:0/20:4) | | | Steak, Golash | | | |
| | | | Freq | | | |
| 17alpha-hydroxy- | Fries Freq | 0.053104 | Sugar | 0.050486 | 0.188227 | 3.65E−05 |
| pregnenolone | | | Sweetened | | | |
| 3-sulfate | | | Chocolate | | | |
| | | | Milk Freq | | | |
| myo-inositol | Orange or | 0.033163 | SF_Hummus | −0.02811 | 0.188037 | 3.72E−05 |
| | Grapefruit | | Salad_wt | | | |
| | Freq | | | | | |
| 17alpha-hydroxy- | SF_White | −0.06329 | Fresh | −0.05937 | 0.187966 | 3.75E−05 |
| pregnanolone | Cheese_wt | | Vegetable | | | |
| glucuronide | | | Salad Without | | | |
| | | | Dressing or | | | |
| | | | Oil Freq | | | |
| arachidonoyl- | Cauliflower or | −0.02408 | SF_Burekas_wt | −0.01572 | 0.187792 | 3.81E−05 |
| carnitine | Broccoli Freq | | | | | |
| (C20:4) | | | | | | |
| stearidonate | White or | −0.03285 | Simple | −0.03197 | 0.187772 | 3.82E−05 |
| (18:4n3) | Brown Sugar | | Cookies or | | | |
| | Freq | | Biscuits Freq | | | |
| gamma-glutamyl- | >=16% Yellow | 0.029051 | Beef or | 0.027522 | 0.187561 | 3.90E−05 |
| alpha-lysine | Cheese Freq | | Chicken Soup | | | |
| | | | Freq | | | |
| 3-indoxyl sulfate | SF_Tomatoes_wt | −0.03727 | 3% Milk Freq | 0.035598 | 0.187501 | 3.92E−05 |
| 1-stearoyl-2- | SF_Onion_wt | −0.02766 | SF_Rice | 0.024402 | 0.187394 | 3.96E−05 |
| linoleoyl-GPC | | | crackers_wt | | | |
| (18:0/18:2)* | | | | | | |
| X - 17327 | 5-9% White | 0.045741 | Falafel in Pita | 0.045124 | 0.187095 | 4.07E−05 |
| | Cheese, | | Bread Freq | | | |
| | Cottage Freq | | | | | |
| 1-stearoyl-2- | SF_Chicken | −0.02485 | SF_Peach_wt | 0.024598 | 0.187092 | 4.08E−05 |
| oleoyl-GPC | breast_wt | | | | | |
| (18:0/18:1) | | | | | | |
| 1-stearoyl-GPC | SF_Meatballs_wt | −0.01497 | SF_Chocolate_wt | 0.013615 | 0.185969 | 4.54E−05 |
| (18:0) | | | | | | |
| X - 23593 | Parsley, | 0.02961 | Potatoes | −0.0296 | 0.18592 | 4.56E−05 |
| | Celery, | | Boiled, | | | |
| | Fennel, Dill, | | Baked, | | | |
| | Cilantro, | | Mashed, | | | |
| | Green Onion | | Potatoes | | | |
| | Freq | | Salad Freq | | | |
| 1-linoleoyl-GPI | Vegetable | 0.028036 | Sweet Potato | 0.024532 | 0.185749 | 4.64E−05 |
| (18:2)* | Soup Freq | | Freq | | | |
| linolenate | Juice Freq | −0.01804 | 1% Milk Freq | −0.0058 | 0.185322 | 4.83E−05 |
| [alpha or gamma; | | | | | | |
| (18:3n3 or 6)] | | | | | | |
| glucuronate | Coffee Freq | 0.041991 | White or | −0.04054 | 0.185166 | 4.90E−05 |
| | | | Brown Sugar | | | |
| | | | Freq | | | |
| cerotoylcarnitine | Roll or | −0.04024 | SF_Carrots_wt | −0.03469 | 0.184952 | 5.01E−05 |
| (C26)* | Bageles Freq | | | | | |
| alpha-tocopherol | Roll or | −0.03205 | White or | −0.01876 | 0.184772 | 5.09E−05 |
| | Bageles Freq | | Brown Sugar | | | |
| | | | Freq | | | |
| cystine | SF_Wholemeal | 0.034485 | SF_Potatoes_wt | 0.031358 | 0.184703 | 5.13E−05 |
| | Bread_wt | | | | | |
| vanillic alcohol | SF_Coffee_wt | 0.035805 | SF_Soymilk_wt | 0.029788 | 0.184282 | 5.34E−05 |
| sulfate | | | | | | |
| palmitoleate | SF_Tahini_wt | −0.01717 | SF_Red | 0.015473 | 0.18346 | 5.77E−05 |
| (16:1n7) | | | pepper_wt | | | |
| o-cresol sulfate | Regular Tea | −0.02633 | Butter Freq | 0.023206 | 0.182833 | 6.12E−05 |
| | Freq | | | | | |
| 1-palmitoyl-2- | Onion Freq | 0.041663 | Apple Freq | −0.04109 | 0.1823 | 6.44E−05 |
| arachidonoyl-GPC | | | | | | |
| (16:0/20:4n6) | | | | | | |
| methylsuccinoyl- | Peach, | 0.042892 | SF_Vegetable | 0.040529 | 0.18002 | 7.97E−05 |
| carnitine (1) | Nectarine, | | Salad_wt | | | |
| | Plum Freq | | | | | |
| X - 24972 | SF_Boiled | −0.02669 | Avocado Freq | −0.0243 | 0.179942 | 8.03E−05 |
| | corn_wt | | | | | |
| X - 23666 | Shish Kebab | 0.026392 | SF_Beef_wt | 0.021242 | 0.179797 | 8.13E−05 |
| | in Pita Bread | | | | | |
| | Freq | | | | | |
| decanoylcarnitine | Cornflakes | −0.02509 | Artificial | −0.02091 | 0.178951 | 8.80E−05 |
| (C10) | Freq | | Sweeteners | | | |
| | | | Freq | | | |
| X - 21353 | Tahini Salad | 0.040996 | Hummus | 0.032797 | 0.177955 | 9.64E−05 |
| | Freq | | Salad Freq | | | |
| etiocholanolone | SF_Wine_wt | 0.032826 | Artificial | −0.03212 | 0.177909 | 9.68E−05 |
| glucuronide | | | Sweeteners | | | |
| | | | Freq | | | |
| X - 17353 | SF_Lentils_wt | 0.016303 | SF_Falafel_wt | 0.015272 | 0.177635 | 9.93E−05 |
| X - 24329 | SF_WhiteWheat_g_wt | 0.022406 | Couscous, | −0.02069 | 0.177373 | 0.000102 |
| | | | Burgul, | | | |
| | | | Mamaliga, | | | |
| | | | Groats Freq | | | |
| 2-arachidonoyl- | Fresh | −0.04959 | Green Tea | −0.04484 | 0.177237 | 0.000103 |
| glycerol (20:4) | Vegetable | | Freq | | | |
| | Salad With | | | | | |
| | Dressing or | | | | | |
| | Oil Freq | | | | | |
| sarcosine | SF_Apple_wt | 0.036839 | SF_Vegetable | 0.036783 | 0.176765 | 0.000108 |
| | | | Salad_wt | | | |
| alpha-ketobutyrate | SF_Orange_wt | −0.03408 | SF_Cooked | −0.03106 | 0.176716 | 0.000108 |
| | | | Sweet | | | |
| | | | potato_wt | | | |
| citrate | SF_WhiteWheat_g_wt | −0.04212 | Schnitzel | −0.03685 | 0.176704 | 0.000108 |
| | | | Turkey or | | | |
| | | | Chicken Freq | | | |
| pregnenolone | Lettuce Freq | −0.0326 | SF_Pita_wt | 0.028233 | 0.17657 | 0.000109 |
| sulfate | | | | | | |
| eicosenoate | Regular Sodas | −0.02684 | Jachnun, | −0.01683 | 0.176179 | 0.000113 |
| (20:1) | with Sugar | | Mlawah, | | | |
| | Freq | | Kubana, | | | |
| | | | Cigars Freq | | | |
| 5alpha-androstan- | SF_Tahini_wt | −0.03626 | SF_Beef_wt | 0.033247 | 0.175586 | 0.00012 |
| 3beta,17beta-diol | | | | | | |
| monosulfate (2) | | | | | | |
| hypotaurine | SF_Cookies_wt | 0.028012 | 3% Milk Freq | −0.0267 | 0.175581 | 0.00012 |
| tauro-beta- | Peas, Green | 0.042853 | SF_Beef_wt | −0.0424 | 0.17546 | 0.000121 |
| muricholate | Beans or Okra | | | | | |
| | Cooked Freq | | | | | |
| eicosapentaenoyl- | SF_Dark | 0.051286 | Salty Cheese, | 0.040596 | 0.17522 | 0.000124 |
| choline | Chocolate_wt | | Tzfatit, | | | |
| | | | Bulgarian, | | | |
| | | | Brinza, Thick | | | |
| | | | Slice Freq | | | |
| 1-oleoyl-GPE | SF_Olive | 0.023964 | SF_Rice | 0.023958 | 0.174709 | 0.00013 |
| (18:1) | oil_wt | | crackers_wt | | | |
| 1-palmitoyl-2- | SF_Rice | 0.030801 | SF_Onion_wt | −0.02794 | 0.174458 | 0.000133 |
| arachidonoyl-GPE | crackers_wt | | | | | |
| (16:0/20:4)* | | | | | | |
| androsterone | SF_Pita_wt | 0.021753 | Lemon Freq | −0.02021 | 0.173636 | 0.000143 |
| sulfate | | | | | | |
| 2-acetamidophenol | SF_Natural | 0.05103 | Brussels | −0.03924 | 0.172249 | 0.000162 |
| sulfate | Yogurt_wt | | Sprouts, | | | |
| | | | Green or Red | | | |
| | | | Cabbage Freq | | | |
| X - 01911 | Sausages Freq | 0.04778 | Onion Freq | 0.046101 | 0.172198 | 0.000162 |
| nicotinamide | Pasta or | 0.022404 | SF_Cappuccino_wt | −0.02196 | 0.172061 | 0.000164 |
| | Flakes Freq | | | | | |
| X - 11522 | SF_Tomatoes_wt | −0.02166 | SF_Potatoes_wt | 0.020857 | 0.171532 | 0.000172 |
| X - 12753 | SF_Coleslaw_wt | 0.018072 | SF_Majadra_wt | 0.013166 | 0.171179 | 0.000178 |
| N-palmitoyl- | SF_Sugar Free | −0.05475 | SF_Carrots_wt | −0.04871 | 0.170927 | 0.000182 |
| sphinganine | Gum_wt | | | | | |
| (d18:0/16:0) | | | | | | |
| X - 12844 | SF_Parsley_wt | −0.03563 | SF_Hummus | 0.031822 | 0.170888 | 0.000182 |
| | | | Salad_wt | | | |
| X - 12410 | SF_Beet_wt | 0.026455 | SF_Coffee_wt | 0.023122 | 0.170403 | 0.00019 |
| erucate | Fish Cooked, | 0.027024 | SF_Butter_wt | 0.022244 | 0.169009 | 0.000215 |
| (22:1n9) | Baked or | | | | | |
| | Grilled Freq | | | | | |
| X - 16964 | SF_Tea_wt | −0.05898 | SF_White | −0.05305 | 0.168603 | 0.000223 |
| | | | Cheese_wt | | | |
| palmitoyl- | Couscous, | −0.03679 | Fried Fish | 0.033518 | 0.167495 | 0.000246 |
| carnitine (C16) | Burgul, | | Freq | | | |
| | Mamaliga, | | | | | |
| | Groats Freq | | | | | |
| glyco-beta- | Mayonnaise | −0.04312 | Artificial | −0.03835 | 0.167404 | 0.000248 |
| muricholate** | Including | | Sweeteners | | | |
| | Light Freq | | Freq | | | |
| X - 21628 | SF_Coke_wt | −0.01938 | Fries Freq | −0.01753 | 0.167041 | 0.000255 |
| gamma- | Cooked | 0.026177 | Cooked | 0.025754 | 0.166456 | 0.000269 |
| glutamylglycine | Vegetable | | Legumes Freq | | | |
| | Salads Freq | | | | | |
| kynurenate | SF_Omelette_wt | 0.033652 | Apple Freq | 0.033305 | 0.166433 | 0.000269 |
| proline | SF_Sugar Free | −0.03186 | Carrots, Fresh | −0.02655 | 0.166004 | 0.000279 |
| | Gum_wt | | or Cooked, | | | |
| | | | Carrot Juice | | | |
| | | | Freq | | | |
| X - 21285 | SF_Beer_wt | 0.044204 | Fries Freq | 0.036011 | 0.165774 | 0.000285 |
| 3-hydroxyoctanoate | SF_Tomatoes_wt | −0.03953 | SF_Carrots_wt | −0.03756 | 0.165517 | 0.000291 |
| N6,N6,N6- | SF_Yellow | −0.02767 | Chicken or | 0.022466 | 0.16522 | 0.000299 |
| trimethyllysine | Cheese_wt | | Turkey With | | | |
| | | | Skin Freq | | | |
| phenylacetate | SF_Apple_wt | 0.039486 | SF_Potatoes_wt | −0.03667 | 0.165022 | 0.000304 |
| glutamine | 0.5-3% White | −0.02333 | 1% Milk Freq | −0.02017 | 0.164013 | 0.000331 |
| | Cheese, | | | | | |
| | Cottage Freq | | | | | |
| homocitrulline | SF_Ice | 0.037791 | SF_Cereals_wt | 0.035405 | 0.163593 | 0.000343 |
| | cream_wt | | | | | |
| X - 21659 | SF_Avocado_wt | 0.054468 | SF_Pickled | 0.053846 | 0.163379 | 0.00035 |
| | | | cucumber_wt | | | |
| N-acetyltyrosine | Banana Freq | −0.03468 | SF_Watermelon_wt | 0.029821 | 0.16333 | 0.000351 |
| X - 21474 | Onion Freq | 0.056572 | SF_Avocado_wt | 0.054782 | 0.163136 | 0.000357 |
| X - 12026 | SF_Brown | −0.03309 | SF_Almonds_wt | 0.028343 | 0.163007 | 0.000361 |
| | Rice_wt | | | | | |
| xylose | SF_Pita_wt | −0.03725 | Shish Kebab | −0.03658 | 0.162979 | 0.000362 |
| | | | in Pita Bread | | | |
| | | | Freq | | | |
| dihomo-linolenoyl- | Sugar | 0.034004 | Peach, | 0.033119 | 0.162667 | 0.000371 |
| choline | Sweetened | | Nectarine, | | | |
| | Chocolate | | Plum Freq | | | |
| | Milk Freq | | | | | |
| X - 24106 | SF_Potatoes_wt | −0.03575 | Rice Freq | 0.027367 | 0.162598 | 0.000374 |
| X - 14095 | Processed | 0.023087 | SF_Wine_wt | 0.016406 | 0.162554 | 0.000375 |
| | Meat Free | | | | | |
| | Products Freq | | | | | |
| tyrosine | SF_Cappuccino_wt | 0.019225 | SF_Banana_wt | −0.01726 | 0.161408 | 0.000413 |
| dihomo-linoleoyl- | SF_WhiteWheat_g_wt | 0.043029 | Hummus | 0.042381 | 0.161336 | 0.000415 |
| carnitine | | | Salad Freq | | | |
| (C20:2)* | | | | | | |
| asparagine | SF_Apple_wt | 0.025085 | Fish Cooked, | −0.01962 | 0.161115 | 0.000423 |
| | | | Baked or | | | |
| | | | Grilled Freq | | | |
| N-acetylmethionine | >=16% Yellow | 0.002655 | Light Bread | −0.00164 | 0.160831 | 0.000433 |
| | Cheese Freq | | Freq | | | |
| X - 21364 | Egg Recipes | 0.029407 | SF_Pizza_wt | 0.028524 | 0.16065 | 0.00044 |
| | Freq | | | | | |
| X - 25116 | SF_Fried | −0.02065 | SF_Wholemeal | 0.020403 | 0.16014 | 0.000459 |
| | onions_wt | | Bread_wt | | | |
| 3beta- | SF_Red | 0.026768 | SF_Beer_wt | 0.026049 | 0.160076 | 0.000461 |
| hydroxy-5- | pepper_wt | | | | | |
| cholestenoate | | | | | | |
| dopamine 4- | SF_Bread_wt | −0.03894 | Pastrami or | −0.03467 | 0.159893 | 0.000469 |
| sulfate | | | Smoked Turkey | | | |
| | | | Breast Freq | | | |
| pyridoxate | SF_Cucumber_wt | 0.040288 | SF_Sugar Free | 0.038202 | 0.159679 | 0.000477 |
| | | | Gum_wt | | | |
| N-acetyl-1- | SF_Omelette_wt | 0.040531 | SF_Tahini_wt | −0.03737 | 0.159006 | 0.000504 |
| methylhistidine* | | | | | | |
| guanidinoacetate | Cooked | 0.038237 | SF_Salmon_wt | −0.03398 | 0.158661 | 0.000519 |
| | Legumes Freq | | | | | |
| 21-hydroxy- | Tahini Salad | −0.0262 | Lemon Freq | −0.02491 | 0.158595 | 0.000522 |
| pregnenolone | Freq | | | | | |
| disulfate | | | | | | |
| malate | SF_Roll_wt | −0.01369 | Canned Tuna | −0.01304 | 0.158508 | 0.000525 |
| | | | or Tuna Salad | | | |
| | | | Freq | | | |
| oleoylcarnitine | 1% Milk Freq | −0.01911 | Artificial | −0.01744 | 0.158465 | 0.000527 |
| (C18:1) | | | Sweeteners | | | |
| | | | Freq | | | |
| X - 12206 | SF_Vegetable | 0.033866 | White or | −0.03028 | 0.15836 | 0.000532 |
| | Salad_wt | | Brown Sugar | | | |
| | | | Freq | | | |
| X - 12063 | Tahini Salad | −0.02703 | Cheese Cakes | 0.017972 | 0.158256 | 0.000536 |
| | Freq | | or Cream | | | |
| | | | Cakes Freq | | | |
| oleoyl | 5-9% White | −0.02099 | Olives Freq | 0.020749 | 0.158101 | 0.000543 |
| ethanolamide | Cheese, | | | | | |
| | Cottage Freq | | | | | |
| glutamate | SF_Butter_wt | 0.012596 | SF_Sugar Free | −0.01167 | 0.15775 | 0.000559 |
| | | | Gum_wt | | | |
| phenylacetyl- | Onion Freq | −0.0358 | SF_Apple_wt | 0.030598 | 0.15732 | 0.000579 |
| glutamine | | | | | | |
| X - 12096 | SF_Sugar Free | −0.05257 | SF_Wholemeal | 0.042001 | 0.156575 | 0.000616 |
| | Gum_wt | | Bread_wt | | | |
| 1-linoleoyl- | Chicken or | −0.04173 | Pastrami or | −0.03293 | 0.155799 | 0.000656 |
| GPA (18:2)* | Turkey | | Smoked Turkey | | | |
| | Without Skin | | Breast Freq | | | |
| | Freq | | | | | |
| X - 23654 | SF_White | 0.03125 | SF_Potatoes_wt | 0.029627 | 0.155531 | 0.00067 |
| | Cheese_wt | | | | | |
| glycosyl-N- | Hummus | −0.04128 | Milk or Dark | 0.040666 | 0.155084 | 0.000695 |
| stearoyl- | Salad Freq | | Chocolate | | | |
| sphingosine | | | Freq | | | |
| (d18:1/18:0) | | | | | | |
| X - 12906 | Watermelon | 0.043948 | White or | −0.04039 | 0.154102 | 0.000752 |
| | Freq | | Brown Sugar | | | |
| | | | Freq | | | |
| 3-sulfo-L-alanine | SF_Milk_wt | 0.019177 | Lettuce Freq | −0.01653 | 0.153753 | 0.000773 |
| X - 24498 | 3% Milk Freq | −0.03907 | SF_Wine_wt | 0.034558 | 0.153726 | 0.000775 |
| phosphate | Pita Freq | −0.02025 | SF_Rice | −0.01902 | 0.153716 | 0.000776 |
| | | | crackers_wt | | | |
| S-carboxymethyl- | Mandarin or | −0.04016 | Milk or Dark | −0.03917 | 0.153566 | 0.000785 |
| L-cysteine | Clementine | | Chocolate | | | |
| | Freq | | Freq | | | |
| N-oleoyltaurine | Fresh | 0.042512 | Parsley, | 0.04102 | 0.151729 | 0.000909 |
| | Vegetable | | Celery, | | | |
| | Salad With | | Fennel, Dill, | | | |
| | Dressing or | | Cilantro, | | | |
| | Oil Freq | | Green Onion | | | |
| | | | Freq | | | |
| cysteinylglycine | Carrots, Fresh | −0.02377 | Wholemeal | −0.02257 | 0.150761 | 0.000981 |
| | or Cooked, | | Crackers Freq | | | |
| | Carrot Juice | | | | | |
| | Freq | | | | | |
| X - 24699 | SF_WhiteWheat_g_wt | 0.038762 | Couscous, | −0.03427 | 0.149932 | 0.001047 |
| | | | Burgul, | | | |
| | | | Mamaliga, | | | |
| | | | Groats Freq | | | |
| N6-succinyl- | SF_Rice | 0.024343 | SF_Hummus_wt | 0.024016 | 0.149726 | 0.001064 |
| adenosine | crackers_wt | | | | | |
| sphingomyelin | >=16% Yellow | 0.016074 | Fresh | 0.015044 | 0.149555 | 0.001078 |
| (d18:0/18:0, | Cheese Freq | | Vegetable | | | |
| d19:0/17:0)* | | | Salad Without | | | |
| | | | Dressing or | | | |
| | | | Oil Freq | | | |
| azelate | Orange or | −0.02521 | Regular Tea | −0.02091 | 0.149205 | 0.001108 |
| (nonanedioate) | Grapefruit | | Freq | | | |
| | Freq | | | | | |
| X - 24813 | SF_Fried | −0.03042 | Egg Recipes | 0.028449 | 0.149165 | 0.001111 |
| | eggplant_wt | | Freq | | | |
| gamma-glutamyl-2- | Green Tea | 0.02143 | SF_WhiteWheat_g_wt | −0.02096 | 0.148814 | 0.001142 |
| aminobutyrate | Freq | | | | | |
| 2-docosahexaenoyl- | SF_Pear_wt | −0.0529 | SF_Tahini_wt | −0.04006 | 0.148349 | 0.001184 |
| glycerol | | | | | | |
| (22:6)* | | | | | | |
| indoleacetate | SF_Beer_wt | 0.027872 | SF_Tomatoes_wt | −0.02612 | 0.147068 | 0.001308 |
| cis-4-decenoyl- | SF_Watermelon_wt | −0.03164 | Olives Freq | 0.026059 | 0.146705 | 0.001345 |
| carnitine (C10:1) | | | | | | |
| glycerol | Juice Freq | −0.02829 | Olives Freq | 0.027705 | 0.146434 | 0.001373 |
| 2′-deoxyuridine | SF_Mandarin_wt | 0.037435 | SF_Butter_wt | 0.036808 | 0.14643 | 0.001373 |
| laurylcarnitine | 1% Milk Freq | −0.0278 | Beef, Veal, | 0.025018 | 0.146188 | 0.001399 |
| (C12) | | | Lamb, Pork, | | | |
| | | | Steak, Golash | | | |
| | | | Freq | | | |
| X - 12015 | Sweet Dry | 0.066731 | Ordinary | 0.03887 | 0.145373 | 0.001489 |
| | Wine, | | Bread or | | | |
| | Cocktails Freq | | Challah Freq | | | |
| pro-hydroxy-pro | SF_Potatoes_wt | 0.021689 | Artificial | −0.02117 | 0.145074 | 0.001523 |
| | | | Sweeteners | | | |
| | | | Freq | | | |
| adipate | SF_Onion_wt | −0.02415 | Coffee Freq | 0.022951 | 0.144738 | 0.001562 |
| malonate | SF_Carrots_wt | −0.02997 | Nuts, | 0.028427 | 0.144528 | 0.001587 |
| | | | almonds, | | | |
| | | | pistachios | | | |
| | | | Freq | | | |
| cystathionine | SF_Bread_wt | −0.02561 | SF_Wholemeal | 0.021596 | 0.144282 | 0.001617 |
| | | | Bread_wt | | | |
| 4-hydroxy- | SF_Coffee_wt | 0.02973 | White or | −0.02389 | 0.144212 | 0.001626 |
| hippurate | | | Brown Sugar | | | |
| | | | Freq | | | |
| eugenol sulfate | White or | −0.01905 | Fries Freq | −0.01801 | 0.143947 | 0.001659 |
| | Brown Sugar | | | | | |
| | Freq | | | | | |
| X - 24812 | SF_Cooked | −0.02807 | Milk or Dark | −0.02795 | 0.143929 | 0.001661 |
| | Sweet | | Chocolate | | | |
| | potato_wt | | Freq | | | |
| 4-guanidino- | SF_Tomatoes_wt | 0.039862 | Garlic Freq | −0.02602 | 0.14386 | 0.00167 |
| butanoate | | | | | | |
| X - 12718 | SF_Carrots_wt | −0.03717 | Mandarin or | 0.033544 | 0.143481 | 0.001718 |
| | | | Clementine | | | |
| | | | Freq | | | |
| X - 24519 | SF_Apple_wt | −0.03448 | Wholemeal or | −0.03432 | 0.142763 | 0.001813 |
| | | | Rye Bread | | | |
| | | | Freq | | | |
| 3-amino-2- | SF_Tomatoes_wt | −0.01139 | SF_Parsley_wt | −0.00927 | 0.142527 | 0.001846 |
| piperidone | | | | | | |
| N6-carbamoyl- | Salty Snacks | 0.022739 | SF_Lentils_wt | −0.02149 | 0.141974 | 0.001923 |
| threonyladenosine | Freq | | | | | |
| 4-imidazoleacetate | Butter Freq | −0.0354 | Ice Cream or | −0.03056 | 0.141514 | 0.00199 |
| | | | Popsicle which | | | |
| | | | contains | | | |
| | | | Dairy Freq | | | |
| corticosterone | Lemon Freq | −0.0317 | Popsicle | 0.023153 | 0.141213 | 0.002035 |
| | | | Without Dairy | | | |
| | | | Freq | | | |
| DSGEGDFXAE | 3% Milk Freq | 0.009434 | Beef, Veal, | 0.007823 | 0.140729 | 0.00211 |
| GGGVR* | | | Lamb, Pork, | | | |
| | | | Steak, Golash | | | |
| | | | Freq | | | |
| 5alpha-pregnan- | SF_Pancake_wt | 0.014378 | Mandarin or | −0.01387 | 0.140105 | 0.002209 |
| 3beta,20beta-diol | | | Clementine | | | |
| monosulfate (1) | | | Freq | | | |
| N-acetylalliin | Diet Yogurt | −0.04313 | SF_Milk_wt | −0.03666 | 0.139872 | 0.002247 |
| | Freq | | | | | |
| salicylate | SF_Cucumber_wt | 0.011543 | Decaffeinated | 0.008387 | 0.138867 | 0.002419 |
| | | | Coffee Freq | | | |
| X - 16570 | SF_Noodles_wt | −0.02171 | SF_Apple_wt | −0.02108 | 0.137998 | 0.002577 |
| 2-hydroxydecanoate | SF_Wine_wt | 0.021025 | 0.5-3% White | −0.01768 | 0.137633 | 0.002647 |
| | | | Cheese, | | | |
| | | | Cottage Freq | | | |
| isovalerylglycine | SF_White | 0.03198 | Chicken or | 0.029919 | 0.137305 | 0.00271 |
| | Cheese_wt | | Turkey | | | |
| | | | Without Skin | | | |
| | | | Freq | | | |
| sphingomyelin | Onion Freq | 0.022353 | SF_Hummus_wt | −0.01848 | 0.137192 | 0.002733 |
| (d18:0/20:0, | | | | | | |
| d16:0/22:0)* | | | | | | |
| alliin | SF_Lettuce_wt | −0.0251 | Red Pepper | 0.024565 | 0.137142 | 0.002742 |
| | | | Freq | | | |
| docosapentaenoate | Wholemeal or | −0.02936 | SF_Tahini_wt | −0.02817 | 0.136995 | 0.002772 |
| (n6 DPA; 22:5n6) | Rye Bread | | | | | |
| | Freq | | | | | |
| dodecadienoate | Fresh | 0.020045 | 1% Milk Freq | −0.01923 | 0.136 | 0.002978 |
| (12:2)* | Vegetable | | | | | |
| | Salad With | | | | | |
| | Dressing or | | | | | |
| | Oil Freq | | | | | |
| 2-methoxyresorcinol | SF_Granola_wt | 0.025113 | Saltine | 0.02198 | 0.135924 | 0.002994 |
| sulfate | | | Crackers or | | | |
| | | | Matzah Freq | | | |
| biliverdin | SF_Rice_wt | 0.037086 | SF_Coffee_wt | −0.02569 | 0.135857 | 0.003008 |
| oleate/vaccenate | Juice Freq | −0.02202 | SF_Chocolate | −0.01927 | 0.135441 | 0.003099 |
| (18:1) | | | cake_wt | | | |
| 1,2-dipalmitoyl- | SF_Dark | −0.01535 | SF_Cereals_wt | 0.010979 | 0.135357 | 0.003118 |
| GPC | Chocolate_wt | | | | | |
| (16:0/16:0) | | | | | | |
| X - 23787 | SF_Sugar_wt | 0.031617 | SF_Avocado_wt | 0.027549 | 0.135264 | 0.003139 |
| 5alpha-androstan- | Fresh | −0.02279 | Artificial | −0.01932 | 0.133775 | 0.003489 |
| 3beta,17alpha- | Vegetable | | Sweeteners | | | |
| diol disulfate | Salad Without | | Freq | | | |
| | Dressing or | | | | | |
| | Oil Freq | | | | | |
| N-acetylleucine | SF_Cereals_wt | −0.04485 | SF_Ice | 0.032503 | 0.133641 | 0.003522 |
| | | | cream_wt | | | |
| X - 16397 | SF_Egg_wt | 0.025108 | Beef or | 0.022294 | 0.132394 | 0.003845 |
| | | | Chicken Soup | | | |
| | | | Freq | | | |
| hypoxanthine | SF_Eggplant | −0.0122 | SF_Melon_wt | −0.01089 | 0.131461 | 0.004104 |
| | Salad_wt | | | | | |
| guanidinosuccinate | SF_Olive | −0.02439 | Fish Cooked, | 0.023118 | 0.131417 | 0.004117 |
| | oil_wt | | Baked or | | | |
| | | | Grilled Freq | | | |
| oleoylcholine | SF_Chocolate_wt | 0.023667 | SF_Salty | 0.021243 | 0.130381 | 0.004423 |
| | | | Cheese_wt | | | |
| X - 11530 | Garlic Freq | −0.0183 | Lemon Freq | −0.01823 | 0.130312 | 0.004445 |
| sphingomyelin | SF_Potatoes_wt | −0.02832 | Fresh | 0.024218 | 0.130187 | 0.004483 |
| (d18:2/16:0, | | | Vegetable | | | |
| d18:1/16:1)* | | | Salad With | | | |
| | | | Dressing or | | | |
| | | | Oil Freq | | | |
| 1-stearoyl-2- | SF_Schnitzel_wt | 0.013675 | Tomato Freq | −0.0135 | 0.128763 | 0.004944 |
| linoleoyl-GPE | | | | | | |
| (18:0/18:2)* | | | | | | |
| phenyllactate | 5-9% Yellow | 0.010507 | SF_Beer_wt | 0.00983 | 0.128661 | 0.004979 |
| (PLA) | Cheese Freq | | | | | |
| methylsuccinate | SF_Potatoes_wt | −0.02378 | SF_Cake_wt | −0.02196 | 0.128601 | 0.004999 |
| X - 18887 | SF_Onion_wt | 0.022219 | Peanuts Freq | 0.016693 | 0.128585 | 0.005005 |
| X - 21286 | Processed | −0.03438 | SF_Garlic_wt | −0.03224 | 0.128465 | 0.005046 |
| | Meat Free | | | | | |
| | Products Freq | | | | | |
| gamma-glutamyl- | SF_Tahini_wt | 0.03179 | Apple Freq | 0.021253 | 0.128462 | 0.005047 |
| citrulline* | | | | | | |
| glycodeoxy- | Oil as an | −0.03584 | SF_Red | −0.03326 | 0.128237 | 0.005125 |
| cholate sulfate | addition for | | pepper_wt | | | |
| | Salads or | | | | | |
| | Stews Freq | | | | | |
| 3-hydroxylaurate | Butter Freq | 0.016163 | Light Bread | −0.015 | 0.12761 | 0.005348 |
| | | | Freq | | | |
| sulfate of | 3-4.5% | −0.04114 | SF_Soda | 0.040143 | 0.12742 | 0.005418 |
| piperine | Pudding, | | water_wt | | | |
| metabolite | Cheese With | | | | | |
| C16H19NO3 | Additions | | | | | |
| (2)* | Freq | | | | | |
| 1-carboxyethyl- | SF_Hummus_wt | −0.01639 | SF_Alfalfa | −0.01565 | 0.127404 | 0.005424 |
| leucine | | | sprouts_wt | | | |
| sebacate | SF_Beef_wt | 0.019127 | Granola or | 0.017914 | 0.126624 | 0.005717 |
| (decanedioate) | | | Bernflaks | | | |
| | | | Freq | | | |
| N-acetylneuraminate | SF_Halva_wt | 0.003387 | SF_Cottage | −0.0025 | 0.126605 | 0.005725 |
| | | | cheese_wt | | | |
| N-formylanthranilic | SF_Omelette_wt | 0.042702 | SF_Tahini_wt | −0.03925 | 0.126161 | 0.005898 |
| acid | | | | | | |
| picolinate | SF_Tea_wt | −0.04566 | SF_Water_wt | −0.03433 | 0.125907 | 0.006 |
| 4-hydroxybenzoate | SF_Cake_wt | 0.025295 | SF_Bread_wt | 0.02429 | 0.125867 | 0.006016 |
| 2- hydroxybehenate | Ordinary | −0.02983 | Popsicle | −0.02733 | 0.12552 | 0.006157 |
| | Bread or | | Without Dairy | | | |
| | Challah Freq | | Freq | | | |
| 5-dodecenoate | SF_Wholemeal | −0.01578 | 3% Milk Freq | 0.011973 | 0.125442 | 0.00619 |
| (12:1n7) | Bread_wt | | | | | |
| X - 12831 | SF_Dried | −0.0172 | SF_Rice_wt | −0.01653 | 0.124968 | 0.006389 |
| | dates_wt | | | | | |
| glycerol 3-phosphate | SF_Egg_wt | 0.009172 | Corn Freq | −0.0061 | 0.124939 | 0.006401 |
| N-palmitoyltaurine | SF_WhiteWheat_g_wt | 0.023787 | SF_Jam_wt | 0.020896 | 0.124466 | 0.006606 |
| octadecadiene | Cooked | 0.034248 | SF_Cookies_wt | 0.034219 | 0.123141 | 0.007211 |
| dioate (C18:2- | Legumes Freq | | | | | |
| DC)* | | | | | | |
| 1-stearoyl-GPE | SF_Tahini_wt | −0.01952 | SF_Rice | 0.019314 | 0.122848 | 0.007351 |
| (18:0) | | | crackers_wt | | | |
| bilirubin (E, E)* | SF_Coffee_wt | −0.02599 | SF_Tomatoes_wt | −0.02077 | 0.122492 | 0.007525 |
| N-acetylthreonine | SF_Vegetable | 0.024584 | SF_Coffee_wt | −0.02401 | 0.12246 | 0.007541 |
| | Salad_wt | | | | | |
| homoarginine | SF_Chicken | 0.031504 | SF_Beef_wt | 0.03141 | 0.122367 | 0.007587 |
| | breast_wt | | | | | |
| tetradecanedioate | Pear Fresh, | −0.03466 | Butter Freq | 0.033617 | 0.122101 | 0.00772 |
| | Cooked or | | | | | |
| | Canned Freq | | | | | |
| 12-HETE | SF_Butter_wt | 0.016857 | SF_Mandarin_wt | 0.015466 | 0.122054 | 0.007743 |
| X - 11843 | SF_Schnitzel_wt | 0.0157 | SF_Rice_wt | 0.014923 | 0.122053 | 0.007744 |
| X - 22771 | SF_Cucumber_wt | −0.03911 | SF_Beer_wt | 0.017638 | 0.121558 | 0.007998 |
| 2,3-dihydroxy- | SF_Milk_wt | −0.02794 | SF_WhiteWheat_g_wt | 0.027391 | 0.121075 | 0.008253 |
| 5-methylthio- | | | | | | |
| 4-pentenoate | | | | | | |
| (DMTPA)* | | | | | | |
| myristoleoyl- | SF_Cooked | 0.022025 | SF_White | −0.01884 | 0.120905 | 0.008345 |
| carnitine | mushrooms_wt | | Cheese_wt | | | |
| (C14:1)* | | | | | | |
| orotidine | SF_Beer_wt | 0.028445 | 0-1.5% | −0.02404 | 0.120458 | 0.008589 |
| | | | Natural | | | |
| | | | Yogurt Freq | | | |
| X - 18345 | SF_Egg_wt | 0.030911 | SF_Bread_wt | −0.03079 | 0.120368 | 0.008639 |
| N-palmitoyl- | SF_Rice | 0.027654 | SF_Coffee_wt | 0.024178 | 0.119525 | 0.009121 |
| sphingadienine | crackers_wt | | | | | |
| (d18:2/16:0)* | | | | | | |
| glutarate | Coffee Freq | 0.025756 | Artificial | 0.023379 | 0.119351 | 0.009224 |
| (pentanedioate) | | | Sweeteners | | | |
| | | | Freq | | | |
| ornithine | SF_Tahini_wt | 0.022321 | Beer Freq | 0.020484 | 0.118976 | 0.009448 |
| 1-palmitoyl-2- | SF_Onion_wt | −0.02585 | Pita Freq | −0.01849 | 0.118899 | 0.009494 |
| linoleoyl-GPE | | | | | | |
| (16:0/18:2) | | | | | | |
| X - 24512 | SF_Water_wt | −0.02674 | Granola or | 0.026242 | 0.118854 | 0.009522 |
| | | | Bernflaks | | | |
| | | | Freq | | | |
| dopamine 3- | Sugar | −0.01984 | Pastrami or | −0.01335 | 0.118245 | 0.009899 |
| O-sulfate | Sweetened | | Smoked Turkey | | | |
| | Chocolate | | Breast Freq | | | |
| | Milk Freq | | | | | |
| isovalerate | SF_Egg_wt | 0.01826 | Shish Kebab | 0.017714 | 0.117447 | 0.010412 |
| | | | in Pita Bread | | | |
| | | | Freq | | | |
| 1-palmitoyl- | SF_Tahini_wt | −0.01407 | Tahini Salad | −0.01099 | 0.116895 | 0.010782 |
| GPG (16:0)* | | | Freq | | | |
| 14-HDoHE/17- | Banana Freq | −0.00468 | Apple Freq | −0.00412 | 0.116778 | 0.010861 |
| HDoHE | | | | | | |
| 1-palmitoyl- | SF_Vegetable | −0.01871 | Peanuts Freq | −0.0177 | 0.116689 | 0.010922 |
| GPI (16:0) | Salad_wt | | | | | |
| trans- | SF_WholeWheat_g_wt | −0.01835 | Fruit Salad | −0.01808 | 0.115519 | 0.011752 |
| urocanate | | | Freq | | | |
| X - 21842 | SF_Cooked | 0.017668 | SF_Tomatoes_wt | −0.01658 | 0.115074 | 0.012083 |
| | beets_wt | | | | | |
| xanthurenate | SF_Tahini_wt | −0.06647 | Pasta or | −0.05233 | 0.114922 | 0.012198 |
| | | | Flakes Freq | | | |
| N-acetylglutamate | Orange or | −0.01167 | Popsicle | −0.01136 | 0.114108 | 0.012828 |
| | Grapefruit | | Without Dairy | | | |
| | Freq | | Freq | | | |
| phospho- | SF_Vegetable | −0.01884 | Sweet Dry | 0.018577 | 0.113243 | 0.013529 |
| ethanolamine | Salad_wt | | Wine, | | | |
| | | | Cocktails Freq | | | |
| 1-(1-enyl- | Alcoholic | 0.038358 | SF_Chocolate_wt | 0.029272 | 0.113202 | 0.013563 |
| palmitoyl)-2- | Drinks Freq | | | | | |
| palmitoyl-GPC | | | | | | |
| (P-16:0/16:0)* | | | | | | |
| hexadecene- | Regular Tea | −0.03191 | 5-9% White | 0.031756 | 0.112974 | 0.013755 |
| dioate (C16:1- | Freq | | Cheese, | | | |
| DC)* | | | Cottage Freq | | | |
| X - 12822 | Onion Freq | −0.02084 | SF_Vegetable | 0.02052 | 0.112564 | 0.014103 |
| | | | Salad_wt | | | |
| X - 21607 | 1% Milk Freq | −0.03116 | SF_Schnitzel_wt | −0.02665 | 0.112114 | 0.014496 |
| epiandrosterone | SF_Rice | −0.0166 | SF_Coffee_wt | −0.01594 | 0.111052 | 0.015459 |
| sulfate | crackers_wt | | | | | |
| 2-keto-3-deoxy- | Granola or | 0.02985 | SF_Persimmon_wt | 0.026952 | 0.110806 | 0.01569 |
| gluconate | Bernflaks | | | | | |
| | Freq | | | | | |
| hydroxy- | Fried Fish | 0.016469 | Falafel in Pita | 0.014964 | 0.110359 | 0.016118 |
| asparagine** | Freq | | Bread Freq | | | |
| uridine | Wholemeal or | 0.005349 | Simple | −0.00523 | 0.110043 | 0.016426 |
| | Rye Bread | | Cookies or | | | |
| | Freq | | Biscuits Freq | | | |
| 5-(galactosyl- | Parsley, | 0.015888 | Chicken or | 0.015293 | 0.109914 | 0.016554 |
| hydroxy)-L-lysine | Celery, | | Turkey With | | | |
| | Fennel, Dill, | | Skin Freq | | | |
| | Cilantro, | | | | | |
| | Green Onion | | | | | |
| | Freq | | | | | |
| ceramide | SF_Cottage | 0.031752 | SF_WholeWheat_g_wt | 0.03106 | 0.109815 | 0.016652 |
| (d16:1/24:1, | cheese_wt | | | | | |
| d18:1/22:1)* | | | | | | |
| glycosyl | Light Bread | −0.03698 | SF_Dark | 0.036105 | 0.108989 | 0.017493 |
| ceramide | Freq | | Chocolate_wt | | | |
| (d18:1/20:0, | | | | | | |
| d16:1/22:0)* | | | | | | |
| 1-stearoyl-2- | SF_Potatoes_wt | −0.01349 | SF_Tahini_wt | −0.01262 | 0.108819 | 0.01767 |
| oleoyl-GPI | | | | | | |
| (18:0/18:1)* | | | | | | |
| X - 12013 | Parsley, | −0.02619 | >=16% Yellow | 0.017607 | 0.10825 | 0.018276 |
| | Celery, | | Cheese Freq | | | |
| | Fennel, Dill, | | | | | |
| | Cilantro, | | | | | |
| | Green Onion | | | | | |
| | Freq | | | | | |
| 3-hydroxydecanoate | Olives Freq | 0.034271 | Fried Fish | 0.029653 | 0.108189 | 0.018342 |
| | | | Freq | | | |
| anthranilate | Herbal Tea | −0.02746 | SF_White | 0.025736 | 0.106492 | 0.020264 |
| | Freq | | Cheese_wt | | | |
| 5-methyluridine | SF_Tahini_wt | 0.021722 | SF_Vegetable | 0.019528 | 0.106348 | 0.020434 |
| (ribothymidine) | | | Salad_wt | | | |
| 5-bromotryptophan | SF_Chocolate_wt | 0.023321 | 0-1.5% | −0.02139 | 0.106233 | 0.020572 |
| | | | Natural | | | |
| | | | Yogurt Freq | | | |
| 1-(1-enyl- | Orange or | 0.027062 | SF_WhiteWheat_g_wt | −0.02363 | 0.106053 | 0.020788 |
| palmitoyl)-2- | Grapefruit | | | | | |
| linoleoyl-GPC | Freq | | | | | |
| (P-16:0/18:2)* | | | | | | |
| 3-hydroxybutyryl- | Parsley, | 0.031457 | Fried Fish | 0.028827 | 0.105791 | 0.021107 |
| carnitine (2) | Celery, | | Freq | | | |
| | Fennel, Dill, | | | | | |
| | Cilantro, | | | | | |
| | Green Onion | | | | | |
| | Freq | | | | | |
| pregnanolone/ | Chicken or | −0.03249 | SF_Wholemeal | 0.028136 | 0.10566 | 0.021268 |
| allopregnanolone | Turkey With | | Roll_wt | | | |
| sulfate | Skin Freq | | | | | |
| X - 24728 | 3% Milk Freq | −0.04381 | SF_Potatoes_wt | 0.034071 | 0.10566 | 0.021268 |
| 1-oleoyl-GPI | Apricot Fresh | 0.029801 | SF_Yellow | −0.02767 | 0.105514 | 0.021449 |
| (18:1)* | or Dry, or | | Cheese_wt | | | |
| | Loquat Freq | | | | | |
| glycine | SF_Schnitzel_wt | −0.01648 | Canned Tuna | −0.01561 | 0.105187 | 0.021858 |
| | | | or Tuna Salad | | | |
| | | | Freq | | | |
| dihomo- | Nuts, | 0.010126 | Yeast Cakes | −0.00969 | 0.103924 | 0.023504 |
| linoleate | almonds, | | and Cookies | | | |
| (20:2n6) | pistachios | | as Rogallach, | | | |
| | Freq | | Croissant or | | | |
| | | | Donut Freq | | | |
| 2-linoleoyl- | Pita Freq | 0.012823 | SF_Potatoes_wt | 0.012306 | 0.103746 | 0.023745 |
| glycerol (18:2) | | | | | | |
| citrulline | 0-1.5% | 0.021639 | SF_Tomatoes_wt | −0.02144 | 0.103745 | 0.023746 |
| | Natural | | | | | |
| | Yogurt Freq | | | | | |
| lactosyl-N- | SF_Peanuts_wt | 0.034836 | SF_Cooked | −0.03181 | 0.103546 | 0.024017 |
| behenoyl- | | | beets_wt | | | |
| sphingosine | | | | | | |
| (d18:1/22:0)* | | | | | | |
| 1-palmitoleoyl- | Olives Freq | −0.02966 | SF_Jam_wt | 0.024678 | 0.103434 | 0.024171 |
| 2-linolenoyl- | | | | | | |
| GPC | | | | | | |
| (16:1/18:3)* | | | | | | |
| bilirubin (Z, Z) | SF_Beer_wt | 0.013136 | SF_Coffee_wt | −0.01181 | 0.10337 | 0.024259 |
| 4-acetamido- | Coated or | −0.02198 | Yeast Cakes | −0.01416 | 0.10241 | 0.025617 |
| benzoate | Stuffed | | and Cookies | | | |
| | Cookies, | | as Rogallach, | | | |
| | Waffles or | | Croissant or | | | |
| | Biscuits Freq | | Donut Freq | | | |
| docosadienoate | Apricot Fresh | 0.015876 | Yeast Cakes | −0.01526 | 0.102118 | 0.026043 |
| (22:2n6) | or Dry, or | | and Cookies | | | |
| | Loquat Freq | | as Rogallach, | | | |
| | | | Croissant or | | | |
| | | | Donut Freq | | | |
| vanillactate | SF_Wholemeal | 0.036466 | Green Tea | −0.03533 | 0.101992 | 0.026229 |
| | Bread_wt | | Freq | | | |
| taurodeoxy- | SF_WhiteWheat_g_wt | −0.04848 | Peanuts Freq | −0.04794 | 0.101769 | 0.02656 |
| cholic acid 3- | | | | | | |
| sulfate | | | | | | |
| X - 12126 | Ordinary | −0.04479 | Parsley, | −0.03788 | 0.101316 | 0.027245 |
| | Bread or | | Celery, | | | |
| | Challah Freq | | Fennel, Dill, | | | |
| | | | Cilantro, | | | |
| | | | Green Onion | | | |
| | | | Freq | | | |
| stearate (18:0) | SF_Noodles_wt | −0.00834 | SF_Butter_wt | 0.008276 | 0.101288 | 0.027287 |
| indolelactate | SF_WhiteWheat_g_wt | 0.012924 | SF_French | −0.01089 | 0.10121 | 0.027407 |
| | | | fries_wt | | | |
| X - 13684 | SF_Wholemeal | 0.033256 | Fried Fish | 0.01912 | 0.100529 | 0.028469 |
| | Bread_wt | | Freq | | | |
| sulfate of | Red Pepper | 0.033295 | 0.5-3% White | −0.02573 | 0.100095 | 0.029165 |
| piperine | Freq | | Cheese, | | | |
| metabolite | | | Cottage Freq | | | |
| C16H19NO3 | | | | | | |
| (3)* | | | | | | |
| X - 24309 | SF_Almonds_wt | −0.03293 | 5-9% White | 0.027594 | 0.099928 | 0.029436 |
| | | | Cheese, | | | |
| | | | Cottage Freq | | | |
| 1-(1-enyl- | SF_Milk_wt | 0.018166 | Falafel in Pita | −0.01552 | 0.099434 | 0.030253 |
| palmitoyl)-2- | | | Bread Freq | | | |
| palmitoleoyl-GPC | | | | | | |
| (P-16:0/16:1)* | | | | | | |
| N-acetyl-S- | Avocado Freq | −0.01643 | SF_Bamba_wt | 0.016076 | 0.099093 | 0.030825 |
| allyl-L-cysteine | | | | | | |
| 2-oxoarginine* | White or | −0.02507 | SF_Olives_wt | −0.01742 | 0.09899 | 0.031002 |
| | Brown Sugar | | | | | |
| | Freq | | | | | |
| dihomo- | Chicken or | −0.01601 | SF_Wholemeal | 0.010357 | 0.098964 | 0.031045 |
| linolenate | Turkey | | Light | | | |
| (20:3n3 or n6) | Without Skin | | Bread_wt | | | |
| | Freq | | | | | |
| glycochenode | 0.5-3% White | −0.02931 | Simple | 0.022725 | 0.098913 | 0.031134 |
| oxycholate | Cheese, | | Cookies or | | | |
| glucuronide | Cottage Freq | | Biscuits Freq | | | |
| (1) | | | | | | |
| N,N-dimethyl-5- | Wholemeal or | 0.015529 | SF_Milk_wt | −0.01415 | 0.098818 | 0.031297 |
| aminovalerate | Rye Bread | | | | | |
| | Freq | | | | | |
| taurocholate | Sausages Freq | −0.0284 | SF_Cucumber_wt | 0.027816 | 0.09862 | 0.031639 |
| 2-hydroxyadipate | SF_Hamburger_wt | 0.031487 | SF_Cold | 0.031274 | 0.097762 | 0.033158 |
| | | | cut_wt | | | |
| mannose | Cornflakes | −0.01579 | SF_Danish_wt | −0.01488 | 0.097214 | 0.034161 |
| | Freq | | | | | |
| X - 19561 | SF_Tahini_wt | −0.0368 | Salty Cheese, | 0.033886 | 0.097147 | 0.034286 |
| | | | Tzfatit, | | | |
| | | | Bulgarian, | | | |
| | | | Brinza, Thick | | | |
| | | | Slice Freq | | | |
| N-acetylalanine | Apple Freq | 0.01048 | SF_Whipped | 0.009811 | 0.096869 | 0.034806 |
| | | | cream_wt | | | |
| phenylpyruvate | SF_Fried | −0.00521 | Simple | 0.003618 | 0.096291 | 0.035909 |
| | eggplant_wt | | Cookies or | | | |
| | | | Biscuits Freq | | | |
| stearoylcholine* | SF_Hummus | 0.026213 | SF_Chocolate_wt | 0.024884 | 0.096042 | 0.036393 |
| | Salad_wt | | | | | |
| palmitoleoyl- | Lettuce Freq | 0.021993 | SF_Yellow | 0.021945 | 0.095522 | 0.037422 |
| carnitine | | | Cheese_wt | | | |
| (C16:1)* | | | | | | |
| 2-palmitoleoyl- | SF_Onion_wt | −0.02989 | SF_Lettuce_wt | 0.027198 | 0.095476 | 0.037514 |
| GPC (16:1)* | | | | | | |
| phenol sulfate | SF_Potatoes_wt | −0.03138 | SF_Tea_wt | −0.02332 | 0.095336 | 0.037796 |
| X - 23739 | Beer Freq | 0.007641 | SF_Rice | 0.006021 | 0.095281 | 0.037908 |
| | | | crackers_wt | | | |
| 2-stearoyl-GPE | SF_Rice | 0.017055 | Vegetable | 0.016613 | 0.095078 | 0.03832 |
| (18:0)* | crackers_wt | | Soup Freq | | | |
| glycerate | Cooked | 0.018335 | SF_Apple_wt | 0.016299 | 0.094938 | 0.038608 |
| | Vegetable | | | | | |
| | Salads Freq | | | | | |
| X - 12100 | 0-1.5% | 0.007183 | SF_Natural | 0.005165 | 0.094616 | 0.039274 |
| | Natural | | Yogurt_wt | | | |
| | Yogurt Freq | | | | | |
| 5alpha-pregnan- | Brussels | −0.02388 | SF_Vegetable | −0.02263 | 0.094124 | 0.040313 |
| 3beta,20alpha- | Sprouts, | | Salad_wt | | | |
| diol disulfate | Green or Red | | | | | |
| | Cabbage Freq | | | | | |
| phenylalanyl- | SF_Tofu_wt | 0.039139 | Onion Freq | 0.031693 | 0.093617 | 0.041406 |
| glycine | | | | | | |
| heptanoate | SF_WhiteWheat_g_wt | −0.02279 | SF_Sushi_wt | −0.02068 | 0.093589 | 0.041468 |
| (7:0) | | | | | | |
| 4-acetamido- | SF_Chicken | −0.02032 | SF_Apple_wt | 0.019891 | 0.093556 | 0.041539 |
| butanoate | breast_wt | | | | | |
| thyroxine | SF_Wholemeal | 0.027614 | Beef, Veal, | −0.02723 | 0.093455 | 0.041761 |
| | Light | | Lamb, Pork, | | | |
| | Bread_wt | | Steak, Golash | | | |
| | | | Freq | | | |
| 1-oleoyl-GPC | Thousand | −0.01683 | Alcoholic | 0.016764 | 0.093184 | 0.042361 |
| (18:1) | Island | | Drinks Freq | | | |
| | Dressing, | | | | | |
| | Garlic | | | | | |
| | Dressing Freq | | | | | |
| linoleate | Juice Freq | −0.01873 | SF_Cereals_wt | −0.01404 | 0.092187 | 0.044627 |
| (18:2n6) | | | | | | |
| galactonate | SF_Natural | 0.035565 | SF_Cucumber_wt | 0.021854 | 0.091788 | 0.045563 |
| | Yogurt_wt | | | | | |
| octanoyl- | SF_Cooked | 0.019953 | SF_Coffee_wt | −0.01683 | 0.091768 | 0.04561 |
| carnitine (C8) | mushrooms_wt | | | | | |
| piperine | SF_Beer_wt | 0.021738 | Peach, | −0.01748 | 0.091715 | 0.045735 |
| | | | Nectarine, | | | |
| | | | Plum Freq | | | |
| N-acetylproline | Potatoes | −0.0287 | SF_Coffee_wt | 0.023609 | 0.091347 | 0.046616 |
| | Boiled, | | | | | |
| | Baked, | | | | | |
| | Mashed, | | | | | |
| | Potatoes | | | | | |
| | Salad Freq | | | | | |
| X - 12216 | SF_Water_wt | 0.030604 | Roll or | −0.02626 | 0.09095 | 0.047581 |
| | | | Bageles Freq | | | |
| 2-hydroxyglutarate | SF_Rice | 0.018396 | SF_Apple_wt | 0.018065 | 0.090942 | 0.0476 |
| | crackers_wt | | | | | |
| choline | Turkey | −0.00423 | SF_Rice_wt | 0.004025 | 0.090928 | 0.047634 |
| | Meatballs, | | | | | |
| | Beef, Chicken | | | | | |
| | Freq | | | | | |
| 2,2′-Methylene- | SF_Vegetable | 0.057288 | SF_Cake_wt | −0.05264 | 0.090651 | 0.048319 |
| bis(6-tert- | Salad_wt | | | | | |
| butyl-p-cresol) | | | | | | |
| 5,6-dihydrouridine | Turkey | −0.02117 | SF_Diet | −0.01249 | 0.09055 | 0.04857 |
| | Meatballs, | | Coke_wt | | | |
| | Beef, Chicken | | | | | |
| | Freq | | | | | |
| cis-4-decenoate | SF_Low fat | −0.01521 | Salty Cheese, | −0.01403 | 0.090157 | 0.04956 |
| (10:1n6)* | Milk_wt | | Tzfatit, | | | |
| | | | Bulgarian, | | | |
| | | | Brinza, Thick | | | |
| | | | Slice Freq | | | |

[0160] Food types that can be used for predicting the corresponding metabolite are also recited in Tables 3 and 4.

[0161] The analysis of the frequency of consumption of the food types and/or the daily mean consumption of the food types is optionally and preferably by executing a machine learning procedure. Any of the aforementioned types of machine learning procedures can be used for predicting the quantity of the metabolite based on the food types and/or the daily mean consumption of the food types.

[0162] When the metabolite is predicted based on the frequency of consumption and/or the daily mean consumption of the food types, the machine learning procedure used is a trained machine learning procedure. A machine learning procedure can be trained according to some embodiments of the present invention by feeding a machine learning training program with the frequency and/or the daily mean of food types consumed by a cohort of subjects from which the quantities of the metabolite have been determined by blood tests. Once the data are fed, the machine learning training program generates a trained machine learning procedure of a selected type which can then be used without the need to re-train it.

[0163] For example, when it is desired to employ decision trees, machine learning training program learns the structure of each tree in a plurality of decision trees (e.g., how many nodes there are in each tree, and how these are connected to one another), and also selects the decision rules for split nodes of each tree. At least a portion of the decision rules relate to one or more food types. A simple decision rule may be a threshold for the frequency of consumption and/or the daily mean consumption of a particular food type, but more complex rules, relating to more than one food type are also contemplated. The machine learning training program also accumulates data at the leaves of the trees.

[0164] The structures of the trees, the decision rules for the split nodes, and the data at the leaves are all selected by the machine learning training program, automatically and typically without user intervention, such that the frequency of consumption and/or the daily mean consumption of the food types at the root of the trees provide the quantities of the metabolite as determined by blood tests at the leaves of the trees. The final result of the machine learning training program in this case is a set of trees for each metabolite, where the structures, the decision rules for split nodes, and leaf data for each trees are defined by the machine learning training program.

[0165] The Examples section that follows describes machine learning training that was used to generate a set of trees for each of a plurality of metabolite, using training data including metabolite quantities and diet data collected from a cohort of about 500 subjects.

[0166] In various exemplary embodiments of the invention a library of machine learning procedures is accessed and searched for a trained machine learning procedure associated with the metabolite. It was found by the inventors that different libraries of machine learning procedures are suitable for microbiome data and for diet data. Thus, when the metabolite is predicted based on the frequency of consumption and/or the daily mean consumption of the food types, the library on medium 110 that is used is preferably not the same as the library used for predicting the metabolite based on the microbiome.

[0167] When the metabolite is predicted based on the frequency of consumption and/or the daily mean consumption of the food types, the library can include a machine learning procedure for each of the aforementioned metabolites (in which case N equals the number of the aforementioned metabolites), or a machine learning procedure for each of the metabolites set forth in Table 3 (in which case N equals the number of the metabolites set forth in Table 3), or a machine learning procedure for each of the metabolites set forth in Table 4 (in which case N equals the number of the metabolites set forth in Table 4). Also contemplated are embodiments in which the library includes a machine learning procedure for each of a subset of the aforementioned metabolites or of the metabolites in set forth Table 3, or of the metabolites in set forth Table 4.

[0168] FIG. 13 illustrates a machine learning procedure 114 which is the Lth (1≤L≤N) procedure in the library, and which is associated with the metabolite of which the quantity in the blood of the subject is to be predicted. The selected trained procedure 114 is fed with the frequency of consumption and/or the daily mean consumption of the food types, and provides an output indicative of the quantity of the metabolite in the blood.

[0169] When machine learning procedure 114 includes a set of decision trees, each of the trees receives food consumption data (typically frequency of consumption and/or the daily mean consumption of the food types), processes the received food consumption data by the split node decision rules that were defined during the training phase, and provides output values in accordance with the data at the leaves that were also defined during the training phase. The output of all trees is optionally and preferably combined (e.g., summed) to provide the quantity of the respective metabolite.

[0170] Preferably, the number of trees in the set is at least 1000 or at least 2000 or more. It was found by the inventors that the food types listed in Table 3 dominate the predicting ability of the decision trees. Thus, in some embodiments of the present invention the number of decision rules relating to the food types listed in Table 3 for the respective metabolite is larger than the number of decision rules relating to other food types.

[0171] The Inventors found that the machine learning procedures, particularly, but not exclusively the decision trees, can also be used for solving the inverse problem, wherein the machine learning procedure can recommend one or more amounts of microbiomes of an individual, or recommend consumption of one or more food types.

[0172] These embodiments are illustrated in FIG. 14 for the case in which the machine learning procedure recommends one or more amounts of microbiomes, and in FIG. 15 for the case in which the machine learning procedure recommends one or more food types.

[0173] With reference to FIGS. 11 and 14, the computer readable medium 110 storing a library of machine learning procedures trained using microbiome data is accessed. The library of trained machine learning procedures is searched for a trained machine learning procedure 112 associated with a metabolite of interest. The selected procedure 112 is then fed with a predetermined quantity of the metabolite of interest and provides an output indicative of recommended amounts of a plurality of microbes of a microbiome. The recommended amounts are amounts that would have resulted, within a tolerance of less than 10%, in the predetermined quantity of the metabolite of interest had the amounts been fed to a trained machine learning procedure associated with the metabolite of interest.

[0174] With reference to FIGS. 11 and 15, the computer readable medium 110 storing a library of machine learning procedures trained using frequency and/or the daily mean consumption of the food types is accessed. The library of trained machine learning procedures is searched for a trained machine learning procedure 114 associated with a metabolite of interest. The selected procedure 114 is then fed with a predetermined quantity of the metabolite of interest and provides an output indicative of recommended food consumption, typically a recommended set of food types and optionally a recommended consumption frequency and/or daily mean consumption of food types. The recommended food consumption is food consumption that would have resulted, within a tolerance of less than 10%, in the predetermined quantity of the metabolite of interest had the amounts been fed to a trained machine learning procedure associated with the metabolite of interest.

[0175] It was surprisingly found by the Inventors that a trained machine learning procedure that solves the forward problem, wherein the procedure provides a metabolite quantity after beaning fed with microbiome data (FIG. 12), or after being fed with consumption frequency and/or daily mean consumption of food types (FIG. 13), can also be used, optionally and preferably without being re-trained, to solve the backward problem, wherein the procedure provides amounts of microbes (FIG. 14) or food consumption (FIG. 15) after being fed with a metabolite quantity.

[0176] It will be appreciated that additional features may be used together with the information regarding bacterial abundance and/or food intake to raise the confidence level of the prediction. Such features include for example a macronutrients feature group which can include the daily mean consumption of macronutrients (lipids, proteins, carbohydrates), calories and water, calculated from real-time logging; an anthropometrics feature group which can include weight, BMI, waist and hips circumference, and waist to hips ratio (WHR); a cardiometabolic feature group which can include systolic and diastolic blood pressure, heart rate in beats per minute and a glycemic status; a lifestyle feature group which can include smoking status (current, past) from questionnaires, and the daily mean sleeping time, exercise time and midday sleep time based on the real time logging; a “drugs” feature group which can included binary features representing the reported medication intake of common drugs from questionnaires, and medication groups; a “time of day” feature which is a binary feature indicating whether the sample was taken during the first half of the day; a “seasonal effects” feature which is the month in which the sample was taken, and may also be also grouped months by season (Winter: December-February; Spring: March-May; Summer: June-August; Fall: September-November).

[0177] Once the prediction has been made about the metabolite, the present inventors contemplate corroborating the quantity of the metabolite by directly analyzing the amount of that metabolite in the blood of the subject. It is to be understood, however, that while such corroboration is contemplated in some embodiments of the present invention, the corroboration not necessary for the prediction itself. As demonstrated in the Example section that follows, the present inventors were able to train a machine learning procedure such that when fed by the input data (e.g., microbiome data, food consumption data) machine learning procedure, once trained, is capable of predicting the quantity of the metabolite in the blood of the subject even without performing direct analysis of the quantity of the metabolite in the blood of the subject.

[0178] Direct analysis of the quantity of the metabolite in the blood of the subject can be performed, for example, during or after the training of the machine learning procedure in order to determine whether the quantity of the metabolite that the machine learning procedure predicts is of clinical relevance, e.g. with a confidence level of at least 90% or at least 95%.

[0179] The confidence level of the metabolite quantity can be affirmed by conducting a hypothesis test as known in the art. Typically, the hypothesis test includes selecting the null and alternative hypotheses, and also selecting decision criteria, which are factors upon which a decision to reject or fail to reject the null hypothesis is based. Typical decision criteria include a choice of a test statistic and significance level (denoted algebraically as “alpha”) to be applied to the analysis. Many different test statistics can be used in hypothesis testing, including mean, variance and the like. A p-value can be calculated and be compared to the significance level. The p-value is quantitative assessment of the probability of observing a value of the test statistic that is either as extreme as or more extreme than the calculated value of the test statistic.

[0180] Once it is established that a particular trained machine learning procedure is capable of providing clinically relevant predictions for a particular metabolite, the trained machine learning procedure can execute without performing direct analysis of the quantity of the metabolite in the blood of the subject.

[0181] Following is a description of techniques suitable for corroborating the quantity of the metabolite in the blood of the subject by direct analysis.

[0182] In one embodiment, metabolites are identified using a physical separation method.

[0183] The term “physical separation method” as used herein refers to any method known to those with skill in the art sufficient to produce a profile of changes and differences in small molecules produced in hSLCs, contacted with a toxic, teratogenic or test chemical compound according to the methods of this invention. In a preferred embodiment, physical separation methods permit detection of cellular metabolites including but not limited to sugars, organic acids, amino acids, fatty acids, hormones, vitamins, and oligopeptides, as well as ionic fragments thereof and low molecular weight compounds (preferably with a molecular weight less than 3000 Daltons, and more particularly between 50 and 3000 Daltons). For example, mass spectrometry can be used. In particular embodiments, this analysis is performed by liquid chromatography/electrospray ionization time of flight mass spectrometry (LC/ESI-TOF-MS), however it will be understood that metabolites as set forth herein can be detected using alternative spectrometry methods or other methods known in the art for analyzing these types of compounds in this size range.

[0184] Certain metabolites can be identified by, for example, gene expression analysis, including real-time PCR, RT-PCR, Northern analysis, and in situ hybridization.

[0185] In addition, metabolites can be identified using Mass Spectrometry such as MALDI/TOF (time-of-flight), SELDI/TOF, liquid chromatography-mass spectrometry (LC-MS), gas chromatography-mass spectrometry (GC-MS), high performance liquid chromatography-mass spectrometry (HPLC-MS), capillary electrophoresis-mass spectrometry, nuclear magnetic resonance spectrometry, tandem mass spectrometry (e.g., MS/MS, MS/MS/MS, ESI-MS/MS etc.), secondary ion mass spectrometry (SIMS), or ion mobility spectrometry (e.g. GC-IMS, IMS-MS, LC-IMS, LC-IMS-MS etc.).

[0186] Mass spectrometry methods are well known in the art and have been used to quantify and/or identify biomolecules, such as proteins and other cellular metabolites (see, e.g., Li et al., 2000; Rowley et al., 2000; and Kuster and Mann, 1998).

[0187] In certain embodiments, a gas phase ion spectrophotometer is used. In other embodiments, laser-desorption/ionization mass spectrometry is used to identify metabolites. Modern laser desorption/ionization mass spectrometry (“LDI-MS”) can be practiced in two main variations: matrix assisted laser desorption/ionization (“MALDI”) mass spectrometry and surface-enhanced laser desorption/ionization (“SELDI”).

[0188] In MALDI, the metabolite is mixed with a solution containing a matrix, and a drop of the liquid is placed on the surface of a substrate. The matrix solution then co-crystallizes with the biomarkers. The substrate is inserted into the mass spectrometer. Laser energy is directed to the substrate surface where it desorbs and ionizes the proteins without significantly fragmenting them. However, MALDI has limitations as an analytical tool. It does not provide means for fractionating the biological fluid, and the matrix material can interfere with detection, especially for low molecular weight analytes.

[0189] In SELDI, the substrate surface is modified so that it is an active participant in the desorption process. In one variant, the surface is derivatized with adsorbent and/or capture reagents that selectively bind the biomarker of interest. In another variant, the surface is derivatized with energy absorbing molecules that are not desorbed when struck with the laser. In another variant, the surface is derivatized with molecules that bind the biomarker of interest and that contain a photolytic bond that is broken upon application of the laser. In each of these methods, the derivatizing agent generally is localized to a specific location on the substrate surface where the sample is applied. The two methods can be combined by, for example, using a SELDI affinity surface to capture an analyte (e.g. biomarker) and adding matrix-containing liquid to the captured analyte to provide the energy absorbing material.

[0190] For additional information regarding mass spectrometers, see, e.g., Principles of Instrumental Analysis, 3rd edition., Skoog, Saunders College Publishing, Philadelphia, 1985; and Kirk-Othmer Encyclopedia of Chemical Technology, 4.sup.th ed. Vol. 15 (John Wiley & Sons, New York 1995), pp. 1071-1094.

[0191] In some embodiments, the data from mass spectrometry is represented as a mass chromatogram. A “mass chromatogram” is a representation of mass spectrometry data as a chromatogram, where the x-axis represents time and the y-axis represents signal intensity. In one aspect the mass chromatogram is a total ion current (TIC) chromatogram. In another aspect, the mass chromatogram is a base peak chromatogram. In other embodiments, the mass chromatogram is a selected ion monitoring (SIM) chromatogram. In yet another embodiment, the mass chromatogram is a selected reaction monitoring (SRM) chromatogram. In one embodiment, the mass chromatogram is an extracted ion chromatogram (EIC).

[0192] In an EIC, a single feature is monitored throughout the entire run. The total intensity or base peak intensity within a mass tolerance window around a particular analyte's mass-to-charge ratio is plotted at every point in the analysis. The size of the mass tolerance window typically depends on the mass accuracy and mass resolution of the instrument collecting the data. As used herein, the term “feature” refers to a single small metabolite, or a fragment of a metabolite. In some embodiments, the term feature may also include noise upon further investigation.

[0193] Detection of the presence of a metabolite will typically involve detection of signal intensity. This, in turn, can reflect the quantity and character of a biomarker bound to the substrate. For example, in certain embodiments, the signal strength of peak values from spectra of a first sample and a second sample can be compared (e.g., visually, by computer analysis etc.) to determine the relative amounts of particular metabolites. Software programs such as the Biomarker Wizard program (Ciphergen Biosystems, Inc., Fremont, Calif.) can be used to aid in analyzing mass spectra. The mass spectrometers and their techniques are well known.

[0194] A person skilled in the art understands that any of the components of a mass spectrometer, e.g., desorption source, mass analyzer, detect, etc., and varied sample preparations can be combined with other suitable components or preparations described herein, or to those known in the art. For example, in some embodiments a control sample may contain heavy atoms, e.g. ¹³C, thereby permitting the test sample to be mixed with the known control sample in the same mass spectrometry run. Good stable isotopic labeling is included.

[0195] In one embodiment, a laser desorption time-of-flight (TOF) mass spectrometer is used. In laser desorption mass spectrometry, a substrate with a bound marker is introduced into an inlet system. The marker is desorbed and ionized into the gas phase by laser from the ionization source. The ions generated are collected by an ion optic assembly, and then in a time-of-flight mass analyzer, ions are accelerated through a short high voltage field and let drift into a high vacuum chamber. At the far end of the high vacuum chamber, the accelerated ions strike a sensitive detector surface at a different time. Since the time-of-flight is a function of the mass of the ions, the elapsed time between ion formation and ion detector impact can be used to identify the presence or absence of molecules of specific mass to charge ratio.

[0196] In one embodiment of the invention, levels of metabolites are detected by MALDI-TOF mass spectrometry.

[0197] Methods of detecting metabolites also include the use of surface plasmon resonance (SPR). The SPR biosensing technology has been combined with MALDI-TOF mass spectrometry for the desorption and identification of metabolites.

[0198] Data for statistical analysis can be extracted from chromatograms (spectra of mass signals) using softwares for statistical methods known in the art. “Statistics” is the science of making effective use of numerical data relating to groups of individuals or experiments. Methods for statistical analysis are well-known in the art.

[0199] In one embodiment a computer is used for statistical analysis.

[0200] In one embodiment, the Agilent MassProfiler or MassProfilerProfessional software is used for statistical analysis. In another embodiment, the Agilent MassHunter software Qual software is used for statistical analysis. In other embodiments, alternative statistical analysis methods can be used. Such other statistical methods include the Analysis of Variance (ANOVA) test, Chi-square test, Correlation test, Factor analysis test, Mann-Whitney U test, Mean square weighted derivation (MSWD), Pearson product-moment correlation coefficient, Regression analysis, Spearman's rank correlation coefficient, Student's T test, Welch's T-test, Tukey's test, and Time series analysis.

[0201] In different embodiments signals from mass spectrometry can be transformed in different ways to improve the performance of the method. Either individual signals or summaries of the distributions of signals (such as mean, median or variance) can be so transformed. Possible transformations include taking the logarithm, taking some positive or negative power, for example the square root or inverse, or taking the arcsin (Myers, Classical and Modern Regression with Applications, 2nd edition, Duxbury Press, 1990).

[0202] The ability to quantitate the amount of a metabolite allows for the diagnosis of diseases which are known to be associated with an up- or down-regulation of that metabolite.

[0203] Thus, according to another aspect of the present invention there is provided a method of diagnosing a disease of a subject comprising predicting the quantity of at least one metabolite which is indicative of the disease, wherein the predicting is carried out as described herein, thereby diagnosing the disease.

[0204] As used herein the term “diagnosing” refers to determining presence or absence of a pathology (e.g., a disease, disorder, condition or syndrome), classifying a pathology or a symptom, determining a severity of the pathology, monitoring pathology progression, forecasting an outcome of a pathology and/or prospects of recovery and screening of a subject for a specific disease.

[0205] Once the level of the metabolite is measured, it is typically compared to a level of that metabolite in a control subject who is known not to be suffering from said disease. If the amount of the metabolite is significantly up- or down-regulated (e.g. by as much as 1.5 fold, 2 fold, 5 fold, 10 fold or more), then it is indicative that the subject has the disease.

[0206] Measuring the amount of the metabolite in the control subject may be carried out prior to, at the same time as, or following measuring the amount of the metabolite of the test subject. Preferably, the abundance of said metabolite is measured in a plurality of control subjects. The data from such measurements may be stored in a database, as further described herein below.

[0207] Examples of metabolites whose levels are indicative of diseases include cholesterol (for diagnosis of atherosclerosis, cardio vascular disease (CVD)), and glucose (for diagnosis of diabetes). Particular embodiments of the present invention contemplate a metabolite that is not glucose and is also not cholesterol.

[0208] Additional examples of metabolites whose levels are indicative of diseases include trimethylamine N-oxide (TMAO) (for diagnosis of CVD); 3-Carboxy-4-methyl-5-propyl-2-furanpropionic acid (CMPF)—(for diagnosis of chronic kidney disease (CKD)); indoxyl sulfate (for diagnosis of CKD, CVD); and phenylacetylglutamine for diagnosis of CKD, CVD, overall mortality. Additional metabolites which are indicative of disease are listed in Man Lam et al., Journal of Genetics and Genomics 44 (2017) 127e138, the contents of which are incorporated herein by reference.

[0209] Examples of diseases that may be diagnosed according to this aspect of the present invention include, but are not limited to atherosclerosis, cardio vascular disease (CVD), metabolic diseases such as diabetes, chronic kidney disease and cancer.

[0210] According to some embodiments of the invention, screening of the subject for a specific disease is followed by substantiation of the screen results using gold standard methods. Furthermore, once the disease has been diagnosed, the disease may be treated using methods known in the art, particular to each disease.

[0211] It will be appreciated that since the methods describe herein pinpoint particular bacterial functions (e.g. species, genus, families etc.) that contribute to the amount of blood metabolites, the present invention can be used for determining which microbes should be altered in order to bring about a particular effect on a particular blood metabolite.

[0212] Thus, according to yet another aspect of the present invention there is provided a method of altering the amount of a metabolite. The method optionally and preferably comprises predicting the amount of the metabolite, and administering to the subject one or more agents which specifically increases or decreases the microbe(s), wherein the agent is selected based on the quantity of the metabolite. The prediction of the metabolite can be done using a machine learning procedure, as described above with respect to FIGS. 11 and 12. Thus, computer readable medium 110 storing the library of machine learning procedures is accessed. The library can be searched for a trained machine learning procedure associated with the metabolite. The amounts of the microbes are fed to the selected procedure, which provides an output indicative of the quantity of the metabolite in the blood.

[0213] The microbe(s) of the microbiome to be specifically increased or decreased can be selected, according to some embodiments of the present invention, using machine learning. This can be done by operating the trained machine learning procedure to solve the aforementioned inverse problem (FIG. 14), in a manner that will now be explained.

[0214] Suppose, for example, that a biological microbiota sample is taken from the body of the subject and is analyzed by biological assays. Suppose that the results of the assays show that the biological microbiota sample contains a set of microbes present at a respective set of amounts in the biological microbiota sample. Suppose further that the amounts of microbes found by the biological assays are fed to a machine learning procedure that has been trained using microbiome data and that is associated with a particular metabolite. Suppose further that the machine learning procedure predicts (FIG. 12) a certain quantity of the particular metabolite, that the predicted quantity is clinically unsatisfactory, and that it is desired to alter the quantity of the particular metabolite to a new, desired, quantity. In this case, the desired, quantity of the particular metabolite can be fed to a machine learning procedure (that has been trained using microbiome data and that is associated with the particular metabolite) in a manner that the machine learning procedure propagates backwards to solve the inverse problem and to provide a set of recommended amounts of microbes (FIG. 14).

[0215] The recommended amounts of microbes found by the machine learning procedure can then be compared to the amounts of microbes found by the biological assays, and the agents that are administered are selected based on this comparison. For example, when for a particular microbe, the recommended amount is less that the amount found by the biological assays, the subject is administered with an agent that increases the amount of that particular microbe. Conversely, when for a particular microbe, the recommended amount is more that the amount found by the biological assays, the subject is administered with an agent that decreases the amount of that particular microbe. Also, when for a particular microbe, the recommended amount is the same or approximately the same (with tolerance of up to 10%) as the amount found by the biological assays, no agent is administered for this microbe.

[0216] According to one particular embodiment, the altering is carried out by increasing a bacterial population whose level is predicted to being below the level in a healthy subject. Table 1 provides examples of bacterial populations which positively and negatively correlate with a particular metabolite, predictor 1 being of the most significance and predictor 5 being of the least significance.

[0217] For example, according to Table 1, a positive number represents a positive correlation of that microbe with the corresponding metabolite and a negative number represents an inverse correlation of that microbe with the corresponding metabolite. Therefore in order to increase the level of X-16124 for example, agents may be provided which increase the level of F: Eggerthellaceae; and decrease the level of S: Gordonibacter pamelaeae.

[0218] Altering the amount of particular metabolites may be beneficial to the health of the subject.

[0219] According to a particular embodiment, altering the amount of a metabolite is beneficial for the treatment and/or prevention of a disease. Exemplary diseases include, but are not limited to those described herein above.

[0220] The term “treating” refers to inhibiting, preventing or arresting the development of a pathology (disease, disorder or condition) and/or causing the reduction, remission, or regression of a pathology. Those of skill in the art will understand that various methodologies and assays can be used to assess the development of a pathology, and similarly, various methodologies and assays may be used to assess the reduction, remission or regression of a pathology.

[0221] As used herein, the term “preventing” refers to keeping a disease, disorder or condition from occurring in a subject who may be at risk for the disease, but has not yet been diagnosed as having the disease.

[0222] Upregulation:

[0223] An agent which increases the amount of a particular bacteria includes that particular bacteria itself (i.e. a probiotic composition).

[0224] The term “probiotic” as used herein, refers to one or more microorganisms which, when administered appropriately, can confer a health benefit on the host or subject and/or reduction of risk and/or symptoms of a disease, disorder, condition, or event in a host organism.

[0225] The present invention contemplates an agent which up-regulates at least one strain, 10 strains, 20 strains, 30 strains, 40 strains, 50 strains, 60 strains, 70 strains, 80 strains, 90 strains or all of the strains of the above disclosed species.

[0226] In one embodiment, the agent specifically upregulates the specified species of bacteria.

[0227] Thus, for example, the agent may increase the amount of the specified bacterial species as compared to at least one other bacterial species of the microbiome of the subject, by at least 2 fold. According to a particular embodiment, the agent upregulates the particular bacterial species by at least 5 fold, 10 fold or more as compared to at least one other bacterial species of the microbiome.

[0228] In another embodiment, the agent increases the amount of the specified bacterial species as compared to at least 10% of the total bacterial species of the microbiome of the subject, by at least 2 fold. According to a particular embodiment, the agent upregulates the specified bacterial species by at least 5 fold, 10 fold or more as compared to at least 10% of the total bacterial species of the microbiome of the subject.

[0229] In another embodiment, the agent increases the amount of the specified bacterial species as compared to at least 20% of the total bacterial species of the microbiome of the subject, by at least 2 fold. According to a particular embodiment, the agent upregulates the specified bacterial species by at least 5 fold, 10 fold or more as compared to at least 20% of the total bacterial species of the microbiome of the subject.

[0230] In another embodiment, the agent increases the amount of the specified bacterial species as compared to at least 30% of the total bacterial species of the microbiome of the subject, by at least 2 fold. According to a particular embodiment, the agent upregulates the specified bacterial species by at least 5 fold, 10 fold or more as compared to at least 30% of the total bacterial species of the microbiome of the subject.

[0231] In another embodiment, the agent increases the amount of the specified bacterial species as compared to at least 40% of the total bacterial species of the microbiome of the subject, by at least 2 fold. According to a particular embodiment, the agent upregulates the specified bacterial species by at least 5 fold, 10 fold or more as compared to at least 40% of the total bacterial species of the microbiome of the subject.

[0232] In another embodiment, the agent increases the amount of the specified bacterial species as compared to at least 50% of the total bacterial species of the microbiome of the subject, by at least 2 fold. According to a particular embodiment, the agent upregulates the specified bacterial species by at least 5 fold, 10 fold or more as compared to at least 50% of the total bacterial species of the microbiome of the subject.

[0233] In another embodiment, the agent increases the amount of the specified bacterial species as compared to at least 60% of the total bacterial species of the microbiome of the subject, by at least 2 fold. According to a particular embodiment, the agent upregulates the specified bacterial species by at least 5 fold, 10 fold or more as compared to at least 60% of the total bacterial species of the microbiome of the subject.

[0234] In another embodiment, the agent increases the amount of the specified bacterial species as compared to at least 70% of the total bacterial species of the microbiome of the subject, by at least 2 fold. According to a particular embodiment, the agent upregulates the specified bacterial species by at least 5 fold, 10 fold or more as compared to at least 70% of the total bacterial species of the microbiome of the subject.

[0235] In another embodiment, the agent increases the amount of the specified bacterial species as compared to at least 80% of the total bacterial species of the microbiome of the subject, by at least 2 fold. According to a particular embodiment, the agent upregulates the specified bacterial species by at least 5 fold, 10 fold or more as compared to at least 80% of the total bacterial species of the microbiome of the subject.

[0236] In another embodiment, the agent increases the amount of the specified bacterial species as compared to at least 90% of the total bacterial species of the microbiome of the subject, by at least 2 fold. According to a particular embodiment, the agent upregulates the specified bacterial species by at least 5 fold, 10 fold or more as compared to at least 90% of the total bacterial species of the microbiome of the subject.

[0237] According to an embodiment of this aspect of the present invention, the agent increases the species of bacteria by at least 2 fold as compared to at least one other species of bacteria that belongs to a different genus present in the microbiome.

[0238] According to a particular embodiment the agent increases the species of bacteria by at least 5 fold, 10 fold or more as compared to at least one other species of bacteria that belongs to a different genus present in the microbiome.

[0239] According to one embodiment, the agent increases the species of bacteria by at least 2 fold as compared to at least one other species of bacteria that belongs to the same genus present in the microbiome.

[0240] According to a particular embodiment the agent increases the species of bacteria by at least 5 fold, 10 fold or more as compared to at least one other species of bacteria that belongs to the same genus present in the microbiome.

[0241] Preferably, the agents of this aspect of the present invention are capable of increases the growth and/or colonization of the bacterial species.

[0242] Exemplary agents that are capable of increasing the specified species include microbial compositions. Such microbial compositions typically do not comprise more than 100 bacterial species, more than 90 bacterial species, more than 80 bacterial species, more than 70 bacterial species, more than 60 bacterial species, more than 50 bacterial species, more than 40 bacterial species, more than 30 bacterial species, more than 20 bacterial species, more than 10 bacterial species, or even more than 5 bacterial species.

[0243] The microbial compositions of the present invention are not fecal transplants derived from a healthy subject.

[0244] The bacterial compositions can comprise more than one strain of a bacterial species, more than 2 strains of a bacterial species, more than 3 strains of a bacterial species, more than 4 strains of a bacterial species, more than 5 strains of a bacterial species, more than 6 strains of a bacterial species, more than 7 strains of a bacterial species, more than 8 strains of a bacterial species, more than 9 strains of a bacterial species, more than 10 strains of a bacterial species, more than 11 strains of a bacterial species, more than 12 strains of a bacterial species, more than 13 strains of a bacterial species, more than 14 strains of a bacterial species, more than 15 strains of a bacterial species, more than 16 strains of a bacterial species, more than 17 strains of a bacterial species, more than 18 strains of a bacterial species, more than 19 strains of a bacterial species, more than 20 strains of a bacterial species or more.

[0245] The present inventors contemplate microbial compositions where more than 10%, 20%, 30%, 40%, 50%, 60%, 70%, 80%, 90% or even 100%, of the bacteria of the composition is bacteria of the specified bacterial species.

[0246] The present inventors contemplate any formulation for the microbial compositions so long as the bacterial population within is capable of propagating when administered to the subject.

[0247] The compositions of the present invention may be formulated as a food supplement, an enema, a tablet, a capsule or a syringe.

[0248] The compositions of the invention can be formulated as a slurry, saline or buffered suspensions (e.g., for an enema, suspended in a buffer or a saline), in a drink (e.g., a milk, yoghurt, a shake, a flavoured drink or equivalent) for oral delivery, and the like.

[0249] In alternative embodiments, compositions of the invention can be formulated as an enema product, a spray dried product, reconstituted enema, a small capsule product, a small capsule product suitable for administration to children, a bulb syringe, a bulb syringe suitable for a home enema with a saline addition, a powder product, a powder product in oxygen deprived sachets, a powder product in oxygen deprived sachets that can be added to, for example, a bulb syringe or enema, or a spray dried product in a device that can be attached to a container with an appropriate carrier medium such as yoghurt or milk and that can be directly incorporated and given as a dosing for example for children.

[0250] In one embodiment, compositions of the invention can be delivered directly in a carrier medium via a screw-top lid wherein the bacterial material is suspended in the lid and released on twisting the lid straight into the carrier medium.

[0251] In alternative embodiments methods of delivery of compositions of the invention include use of bacterial slurries into the bowel, via an enema suspended in saline or a buffer, via a small bowel infusion via a nasoduodenal tube, via a gastrostomy, or by using a colonoscope.

[0252] According to still another embodiment, the microbial composition of any of the aspects of the present invention is devoid (or comprises only trace quantities) of fecal material (e.g., fiber).

[0253] The probiotic bacteria may be in any suitable form, for example in a powdered dry form. In addition, the probiotic microorganism may have undergone processing in order for it to increase its survival. For example, the microorganism may be coated or encapsulated in a polysaccharide, fat, starch, protein or in a sugar matrix. Standard encapsulation techniques known in the art can be used. For example, techniques discussed in U.S. Pat. No. 6,190,591, which is hereby incorporated by reference in its entirety, may be used.

[0254] According to a particular embodiment, the probiotic microorganism composition is formulated in a food product, functional food or nutraceutical.

[0255] In some embodiments, a food product, functional food or nutraceutical is or comprises a dairy product. In some embodiments, a dairy product is or comprises a yogurt product. In some embodiments, a dairy product is or comprises a milk product. In some embodiments, a dairy product is or comprises a cheese product. In some embodiments, a food product, functional food or nutraceutical is or comprises a juice or other product derived from fruit. In some embodiments, a food product, functional food or nutraceutical is or comprises a product derived from vegetables. In some embodiments, a food product, functional food or nutraceutical is or comprises a grain product, including but not limited to cereal, crackers, bread, and/or oatmeal. In some embodiments, a food product, functional food or nutraceutical is or comprises a rice product. In some embodiments, a food product, functional food or nutraceutical is or comprises a meat product.

[0256] Prior to administration, the subject may be pretreated with an agent which reduces the number of naturally occurring microbes in the microbiome (e.g. by antibiotic treatment). According to a particular embodiment, the treatment significantly eliminates the naturally occurring gut microflora by at least 20%, 30% 40%, 50%, 60%, 70%, 80% or even 90%.

[0257] Downregulation:

[0258] The present invention contemplates an agent which down-regulates at least one strain, 10% of the strains, 20% of the strains, 30% of the strains, 40% of the strains, 50% of the strains, 60% of the strains, 70% of the strains, 80% of the strains, 90% of the strains or all of the strains of any of the uncovered species recited in Table 1.

[0259] Thus, for example, the agent may reduce the amount of the specified bacterial species as compared to at least one other bacterial species of the microbiome of the subject, by at least 2 fold. According to a particular embodiment, the agent downregulates the particular bacterial species by at least 5 fold, 10 fold or more as compared to at least one other bacterial species of the microbiome.

[0260] In another embodiment, the agent reduces the amount of the specified bacterial species as compared to at least 10% of the total bacterial species of the microbiome of the subject, by at least 2 fold. According to a particular embodiment, the agent downregulates the specified bacterial species by at least 5 fold, 10 fold or more as compared to at least 10% of the total bacterial species of the microbiome of the subject.

[0261] In another embodiment, the agent reduces the amount of the specified bacterial species as compared to at least 20% of the total bacterial species of the microbiome of the subject, by at least 2 fold. According to a particular embodiment, the agent downregulates the specified bacterial species by at least 5 fold, 10 fold or more as compared to at least 20% of the total bacterial species of the microbiome of the subject.

[0262] In another embodiment, the agent reduces the amount of the specified bacterial species as compared to at least 30% of the total bacterial species of the microbiome of the subject, by at least 2 fold. According to a particular embodiment, the agent downregulates the specified bacterial species by at least 5 fold, 10 fold or more as compared to at least 30% of the total bacterial species of the microbiome of the subject.

[0263] In another embodiment, the agent reduces the amount of the specified bacterial species as compared to at least 40% of the total bacterial species of the microbiome of the subject, by at least 2 fold. According to a particular embodiment, the agent downregulates the specified bacterial species by at least 5 fold, 10 fold or more as compared to at least 40% of the total bacterial species of the microbiome of the subject.

[0264] In another embodiment, the agent reduces the amount of the specified bacterial species as compared to at least 50% of the total bacterial species of the microbiome of the subject, by at least 2 fold. According to a particular embodiment, the agent downregulates the specified bacterial species by at least 5 fold, 10 fold or more as compared to at least 50% of the total bacterial species of the microbiome of the subject.

[0265] In another embodiment, the agent reduces the amount of the specified bacterial species as compared to at least 60% of the total bacterial species of the microbiome of the subject, by at least 2 fold. According to a particular embodiment, the agent downregulates the specified bacterial species by at least 5 fold, 10 fold or more as compared to at least 60% of the total bacterial species of the microbiome of the subject.

[0266] In another embodiment, the agent reduces the amount of the specified bacterial species as compared to at least 70% of the total bacterial species of the microbiome of the subject, by at least 2 fold. According to a particular embodiment, the agent downregulates the specified bacterial species by at least 5 fold, 10 fold or more as compared to at least 70% of the total bacterial species of the microbiome of the subject.

[0267] In another embodiment, the agent reduces the amount of the specified bacterial species as compared to at least 80% of the total bacterial species of the microbiome of the subject, by at least 2 fold. According to a particular embodiment, the agent downregulates the specified bacterial species by at least 5 fold, 10 fold or more as compared to at least 80% of the total bacterial species of the microbiome of the subject.

[0268] In another embodiment, the agent reduces the amount of the specified bacterial species as compared to at least 90% of the total bacterial species of the microbiome of the subject, by at least 2 fold. According to a particular embodiment, the agent downregulates the specified bacterial species by at least 5 fold, 10 fold or more as compared to at least 90% of the total bacterial species of the microbiome of the subject.

[0269] According to an embodiment of this aspect of the present invention, the agent reduces the species of bacteria by at least 2 fold as compared to at least one other species of bacteria that belongs to a different genus present in the microbiome.

[0270] According to a particular embodiment the agent reduces the species of bacteria by at least 5 fold, 10 fold or more as compared to at least one other species of bacteria that belongs to a different genus present in the microbiome.

[0271] According to one embodiment, the agent reduces the species of bacteria by at least 2 fold as compared to at least one other species of bacteria that belongs to the same genus present in the microbiome.

[0272] According to a particular embodiment the agent reduces the species of bacteria by at least 5 fold, 10 fold or more as compared to at least one other species of bacteria that belongs to the same genus present in the microbiome.

[0273] Preferably, the agents of this aspect of the present invention are capable of decreasing the growth and/or colonization of the bacterial species.

[0274] The agent which downregulates the bacteria that is recited in Tables 1 or 2 may be able to reduce the amount (either absolute or relative amount) and/or activity (either absolute or relative activity) of a particular strain of bacteria.

[0275] According to a particular embodiment, the agent specifically downregulates the specified strain.

[0276] Thus, in one embodiment, the agent reduces the amount of the specified bacterial strain as compared to at least one other bacterial strain of the microbiome of the subject, by at least 2 fold. According to a particular embodiment, the agent downregulates the particular bacterial strain by at least 5 fold, 10 fold or more as compared to at least one other bacterial strain of the microbiome.

[0277] In another embodiment, the agent reduces the amount of the specified bacterial strain as compared to at least 10% of the total bacterial strains of the microbiome of the subject, by at least 2 fold. According to a particular embodiment, the agent downregulates the specified bacterial strain by at least 5 fold, 10 fold or more as compared to at least 10% of the total bacterial strains of the microbiome of the subject.

[0278] In another embodiment, the agent reduces the amount of the specified bacterial strain as compared to at least 20% of the total bacterial strains of the microbiome of the subject, by at least 2 fold. According to a particular embodiment, the agent downregulates the specified bacterial strain by at least 5 fold, 10 fold or more as compared to at least 20% of the total bacterial strains of the microbiome of the subject.

[0279] In another embodiment, the agent reduces the amount of the specified bacterial strain as compared to at least 30% of the total bacterial strains of the microbiome of the subject, by at least 2 fold. According to a particular embodiment, the agent downregulates the specified bacterial strain by at least 5 fold, 10 fold or more as compared to at least 30% of the total bacterial strains of the microbiome of the subject.

[0280] In another embodiment, the agent reduces the amount of the specified bacterial strain as compared to at least 40% of the total bacterial strains of the microbiome of the subject, by at least 2 fold. According to a particular embodiment, the agent downregulates the specified bacterial strain by at least 5 fold, 10 fold or more as compared to at least 40% of the total bacterial strains of the microbiome of the subject.

[0281] In another embodiment, the agent reduces the amount of the specified bacterial strain as compared to at least 50% of the total bacterial strains of the microbiome of the subject, by at least 2 fold. According to a particular embodiment, the agent downregulates the specified bacterial strain by at least 5 fold, 10 fold or more as compared to at least 50% of the total bacterial strains of the microbiome of the subject.

[0282] In another embodiment, the agent reduces the amount of the specified bacterial strain as compared to at least 60% of the total bacterial strains of the microbiome of the subject, by at least 2 fold. According to a particular embodiment, the agent downregulates the specified bacterial strain by at least 5 fold, 10 fold or more as compared to at least 60% of the total bacterial strains of the microbiome of the subject.

[0283] In another embodiment, the agent reduces the amount of the specified bacterial strain as compared to at least 70% of the total bacterial strains of the microbiome of the subject, by at least 2 fold. According to a particular embodiment, the agent downregulates the specified bacterial strain by at least 5 fold, 10 fold or more as compared to at least 70% of the total bacterial strains of the microbiome of the subject.

[0284] In another embodiment, the agent reduces the amount of the specified bacterial strain as compared to at least 80% of the total bacterial strains of the microbiome of the subject, by at least 2 fold. According to a particular embodiment, the agent downregulates the specified bacterial strain by at least 5 fold, 10 fold or more as compared to at least 80% of the total bacterial strains of the microbiome of the subject.

[0285] In another embodiment, the agent reduces the amount of the specified bacterial strain as compared to at least 90% of the total bacterial strains of the microbiome of the subject, by at least 2 fold. According to a particular embodiment, the agent downregulates the specified bacterial strain by at least 5 fold, 10 fold or more as compared to at least 90% of the total bacterial strains of the microbiome of the subject.

[0286] According to an embodiment of this aspect of the present invention, the agent reduces the strain of bacteria by at least 2 fold as compared to at least one other strain of bacteria that belongs to a different species present in the microbiome.

[0287] According to a particular embodiment the agent reduces the strain of bacteria by at least 5 fold, 10 fold or more as compared to at least one other strain of bacteria that belongs to a different species present in the microbiome.

[0288] According to one embodiment, the agent reduces the strain of bacteria by at least 2 fold as compared to at least one other strain of bacteria that belongs to the same species present in the microbiome.

[0289] According to a particular embodiment the agent reduces the strain of bacteria by at least 5 fold, 10 fold or more as compared to at least one other strain of bacteria that belongs to the same species present in the microbiome.

[0290] Preferably, the agents of this aspect of the present invention are capable of decreasing the growth and/or colonization of the bacterial strain.

[0291] An exemplary agent which is capable of reducing a particular bacterial species or strain is an antibiotic.

[0292] As used herein, the term “antibiotic agent” refers to a group of chemical substances, isolated from natural sources or derived from antibiotic agents isolated from natural sources, having a capacity to inhibit growth of, or to destroy bacteria, and other microorganisms, used chiefly in treatment of infectious diseases.

[0293] Examples of antibiotics contemplated by the present invention include, but are not limited to Daptomycin; Gemifloxacin; Telavancin; Ceftaroline; Fidaxomicin; Amoxicillin; Ampicillin; Bacampicillin; Carbenicillin; Cloxacillin; Dicloxacillin; Flucloxacillin; Mezlocillin; Nafcillin; Oxacillin; Penicillin G; Penicillin V; Piperacillin; Pivampicillin; Pivmecillinam; Ticarcillin; Aztreonam; Imipenem; Doripenem; Meropenem; Ertapenem; Clindamycin; Lincomycin; Pristinamycin; Quinupristin; Cefacetrile (cephacetrile); Cefadroxil (cefadroxyl); Cefalexin (cephalexin); Cefaloglycin (cephaloglycin); Cefalonium (cephalonium); Cefaloridine (cephaloridine); Cefalotin (cephalothin); Cefapirin (cephapirin); Cefatrizine; Cefazaflur; Cefazedone; Cefazolin (cephazolin); Cefradine (cephradine); Cefroxadine; Ceftezole; Cefaclor; Cefamandole; Cefmetazole; Cefonicid; Cefotetan; Cefoxitin; Cefprozil (cefproxil); Cefuroxime; Cefuzonam; Cefcapene; Cefdaloxime; Cefdinir; Cefditoren; Cefetamet; Cefixime; Cefmenoxime; Cefodizime; Cefotaxime; Cefpimizole; Cefpodoxime; Cefteram; Ceftibuten; Ceftiofur; Ceftiolene; Ceftizoxime; Ceftriaxone; Cefoperazone; Ceftazidime; Cefclidine; Cefepime; Cefluprenam; Cefoselis; Cefozopran; Cefpirome; Cefquinome; Fifth Generation; Ceftobiprole; Ceftaroline; Not Classified; Cefaclomezine; Cefaloram; Cefaparole; Cefcanel; Cefedrolor; Cefempidone; Cefetrizole; Cefivitril; Cefmatilen; Cefmepidium; Cefovecin; Cefoxazole; Cefrotil; Cefsumide; Cefuracetime; Ceftioxide; Azithromycin; Erythromycin; Clarithromycin; Dirithromycin; Roxithromycin; Telithromycin; Amikacin; Gentamicin; Kanamycin; Neomycin; Netilmicin; Paromomycin; Streptomycin; Tobramycin; Flumequine; Nalidixic acid; Oxolinic acid; Piromidic acid; Pipemidic acid; Rosoxacin; Ciprofloxacin; Enoxacin; Lomefloxacin; Nadifloxacin; Norfloxacin; Ofloxacin; Pefloxacin; Rufloxacin; Balofloxacin; Gatifloxacin; Grepafloxacin; Levofloxacin; Moxifloxacin; Pazufloxacin; Sparfloxacin; Temafloxacin; Tosufloxacin; Besifloxacin; Clinafloxacin; Gemifloxacin; Sitafloxacin; Troyafloxacin; Prulifloxacin; Sulfamethizole; Sulfamethoxazole; Sulfisoxazole; Trimethoprim-Sulfamethoxazole; Demeclocycline; Doxycycline; Minocycline; Oxytetracycline; Tetracycline; Tigecycline; Chloramphenicol; Metronidazole; Tinidazole; Nitrofurantoin; Vancomycin; Teicoplanin; Telavancin; Linezolid; Cycloserine 2; Rifampin; Rifabutin; Rifapentine; B acitracin; Polymyxin B; Viomycin; Capreomycin.

[0294] Antibacterial agents also include antibacterial peptides. Examples include but are not limited to abaecin; andropin; apidaecins; bombinin; brevinins; buforin II; CAP18; cecropins; ceratotoxin; defensins; dermaseptin; dermcidin; drosomycin; esculentins; indolicidin; LL37; magainin; maximum H5; melittin; moricin; prophenin; protegrin; and or tachyplesins.

[0295] According to a particular embodiment, the antibiotic is a non-absorbable antibiotic.

[0296] Other agents which are not antibiotics are also contemplated by the present inventors.

[0297] Thus the present inventors contemplate the use of bacteriophages to downregulate the disclosed bacterial species/strains.

[0298] As used herein, the term “bacteriophage” refers to a virus that infects and replicates within bacteria. Bacteriophages are composed of proteins that encapsulate a genome comprising either DNA or RNA. Bacteriophages replicate within bacteria following the injection of their genome into the bacterial cytoplasm.

[0299] In one embodiment, the bacteriophage is a lytic bacteriophage. In another embodiment, the bacteriophage is lysogenic.

[0300] In some embodiments, the bacteriophages are used in combination with one or more other bacteriophages. The combinations of bacteriophages can target the same detrimental microorganism or different detrimental microorganisms. Preferably, the combination of bacteriophages targets the same detrimental microorganism.

[0301] In some embodiments, the bacteriophage or combination of bacteriophages are used in combination with one or more probiotic microorganisms—such as those described herein below.

[0302] In other embodiments, the bacteriophages or combination of bacteriophages are used in combination with one or more antibiotic, as disclosed herein.

[0303] In some embodiments, the bacteriophage is administered orally at a dose ranging from 10⁵ to 10¹⁰ plaque-forming units (PFU)/g, preferably 10⁷ to 10⁸ PFU/g. In some embodiments, the bacteriophages are administered at a dose of 10⁵ to 10¹⁰ PFU/day, preferably 10⁷ to 10⁸ PFU/day.

[0304] According to another embodiment, the agent is a bacteriophage protein such as an isolated phage protein, e.g., a lysin protein, tail protein, or active fragment.

[0305] In one embodiment, the agent which is capable of down-regulating a particular bacterial species/strain is a bacterial population that competes with the bacterial species/strain for essential resources. Bacterial compositions are further described herein below.

[0306] In still another embodiment, the agent which is capable of down-regulating a particular bacterial species/strain is a metabolite of a competing bacterial population (or even from the same species/strain) that serves to decrease the relative amount of the bacterial species/strain.

[0307] Additional agents that can specifically reduce a particular bacterial species or strain are known in the art and include polynucleotide silencing agents.

[0308] Preferably, the polynucleotide silencing agent of this aspect of the present invention targets a sequence that encodes at least one essential gene (i.e., compatible with life) in the bacteria. The sequence which is targeted should be specific to the particular bacteria species that it is desired to down-regulate. Such genes include ribosomal RNA genes (16S and 23S), ribosomal protein genes, tRNA-synthetases, as well as additional genes shown to be essential such as dnaB, fabI, folA, gyrB, murA, pytH, metG, and tufA(B).

[0309] According to an embodiment of the invention, the polynucleotide silencing agent is specific to the target RNA and does not cross inhibit or silence other targets or a splice variant which exhibits 99% or less global homology to the target gene, e.g., less than 98%, 97%, 96%, 95%, 94%, 93%, 92%, 91%, 90%, 89%, 88%, 87%, 86%, 85%, 84%, 83%, 82%, 81% global homology to the target gene; as determined by PCR, Western blot, Immunohistochemistry and/or flow cytometry.

[0310] One agent capable of downregulating an essential bacterial gene is a RNA-guided endonuclease technology e.g. CRISPR system. In one embodiment, the CRISPR system is expressed in a bacteriophage.

[0311] As used herein, the term “CRISPR system” also known as Clustered Regularly Interspaced Short Palindromic Repeats refers collectively to transcripts and other elements involved in the expression of or directing the activity of CRISPR-associated genes, including sequences encoding a Cas gene (e.g. CRISPR-associated endonuclease 9), a tracr (trans-activating CRISPR) sequence (e.g. tracrRNA or an active partial tracrRNA), a tracr-mate sequence (encompassing a “direct repeat” and a tracrRNA-processed partial direct repeat) or a guide sequence (also referred to as a “spacer”) including but not limited to a crRNA sequence (i.e. an endogenous bacterial RNA that confers target specificity yet requires tracrRNA to bind to Cas) or a sgRNA sequence (i.e. single guide RNA).

[0312] In some embodiments, one or more elements of a CRISPR system is derived from a type I, type II, or type III CRISPR system. In some embodiments, one or more elements of a CRISPR system (e.g. Cas) is derived from a particular organism comprising an endogenous CRISPR system, such as Streptococcus pyogenes, Neisseria meningitides, Streptococcus thermophilus or Treponema denticola.

[0313] In general, a CRISPR system is characterized by elements that promote the formation of a CRISPR complex at the site of a target sequence (also referred to as a protospacer in the context of an endogenous CRISPR system).

[0314] In the context of formation of a CRISPR complex, “target sequence” refers to a sequence to which a guide sequence (i.e. guide RNA e.g. sgRNA or crRNA) is designed to have complementarity, where hybridization between a target sequence and a guide sequence promotes the formation of a CRISPR complex. Full complementarity is not necessarily required, provided there is sufficient complementarity to cause hybridization and promote formation of a CRISPR complex. Thus, according to some embodiments, global homology to the target sequence may be of 50%, 60%, 70%, 75%, 80%, 85%, 90%, 95% or 99%. A target sequence may comprise any polynucleotide, such as DNA or RNA polynucleotides. In some embodiments, a target sequence is located in the nucleus or cytoplasm of a cell.

[0315] Thus, the CRISPR system comprises two distinct components, a guide RNA (gRNA) that hybridizes with the target sequence, and a nuclease (e.g. Type-II Cas9 protein), wherein the gRNA targets the target sequence and the nuclease (e.g. Cas9 protein) cleaves the target sequence. The guide RNA may comprise a combination of an endogenous bacterial crRNA and tracrRNA, i.e. the gRNA combines the targeting specificity of the crRNA with the scaffolding properties of the tracrRNA (required for Cas9 binding). Alternatively, the guide RNA may be a single guide RNA capable of directly binding Cas.

[0316] Typically, in the context of an endogenous CRISPR system, formation of a CRISPR complex (comprising a guide sequence hybridized to a target sequence and complexed with one or more Cas proteins) results in cleavage of one or both strands in or near (e.g. within 1, 2, 3, 4, 5, 6, 7, 8, 9, 10, 20, 50, or more base pairs from) the target sequence. Without wishing to be bound by theory, the tracr sequence, which may comprise or consist of all or a portion of a wild-type tracr sequence (e.g. about or more than about 20, 26, 32, 45, 48, 54, 63, 67, 85, or more nucleotides of a wild-type tracr sequence), may also form part of a CRISPR complex, such as by hybridization along at least a portion of the tracr sequence to all or a portion of a tracr mate sequence that is operably linked to the guide sequence.

[0317] In some embodiments, the tracr sequence has sufficient complementarity to a tracr mate sequence to hybridize and participate in formation of a CRISPR complex. As with the target sequence, a complete complementarity is not needed, provided there is sufficient to be functional. In some embodiments, the tracr sequence has at least 50%, 60%, 70%, 80%, 90%, 95% or 99% of sequence complementarity along the length of the tracr mate sequence when optimally aligned.

[0318] Introducing CRISPR/Cas into a cell may be effected using one or more vectors driving expression of one or more elements of a CRISPR system such that expression of the elements of the CRISPR system direct formation of a CRISPR complex at one or more target sites. For example, a Cas enzyme, a guide sequence linked to a tracr-mate sequence, and a tracr sequence could each be operably linked to separate regulatory elements on separate vectors. Alternatively, two or more of the elements expressed from the same or different regulatory elements, may be combined in a single vector, with one or more additional vectors providing any components of the CRISPR system not included in the first vector. CRISPR system elements that are combined in a single vector may be arranged in any suitable orientation, such as one element located 5′ with respect to (“upstream” of) or 3′ with respect to (“downstream” of) a second element. The coding sequence of one element may be located on the same or opposite strand of the coding sequence of a second element, and oriented in the same or opposite direction. A single promoter may drive expression of a transcript encoding a CRISPR enzyme and one or more of the guide sequence, tracr mate sequence (optionally operably linked to the guide sequence), and a tracr sequence embedded within one or more intron sequences (e.g. each in a different intron, two or more in at least one intron, or all in a single intron).

[0319] As well as altering the bacterial composition of the microbiome of the subject, the present inventors also contemplate altering food intake to control the level of a metabolite.

[0320] Thus, according to a particular aspect of the present invention there is provided a method of providing dietary advice to a subject, the method comprising predicting the level of a metabolite in the blood by carrying out the methods described herein, wherein when said metabolite is above or below the recommended level of said metabolite, recommending consumption of at least one food type that alters the level of said metabolite.

[0321] The dietary advice can be provided, according to some embodiments of the present invention, using machine learning. This can be done by operating the trained machine learning procedure to solve the aforementioned inverse problem (FIG. 15), in a manner that will now be explained.

[0322] Suppose, for example, that for a particular subject it was found that a certain quantity Q1 of a particular metabolite is clinically unsatisfactory, and that it is desired to alter the quantity of the particular metabolite to a new, desired, quantity Q2. The quantity Q1 can be found by performing a blood test or, more preferably, by feeding a machine learning procedure that has been trained using food consumption data and that is associated with a particular metabolite, with the frequency and/or the daily mean consumption of several food types (FIG. 13).

[0323] The desired quantity Q2 of the particular metabolite can fed to a machine learning procedure (that has been trained using food consumption data and that is associated with the particular metabolite) in a manner that the machine learning procedure propagates backwards to solve the inverse problem and to provide a recommended food consumption (FIG. 15), typically a recommended set of food types and optionally a recommended consumption frequency and/or daily mean consumption of food types. The recommended food consumption can be used as the dietary advice.

[0324] In one embodiment, the metabolite is set forth in Table 3 and more preferably in Table 4.

[0325] The dietary advise provided to the subject could include a list of foods that may help in increasing or decreasing that metabolite.

[0326] According to one particular embodiment, the altering is carried out by increasing intake of a food whose level is predicted to being below the level in a healthy subject. Table 3 provides examples food types which positively correlate with a particular metabolite.

[0327] For example, according to Table 3, in order to increase the level of 1-methylxanthine for example, the amount of coffee intake should be increased.

[0328] Tables 3 and 4 list the most preferred foods that can be altered in order to alter the level of the corresponding metabolite, predictor 1 being of the most significance and predictor 5 being of the least significance. Of note, the abbreviation “wt” which appears in the Tables refers to the daily mean consumption of specific food types in grams.

[0329] As used herein the term “about” refers to ±10%.

[0330] The terms “comprises”, “comprising”, “includes”, “including”, “having” and their conjugates mean “including but not limited to”.

[0331] The term “consisting of” means “including and limited to”.

[0332] The term “consisting essentially of” means that the composition, method or structure may include additional ingredients, steps and/or parts, but only if the additional ingredients, steps and/or parts do not materially alter the basic and novel characteristics of the claimed composition, method or structure.

[0333] As used herein, the singular form “a”, “an” and “the” include plural references unless the context clearly dictates otherwise. For example, the term “a compound” or “at least one compound” may include a plurality of compounds, including mixtures thereof.

[0334] Throughout this application, various embodiments of this invention may be presented in a range format. It should be understood that the description in range format is merely for convenience and brevity and should not be construed as an inflexible limitation on the scope of the invention. Accordingly, the description of a range should be considered to have specifically disclosed all the possible subranges as well as individual numerical values within that range. For example, description of a range such as from 1 to 6 should be considered to have specifically disclosed subranges such as from 1 to 3, from 1 to 4, from 1 to 5, from 2 to 4, from 2 to 6, from 3 to 6 etc., as well as individual numbers within that range, for example, 1, 2, 3, 4, 5, and 6. This applies regardless of the breadth of the range.

[0335] Whenever a numerical range is indicated herein, it is meant to include any cited numeral (fractional or integral) within the indicated range. The phrases “ranging/ranges between” a first indicate number and a second indicate number and “ranging/ranges from” a first indicate number “to” a second indicate number are used herein interchangeably and are meant to include the first and second indicated numbers and all the fractional and integral numerals therebetween.

[0336] As used herein the term “method” refers to manners, means, techniques and procedures for accomplishing a given task including, but not limited to, those manners, means, techniques and procedures either known to, or readily developed from known manners, means, techniques and procedures by practitioners of the chemical, pharmacological, biological, biochemical and medical arts.

[0337] As used herein, the term “treating” includes abrogating, substantially inhibiting, slowing or reversing the progression of a condition, substantially ameliorating clinical or aesthetical symptoms of a condition or substantially preventing the appearance of clinical or aesthetical symptoms of a condition.

[0338] When reference is made to particular sequence listings, such reference is to be understood to also encompass sequences that substantially correspond to its complementary sequence as including minor sequence variations, resulting from, e.g., sequencing errors, cloning errors, or other alterations resulting in base substitution, base deletion or base addition, provided that the frequency of such variations is less than 1 in 50 nucleotides, alternatively, less than 1 in 100 nucleotides, alternatively, less than 1 in 200 nucleotides, alternatively, less than 1 in 500 nucleotides, alternatively, less than 1 in 1000 nucleotides, alternatively, less than 1 in 5,000 nucleotides, alternatively, less than 1 in 10,000 nucleotides.

[0339] It is appreciated that certain features of the invention, which are, for clarity, described in the context of separate embodiments, may also be provided in combination in a single embodiment. Conversely, various features of the invention, which are, for brevity, described in the context of a single embodiment, may also be provided separately or in any suitable subcombination or as suitable in any other described embodiment of the invention. Certain features described in the context of various embodiments are not to be considered essential features of those embodiments, unless the embodiment is inoperative without those elements.

[0340] Various embodiments and aspects of the present invention as delineated hereinabove and as claimed in the claims section below find experimental support in the following examples.

### EXAMPLES

[0341] Reference is now made to the following examples, which together with the above descriptions illustrate some embodiments of the invention in a non limiting fashion.

[0342] Generally, the nomenclature used herein and the laboratory procedures utilized in the present invention include molecular, biochemical, microbiological and recombinant DNA techniques. Such techniques are thoroughly explained in the literature. See, for example, “Molecular Cloning: A laboratory Manual” Sambrook et al., (1989); “Current Protocols in Molecular Biology” Volumes I-III Ausubel, R. M., ed. (1994); Ausubel et al., “Current Protocols in Molecular Biology”, John Wiley and Sons, Baltimore, Md. (1989); Perbal, “A Practical Guide to Molecular Cloning”, John Wiley & Sons, New York (1988); Watson et al., “Recombinant DNA”, Scientific American Books, New York; Birren et al. (eds) “Genome Analysis: A Laboratory Manual Series”, Vols. 1-4, Cold Spring Harbor Laboratory Press, New York (1998); methodologies as set forth in U.S. Pat. Nos. 4,666,828; 4,683,202; 4,801,531; 5,192,659 and 5,272,057; “Cell Biology: A Laboratory Handbook”, Volumes I-III Cellis, J. E., ed. (1994); “Culture of Animal Cells—A Manual of Basic Technique” by Freshney, Wiley-Liss, N. Y. (1994), Third Edition; “Current Protocols in Immunology” Volumes I-III Coligan J. E., ed. (1994); Stites et al. (eds), “Basic and Clinical Immunology” (8th Edition), Appleton & Lange, Norwalk, Conn. (1994); Mishell and Shiigi (eds), “Selected Methods in Cellular Immunology”, W. H. Freeman and Co., New York (1980); available immunoassays are extensively described in the patent and scientific literature, see, for example, U.S. Pat. Nos. 3,791,932; 3,839,153; 3,850,752; 3,850,578; 3,853,987; 3,867,517; 3,879,262; 3,901,654; 3,935,074; 3,984,533; 3,996,345; 4,034,074; 4,098,876; 4,879,219; 5,011,771 and 5,281,521; “Oligonucleotide Synthesis” Gait, M. J., ed. (1984); “Nucleic Acid Hybridization” Hames, B. D., and Higgins S. J., eds. (1985); “Transcription and Translation” Hames, B. D., and Higgins S. J., eds. (1984); “Animal Cell Culture” Freshney, R. I., ed. (1986); “Immobilized Cells and Enzymes” IRL Press, (1986); “A Practical Guide to Molecular Cloning” Perbal, B., (1984) and “Methods in Enzymology” Vol. 1-317, Academic Press; “PCR Protocols: A Guide To Methods And Applications”, Academic Press, San Diego, Calif. (1990); Marshak et al., “Strategies for Protein Purification and Characterization—A Laboratory Course Manual” CSHL Press (1996); all of which are incorporated by reference as if fully set forth herein. Other general references are provided throughout this document. The procedures therein are believed to be well known in the art and are provided for the convenience of the reader. All the information contained therein is incorporated herein by reference.

[0343] This Example examines the relationship between levels of serum metabolites and a rich resource of clinical parameters, dietary intake patterns, lifestyle measurements, human genetics and gut microbiota composition across a large healthy cohort. This Example demonstrates that using these features highly accurate out-of-sample predictions for over 1000 circulating serum metabolites can be obtained, with diet and gut microbiome having the highest predictive power, and being particularly predictive for unknown compounds. The inventors uncovered a list of associations between genetic loci and circulating blood metabolites and showed that we replicate several known links between specific SNPs and metabolites. By applying the prediction models of the present embodiments to an independent cohort of 31 participants, the inventors validated many of the associations. Using feature attribution analysis on the resulting predictive models, the inventors uncovered both known and novel associations between diet, gut microbiome and the levels of blood metabolites.

[0344] This Example demonstrates that many metabolites are exclusively explained by gut microbiome composition, highlighting its potential as their key determinant, and revealed the identities and predicted candidate structure of many unknown compounds which are highly predictable by the microbiome.

[0345] This Example also demonstrates that the uncovered associations are causal, as levels of metabolites were predicted to be positively associated with bread increased following a randomized clinical trial of bread intervention.

[0346] This Example concentrates on estimates computed via out-of-sample predictions, since such evaluation of performance is based only on unseen samples as the most strict and conservative estimate of performance. As such, the results presented herein constitute a lower bound for the amount of variance in metabolite levels that may be explained by the various features we examined.

[0347] The heterogeneity of the data is advantageous since its estimates do not depend on modeling assumptions.

### Materials and Methods

[0348] All statistical and machine learning analyses were performed using Python (version 2.7.8).

[0349] Description of Cohorts

[0350] We analyzed banked samples from two previously collected cohorts^{25,48}, for a total of 522 Israeli individuals. Studies were approved by Tel Aviv Sourasky Medical Center Institutional Review Board (IRB), approval numbers TLV-0658-12, TLV-0050-13 and TLV-0522-10; Kfar Shaul Hospital IRB, approval number 0-73. All participants signed written informed consent forms. Full study designs, including inclusion and exclusion criteria were described elsewhere^{25,48}. In brief, participants in both studies were healthy individuals aged between 18 and 70. All participants answered detailed medical, lifestyle and nutritional questionnaires, provided stool and serum samples for metagenomic sequencing and metabolomics, were genotyped, underwent a comprehensive blood test, and for a period of at least one week, recorded all of their daily activities and nutritional intake in real-time using their smartphones with a specialized app provided to them⁴⁸.

[0351] Feature Groups

[0352] The “diet” feature group includes answers for a detailed food frequency questionnaire (FFQ) aimed at capturing long term dietary habits, and the daily mean consumption of different food types, computed over a week based on real-time logging. In both cases we kept only items which were reported to be consumed at least once by at least 1% of our participants, resulting in 670 different food types from logging, and 141 different items from the FFQ.

[0353] The “macronutrients” feature group includes the daily mean consumption of macronutrients (lipids, proteins, carbohydrates), calories and water, calculated from real-time logging.

[0354] The “anthropometrics” feature group includes weight, BMI, waist and hips circumference, and waist to hips ratio (WHR).

[0355] The “cardiometabolic” feature group includes systolic and diastolic blood pressure, heart rate in beats per minute and a glycemic status as previously described³⁰.

[0356] The “drugs” feature group includes 30 binary features representing the intake of 20 common medications as reported in questionnaires, in addition to 10 medication groups as previously described³⁰. We included only drugs reported to be used by at least 1% of our participants.

[0357] The “clinical data” feature group includes the age and sex of the participants, and the following feature groups described above: anthropometrics, cardiometabolic, and drugs.

[0358] The “lifestyle” feature group includes smoking status (current, past), stress levels obtained from questionnaires, and the daily mean sleeping time, exercise time and midday sleep time based on real time logging.

[0359] The “time of day” feature is a binary feature indicating whether the sample was taken during the first half of the day.

[0360] The “seasonal effects” feature is the month in which the sample was taken. In some analyses we also grouped months by season (Winter: December-February; Spring: March-May; Summer: June-August; Fall: September-November).

[0361] The “microbiome” feature group includes bacterial relative abundance calculated both by considering coverage (see below), and by MetaPhlAn2⁵⁵, as well as the first 10 principal components computed over the log transformed relative abundance of a bacterial gene catalog⁵⁶ as previously described³⁰′⁵⁷. Preprocessing steps are described below.

[0362] We further defined a full model that included all of the above.

[0363] Metabolomics Profiling and Preprocessing Metabolite concentrations were measured in serum samples by Metabolon, Inc., Durham, N.C., USA, by using an untargeted LC/MS platform as previously described⁶′⁵⁸′⁵⁹. A total of 540 serum samples were profiled, 19 of which were control samples (technical replicate) pooled from several individuals. The other 521 serum samples belonged to 491 participants.

[0364] We removed from further analysis 27 metabolites with less than 10 measurements across our cohort, and 54 metabolites that we found to have significantly different distributions in samples collected in two different recruitment centers (Mann-Whitney U p<0.05/1251; Bonferroni corrected). For the remaining 1170 metabolites, we performed robust standardization (subtracting the median and dividing by the standard deviation) over the log (base 10) transformed levels, followed by clipping outlier samples which were farther than 5 standard deviations. We next used two separate normalization schemes, one for single metabolites, which we subsequently used in the feature attribution analysis, and the second for metabolite groups, which we used for global and enrichment analyses.

[0365] For single metabolites, we regressed metabolite levels against storage times (only for metabolites present in at least 50 samples), and finally, imputed missing values as the minimum value per metabolite. For the second scheme, metabolites were grouped by correlation with a Spearman rho threshold of 0.85. This is done in order to handle possible bias resulting from uncertainty of metabolite assignments and a high rate of highly correlated mass spectrometry peaks, and resulted in 1067 metabolite groups, 982 of which are singletons. The value of the metabolite group was set to the mean. The category of each metabolite group was assigned based on majority vote, where unknown compounds were excluded from the vote unless all metabolites in the group were unknown.

[0366] Microbiome Preprocessing

[0367] Sample collection, DNA extraction, and sequencing of the samples in this study was described previously^{25,30,48} Briefly, we used only samples which were collected using swabs, filtered metagenomic reads containing Illumina adapters, filtered low-quality reads and trimmed low-quality read edges. We detected host DNA by mapping with GEM⁶⁰ to the human genome (hg19) with inclusive parameters, and removed human reads. We subsampled all samples to have 10 million reads.

[0368] Bacterial relative abundance estimation was performed by mapping bacterial reads to species-level genome bins (SGB) representative genomes³³. We selected all SGB representatives with at least 5 genomes in group, and for these representative genomes kept only unique regions as a reference data set. Mapping was performed using bowtie2⁶¹ and abundance was estimated by calculating the mean coverage of unique genomic regions across the 50 percent most densely covered areas as previously described⁵⁷′⁶². Feature names include the lowest taxonomy level identified.

[0369] Comparing Metabolomics to Lab Tests

[0370] We compared the levels of both creatinine and cholesterol which we previously obtained via standard lab tests²⁵ with their metabolomic levels. Since the lab tests were performed by two different labs, we centered the tests by reducing from the value of each sample the mean of all tests taken in the lab in which it was performed. We then performed a standardization of the resulting measurements. The metabolomic profiling and the lab tests were performed on two samples taken at the same blood draw.

[0371] Correlation of Metabolic Profiles within and Between Individuals

[0372] We compared the levels of both creatinine and cholesterol which we previously obtained via standard lab tests²⁵ with their metabolomic levels. Since the lab tests were performed by two different labs, we centered the tests by reducing from the value of each sample the mean of all tests taken in the lab in which it was performed. We then performed a standardization of the resulting measurements. The metabolomic profiling and the lab tests were performed on two samples taken at the same blood draw.

[0373] Predictive Models of Metabolite Groups

[0374] We used gradient boosting decision trees from the LightGBM (version 2.1.2) package²⁷, in order to predict the levels of 1067 metabolite groups based on 7 feature groups in held-out subjects. In order to estimate the EV of each metabolite group we ran a 5-fold cross validation (CV) model using each feature group as input, and evaluated the results using Pearson correlation. For all prediction results we computed 95% confidence intervals and p-values via 1000 iterations of bootstrapping⁶³. In each bootstrap iteration, we performed a random 5-fold cross validation, were in each fold we randomly sampled (with replacement) a group of subjects from the training set to have the same size as the current training set. We next used this set in order to train our model and evaluated the model's performance on the set of subjects in the remaining fold. Finally we computed the Pearson correlation between the measured values of the metabolite and the concatenation of the CV's predicted values as obtained from the bootstrapping iteration. We applied the Fisher transformation to the Pearson correlations we got from bootstrapping in order to induce normality⁶⁴, and then computed a standard error, and estimated the p-values via the normal CDF using the Wald test⁶⁵, such that our null hypothesis is that the correlations should distribute normally with zero mean. Confidence intervals were computed empirically from the bootstrapping correlations. We corrected p-values of predictions for multiple hypotheses using the Bonferroni procedure within each feature group (p<0.05/1067). In all CV and bootstrapping runs we used a fixed and predetermined set of hyperparameters (Table 5).

TABLE 5

| | Microbiome and | Other feature |
|---|---|---|
| | Diet | groups |
| LightGBM HyperParameter | | |
| learning_rate | 0.005 | 0.01 |
| max_depth | default | 5 |
| feature_fraction | 0.2 | 0.8 |
| num_leaves | default | 25 |
| min_data_in_leaf | 15 | 15 |
| metric | 12 | 12 |
| early_stopping_rounds | None | None |
| n_estimators | 2000 | 200 |
| bagging_fraction | 0.8 | 0.9 |
| bagging_freq | 1 | 5 |
| num_threads | 1 | 1 |
| verbose | −1 | −1 |
| silent | TRUE | TRUE |

[0375] Testing for SNP Associations with Metabolites

[0376] Genotype processing and imputation of 413 individuals were described previously³⁰. We performed genome wide associations for single metabolites (n=1170) and calculated the p-value and the estimated effect sizes using plink (v1.07). When declaring a genome-wide significance for the SNP-metabolite associations we used a conservative Bonferroni adjustment procedure to control for the false discovery rate due to the large number of SNPs tested (p<(5×10⁻⁸)/1170). We performed all genome wide associations using imputed genotypes. Results presented in FIGS. 2A-F are based on a similar analysis performed over the metabolite groups (n=1067).

[0377] For the replication of SNP-metabolite associations from a previous study⁶ we correlated the EV of each metabolite from a model based on top significantly associated SNPs in the TwinsUK, and the effect size of the single top significantly associated SNP in this study. Only 301 metabolites which were measured in both studies were considered for analysis.

[0378] Pathway Category Enrichment Analysis

[0379] For each pathway category we used a Mann-Whitney U test comparing the prediction accuracy of metabolites from that category compared to prediction accuracy of metabolites from other categories. Direction of enrichment was determined by the sign of the Mann-Whitney U test statistic. We considered only metabolite groups for which at least one feature group had a significant prediction (after correcting for multiple hypothesis), resulting with 982 metabolite groups.

[0380] Validation of Metabolite Predictions

[0381] For every feature group, we trained a prediction model based solely on the samples from the main cohort, and evaluated its performance on the independent validation cohort. In all validation analyses we only considered 877 metabolite groups which were present in both the main and the validation cohort. We did not validate the associations of metabolites with time of day as all of our samples in the validation cohort were taken during the same time of the day.

[0382] Feature Attribution Analysis

[0383] We used SHAP (SHapley Additive exPlanations)³⁴, a recently introduced framework for interpreting predictions, which assigns each feature an importance value for a particular prediction. Briefly, for a specific prediction, a feature's SHAP value is defined as the change in the expected value of the model's output when this feature is observed vs when it is missing. It is computed using a sum that represents the impact of each feature being added to the model averaged over all possible orderings of features being introduced.

[0384] Individual SHAP values were computed for held-out subjects in 5-fold CV using the module TreeExplainer (version 0.24.0)³⁵′⁶⁶, based on models trained only on features from the respective feature group. Before training, we standardized the levels of target metabolites, so that SHAP values from different models would be comparable (they are measured in the same units as the target). In each CV fold we ran a random hyperparameter search consistent of 10 iterations using the module RandomizedSearchCV from sklearn (version 0.20.4), and chose the best model for predicting the held out subjects and computing SHAP values. In all feature attribution analyses we used the ungrouped list of 1170 metabolites.

[0385] For every feature, we computed the mean absolute SHAP value across all instances in a specific model, reflecting the mean impact of each feature on the predictions and serving as a feature importance measure. We further used these values to compute directional mean absolute SHAP values, by multiplying them with the sign of the Spearman correlation between the population feature and the target. Here, positive values indicate that higher feature values lead, on average, to higher predicted values, while negative values indicate that lower feature values lead, on average, to lower predicted values.

[0386] When performing feature attribution analysis with gut microbiome data as input, we only included the relative abundance of SGB representative genomes as features, taking only features which were present in over 5% of the samples, resulting with 753 bacterial taxa. When using diet as input, we only considered features which were present in at least 5% of the samples, resulting with 398 food types from logging and items from the FFQ.

[0387] Comparing Gradient Boosting Decision Trees with a Linear Model

[0388] We compared the EV of every single metabolite obtained for a GBDT and a Lasso regression model. The EV of all models were calculated in 5-fold CV, where in each fold we ran a hyperparameter search consistent of 10 iterations as described above. We used LightGBM as the GBDT model, and Lasso regression (sklearn, version 0.20.4) as the linear model, since its regularization scheme is better suited for a large number of features, as in the case of diet and gut microbiome composition. Since GBDT handles missing values well, we first imputed all missing values as the median of each feature to assure a fair comparison. When applying the models on the microbiome data, we used log 10 transformed values.

[0389] Estimating Relative Predictive Power of Feature Groups

[0390] In order to estimate the relative predictive power of different feature groups we first applied a principal component analysis over the metabolite groups data to get the first 400 PCs which constitute >99% of the total variance in the data (FIG. 16). We then used 5-fold CV prediction models as described above to predict the PCs based on the different feature groups independently. As baseline, we used the full model, which consists of all features combined to predict the levels of the PCs, and estimated the overall fraction of variance explained by: (ΣᵢEVᵢ×PCᵢ)/(ΣᵢPCᵢ), where the summation is from i=1 to i=nPC, EVᵢ is the fraction of EV that the model recovers for PC i, PCᵢ is the fraction of variance that PC i explains out of the overall variation in the data, and nPC is the number of the first PCs, those which capture the most variation. For the features we have collected, we defined this sum obtained for the full model as the total explainable variance in circulating blood metabolites. Next, for every feature group we computed a similar expression and calculated the relative predictive power by dividing this expression by that of the full model. The estimates we present are for nPC=15, as the overall EV of the full model that we estimated using the first 15 PCs constitutes over 97% of the overall EV of the full model based on all 400 PCs.

[0391] Identification of Unknown Metabolites by Metabolon

[0392] Identification of unknown metabolites was done as previously described²⁹. Briefly, identification of tentative structural features for unknown biochemicals incorporates a detailed analysis of mass spec data, i.e., gathering information such as the accurate monoisotopic mass, the elution time and fragmentation pattern of the primary ion, and correlation to other molecules. The accurate monoisotopic mass is used to identify a likely structural formula for the unknown biochemical, which is then used to search against chemical structure databases. When a candidate structure fits the accurate monoisotopic mass and fragmentation data, an authentic standard is commercially purchased or synthesized (when possible). Conformation of a proposed structure is based on a match to three primary criteria, including co-elution with the unknown molecule of interest, and a high degree match to both the accurate monoisotopic mass and fragmentation pattern.

[0393] Interaction Networks

[0394] We used a graphical layout in order to visualize the associations of features with the levels of metabolites. The nodes are either metabolites or features, and the edges are the directional mean absolute SHAP values computed from models trained only on features from the respective feature group as described above. All networks were constructed using Cytoscape⁶⁷. The threshold for presenting SHAP values as edges was determined as 0.12, keeping the network sparse enough for convenience of visualization.

[0395] Analysis of Bread Intervention

[0396] In order to find the associations between metabolite levels and the consumption of both types of bread in the study cohort we computed the directional mean absolute SHAP values of the reported consumption of both white and whole-wheat bread for all metabolites. The SHAP values were computed in cross validation from models based only on the reported consumption of each type of bread. We ranked the metabolites according to their directional mean absolute SHAP value for each type of bread and used the top 5% positively and negatively driven metabolites for further analysis. The prediction models were constructed using 458 samples of distinct individuals, a subset of our cohort from which we excluded all samples of individuals which participated in the intervention study.

[0397] For each metabolite in every individual, we computed the FC of metabolite levels between the samples taken at the end of the first week of intervention and the start of that week. Prior to computing FC we imputed missing values with the minimum per metabolite and standardized their log (base 10) transformed levels. Furthermore, for each intervention group, we computed the mean FC of every metabolite based on the 10 samples from that group. We then compared the mean FC of the top 5% positively and negatively driven metabolites mentioned above within each intervention group by performing a rank sum test (Mann-Whitney U) over the mean FC.

[0398] For comparing the FC of betaine and cytosine between the two intervention groups, we used a Mann-Whitney U test.

[0399] LMM-Based Estimates of the Explained Variance of Metabolites Using Gut Microbiome

[0400] For the in-sample estimation of EV for metabolites based on gut microbiome we used a linear mixed model framework that we had recently developed³⁰. Briefly, we used GCTA⁶⁸, a tool used in statistical genetics for the estimating of SNP-based genetic kinship. Instead of a matrix of host SNPs, as is commonly used in GCTA, we used a kinship matrix computed over the presence-absence of microbial species which were also used as features in the out-of-sample prediction models. We added the storage time as a covariate to the model. P-values were computed using RL-SKAT⁶⁹.

### Results

[0401] Accurate and Reproducible Untargeted Serum Metabolomics from a Deeply Phenotyped Human Cohort

[0402] We used mass spectrometry to profile 521 serum samples from 491 healthy individuals for whom we previously collected extensive clinical data, anthropometrics measurements, cardiometabolic parameters, medication data, lifestyle, genetics, gut microbiome, dietary logging and answers to clinical and nutritional questionnaires²⁵ (FIG. 1A-B; Methods). Our untargeted metabolomics measured the levels of 1251 metabolites, covering a wide range of biochemicals including lipids, amino acids, xenobiotics, carbohydrates, peptides, nucleotides and approximately 30% unknown compounds (FIG. 1C, Methods). Most measured metabolites were prevalent across the cohort, including 498 metabolites detected in all samples, and 1104 metabolites detected in at least 50% of the samples (FIG. 1D).

[0403] To test whether our measurements accurately report metabolite levels, we compared the metabolomic levels of creatinine and cholesterol to measurements of these compounds using standardized lab tests (Methods) performed separately on different blood samples taken from the same individual on a single visit, and found excellent agreement (R=0.87, creatinine; R=0.79, cholesterol, FIGS. 8A-B). Further demonstrating the reproducibility of our metabolomic measurements, we found that samples taken one week apart for 20 participants were significantly correlated (median Spearman R=0.68, std=0.06), in contrast to samples of different participants that show no correlation (median Spearman R=0.05, std=0.12; Methods; FIG. 1E). In addition to validating the reproducibility and accuracy of our data, these results are consistent with previous work showing that the human metabolic phenotype is stable even over several years²⁶, and suggest that this metabolic profile is a unique ‘fingerprint-like’ person-specific signature.

[0404] Diet, Microbiome, and Clinical Data Predict the Levels of Most Serum Metabolites

[0405] To estimate the extent to which metabolites can be predicted by the wealth of data we collected, we devised machine learning algorithms that predict the levels of each metabolite in held-out subjects (out-of-sample 5-fold cross validation prediction). One exception was human genetics, for which we considered the explained variance (EV) of each metabolite as that of the single most associated SNP (Methods). For prediction, we used gradient boosting decision trees²⁷ (GBDT; Methods) as these are powerful models which perform well in many different settings and can capture nonlinear interactions which are likely to be present in such a heterogeneous feature space and within the high dimensionality of the diet and microbiome data. We found that GBDT systematically outperformed linear models (Lasso; Methods), with a median and maximum EV gain of 3.3 and 38%, respectively, for prediction with diet data and 4.3 and 13% for prediction with microbiome data. (FIGS. 9A-E). Notably, our predictions were statistically significant for over 92% of the metabolite groups tested, following a strict Bonferroni correction (Methods), using at least one of the feature groups, with diet significantly explaining the largest number of metabolites (636), and gut microbiome explaining 389 metabolites (FIG. 2A-B). Together, our models explained over 10% of the variance for 467 metabolite groups (FIG. 2D), with a median R² of 10.7% (range 1.1-75.3%). For some metabolites, our models explained over 50% of the variance, using either genetics, sex, dietary, or microbiome features. For example, gut microbiome features alone explained 60% of the variance of the unknown compound X-16124.

[0406] To understand whether specific feature groups better predict certain types of metabolites, we checked, for each feature group, whether any type of metabolites was enriched with superior predictions (FIG. 2C). We found that clinical data, which includes age, sex, anthropometrics and cardiometabolic parameters, better predicted blood lipids, amino acids and peptides compared to xenobiotics and unknown compounds (FIG. 2C). In contrast, gut microbiome data predominantly explained levels of unknown compounds (p<0.005), highlighting the potential of the microbiome for discovering microbiome-derived metabolites and explaining the origin of the large number of unknown compounds.

[0407] We next asked whether different feature groups predict metabolites with similar accuracy, by computing the correlation between the accuracy of metabolite predictions of every pair of input feature groups (FIG. 2E; FIG. 10). We found that predictions based on clinical data were significantly correlated with those of diet (Spearman R=0.32, p<10⁻²⁰), suggesting that some of the information captured by these feature groups is shared. A comparison to the lower (albeit significant) correlation between predictions made by clinical data and gut microbiome (R=0.22, p<10⁻¹²) implies that each capture unique information about metabolites. In addition, diurnal-based predictions were not correlated with any other feature group, demonstrating that metabolites explained by the time of the day were not predicted by and other data. Notably, predictions based on gut microbiome data had the highest correlation to predictions based on diet (R=0.44, p<10⁻²⁰), suggesting possible interactions between these feature groups in explaining the levels of many serum metabolites, an aspect that we further explore below. Finally, we found that the most genetically heritable metabolites could not be predicted by any of the other feature groups, as there was a negative correlation between the prediction accuracy of the full model and the heritability of metabolites (R=−0.14, p<10⁻⁵).

[0408] Taken together, our results show that we can devise statistically significant predictions for most serum metabolites using diet, gut microbiome, or other lifestyle and clinical parameters, with each feature group being especially informative with respect to a different set of metabolites. We next wished to estimate the general predictive power of each feature group across all measured serum metabolites. We built models predicting the principal components of the metabolomics data (FIG. 16), and then looked at the fraction of weighted explained variance in each feature group compared to that achieved with a model based on all features combined. We estimate that diet has the largest predictive power and could be used to infer 48.7% of the explainable variance in circulating blood metabolites compared to the full mode, while the prediction power of lifestyle factors constitute only 1.9% of that EV (FIG. 2F). Notably, gut microbiome data has 30.5% of the predictive power of the full model, and with a large portion of it not overlapping with the predictions of other data, this marks the importance of the microbiome in independently predicting and potentially determining serum metabolites levels.

[0409] Metabolite Predictions Replicate in an Independent Cohort

[0410] To test the robustness and reproducibility of our associations, we used the following approaches.

[0411] Firstly, we asked whether our cohort replicates significant associations between metabolite levels and body mass index (BMI) that were recently reported²⁸, and found that most of these associations replicated with high accuracy (Pearson R=0.85, p<10⁻¹⁰, FIG. 3A).

[0412] Secondly, we applied the same metabolomic profiling to an independent cohort of 31 individuals for which we also obtained identical measurements to those we had on the main cohort, including diet and gut microbiome data. Data from this additional cohort were not available to us while developing the prediction models. Notably, using our models, trained only on samples from our main cohort, for metabolites significantly predicted in our main cohort, we obtained predictions with similar accuracy on samples from this independent validation cohort. Specifically, for both diet and gut microbiome data, we found high agreement between the prediction accuracy and the overall predictive power of our models in the main cohort and in the replication cohort (Pearson R=0.59, p<10⁻¹⁸, microbiome; R=0.60, diet, p<10⁻²⁰; FIGS. 3B-C, FIG. 17). These results further validate that our models unravel robust associations between the levels of blood metabolites and the feature groups we measured.

[0413] Thirdly, the model of the present embodiments was applied, without modification, to an independent cohort from the United Kingdom [UK Adult Twin Registry, www(dot)twinsuk(dot)ac(dot)uk]. FIGS. 7A and 7B demonstrate that at least the top 50 associations all replicate in this cohort, and that at least 94 out of the top 110 associations replicate. Table 6, below, summarizes the results for the top 110 metabolites, including the explained variance in the two cohorts, and the significance level of the replication, both raw and adjusted for multiple testing.

TABLE 6

| | | TwinsUK | TwinsUK | TwinsUK |
|---|---|---|---|---|
| | PNP R2 | p-value | q-value | R2 |
| X - 16124 | 0.60193 | 1.76E−123 | 1.94E−121 | 0.42746 |
| X - 11850 | 0.494078 | 1.30E−90 | 7.17E−89 | 0.334257 |
| 100000442 | 0.466141 | 2.06E−27 | 2.52E−26 | 0.110844 |
| X - 11843 | 0.436607 | 4.06E−76 | 1.49E−74 | 0.288504 |
| 100001405 | 0.424833 | 2.42E−06 | 5.31E−06 | 0.021954 |
| 100001315 | 0.416363 | 3.72E−27 | 3.72E−26 | 0.109801 |
| 100006191 | 0.4089 | 7.65E−33 | 1.05E−31 | 0.132607 |
| X - 12013 | 0.396407 | 4.51E−60 | 1.24E−58 | 0.234211 |
| 100001417 | 0.392058 | 3.90E−11 | 1.26E−10 | 0.042661 |
| 100001106 | 0.373802 | 3.05E−07 | 7.14E−07 | 0.025838 |
| 100001403 | 0.368044 | 0.000767 | 0.001223 | 0.011239 |
| X - 12816 | 0.363962 | 7.36E−25 | 5.40E−24 | 0.100435 |
| 100001400 | 0.360403 | 4.89E−06 | 1.03E−05 | 0.020633 |
| 100001399 | 0.355817 | 0.00088 | 0.001383 | 0.010987 |
| X - 21442 | 0.350055 | 2.75E−20 | 1.68E−19 | 0.081518 |
| 849 | 0.335179 | 0.001585 | 0.002357 | 0.009912 |
| 100000011 | 0.331918 | 5.65E−13 | 2.00E−12 | 0.050565 |
| 100000437 | 0.331126 | 0.00761 | 0.010085 | 0.007087 |
| 100000453 | 0.322879 | 2.85E−05 | 5.43E−05 | 0.017334 |
| 100001397 | 0.297921 | 0.000428 | 0.000736 | 0.01231 |
| 100006098 | 0.279406 | 2.39E−15 | 9.38E−15 | 0.060702 |
| X - 12216 | 0.270791 | 2.52E−19 | 1.26E−18 | 0.077493 |
| 100000010 | 0.253025 | 2.73E−41 | 6.00E−40 | 0.165457 |
| 100002253 | 0.241426 | 3.84E−39 | 7.03E−38 | 0.15722 |
| X - 23649 | 0.24028 | 4.83E−09 | 1.44E−08 | 0.033625 |
| 100004112 | 0.240092 | 7.02E−13 | 2.41E−12 | 0.050159 |
| X - 23997 | 0.234264 | 0.005032 | 0.00675 | 0.007825 |
| 100001092 | 0.232021 | 6.21E−17 | 2.84E−16 | 0.067422 |
| 100001402 | 0.211918 | 0.002301 | 0.003331 | 0.009235 |
| 100001657 | 0.209332 | 6.99E−15 | 2.65E−14 | 0.058715 |
| X - 12230 | 0.198428 | 1.34E−13 | 4.90E−13 | 0.053246 |
| 100004111 | 0.198406 | 5.71E−20 | 3.31E−19 | 0.080192 |
| 100002021 | 0.190037 | 7.69E−35 | 1.21E−33 | 0.140485 |
| 100001083 | 0.184587 | 6.50E−17 | 2.84E−16 | 0.067341 |
| X - 12329 | 0.179864 | 9.28E−06 | 1.89E−05 | 0.019433 |
| X - 12306 | 0.178041 | 2.19E−12 | 7.29E−12 | 0.048042 |
| X - 21821 | 0.175098 | 3.16E−08 | 8.27E−08 | 0.0301 |
| X - 23639 | 0.170295 | 0.017756 | 0.022195 | 0.005596 |
| X - 17351 | 0.164692 | 1.09E−08 | 2.99E−08 | 0.032101 |
| 100002911 | 0.163574 | 6.72E−17 | 2.84E−16 | 0.067279 |
| 100001658 | 0.162903 | 1.01E−25 | 7.97E−25 | 0.103956 |
| 100000014 | 0.158807 | 1.50E−19 | 8.25E−19 | 0.078438 |
| X - 11315 | 0.145696 | 1.33E−06 | 3.05E−06 | 0.023072 |
| 100001086 | 0.143621 | 0.000207 | 0.000361 | 0.013655 |
| 100009002 | 0.139306 | 0.051746 | 0.061205 | 0.003771 |
| X - 21752 | 0.13783 | 3.48E−24 | 2.40E−23 | 0.097664 |
| 1135 | 0.135034 | 2.24E−18 | 1.07E−17 | 0.073506 |
| 100000467 | 0.134245 | 6.24E−10 | 1.91E−09 | 0.037467 |
| X - 12730 | 0.132732 | 0.004609 | 0.006337 | 0.007983 |
| X - 17185 | 0.13236 | 2.45E−07 | 5.99E−07 | 0.026249 |
| 100000580 | 0.131515 | 0.877499 | 0.877499 | 2.37E−05 |
| X - 22162 | 0.130587 | 0.00256 | 0.003658 | 0.009042 |
| X - 21286 | 0.125927 | 1.78E−08 | 4.79E−08 | 0.031173 |
| X - 17145 | 0.125471 | 2.54E−26 | 2.15E−25 | 0.106407 |
| 100001148 | 0.114388 | 2.84E−27 | 3.13E−26 | 0.110276 |
| 100000436 | 0.112946 | 8.08E−09 | 2.34E−08 | 0.03266 |
| 100001510 | 0.111889 | 2.40E−19 | 1.26E−18 | 0.077585 |
| 100000447 | 0.111378 | 0.001518 | 0.002287 | 0.009992 |
| 136 | 0.109922 | 4.15E−21 | 2.68E−20 | 0.084944 |
| 100005864 | 0.109533 | 0.000188 | 0.000334 | 0.013825 |
| X - 12738 | 0.107436 | 0.00053 | 0.000861 | 0.011917 |
| 1258 | 0.106308 | 0.858411 | 0.866286 | 3.18E-05 |
| X - 21339 | 0.099392 | 0.004846 | 0.006581 | 0.007893 |
| 100004208 | 0.098996 | 0.000519 | 0.000861 | 0.011955 |
| 100003434 | 0.098884 | 1.78E−15 | 7.26E−15 | 0.061243 |
| 339 | 0.09559 | 5.17E−10 | 1.62E−09 | 0.037821 |
| X - 11880 | 0.090108 | 6.26E−05 | 0.000117 | 0.015872 |
| 100001456 | 0.085311 | 0.688289 | 0.714263 | 0.000161 |
| X - 11308 | 0.084777 | 0.052811 | 0.0618 | 0.003737 |
| 100004046 | 0.0844 | 0.110712 | 0.126858 | 0.002537 |
| X - 18914 | 0.082799 | 0.000172 | 0.00031 | 0.013996 |
| 100002154 | 0.081625 | 6.56E−08 | 1.64E−07 | 0.028726 |
| X - 13835 | 0.079674 | 0.317852 | 0.339453 | 0.000996 |
| 100001624 | 0.079165 | 9.24E−09 | 2.61E−08 | 0.032409 |
| 100002241 | 0.078238 | 0.046573 | 0.055685 | 0.003947 |
| 100001022 | 0.077824 | 0.012876 | 0.016664 | 0.006158 |
| X - 11372 | 0.077439 | 0.001173 | 0.001791 | 0.010462 |
| X - 21736 | 0.07603 | 0.000917 | 0.001421 | 0.010912 |
| X - 11381 | 0.074129 | 0.000467 | 0.000791 | 0.012149 |
| 381 | 0.072941 | 0.755927 | 0.769926 | 9.65E-05 |
| 100000445 | 0.07275 | 0.014756 | 0.018874 | 0.005919 |
| 100001162 | 0.072115 | 0.559964 | 0.586629 | 0.000339 |
| 100001743 | 0.071197 | 0.002787 | 0.003931 | 0.008889 |
| 100004110 | 0.070462 | 1.67E−06 | 3.74E−06 | 0.02265 |
| 1668 | 0.070161 | 2.86E−07 | 6.83E−07 | 0.025962 |
| 100001756 | 0.070086 | 1.44E−05 | 2.88E−05 | 0.01861 |
| X - 23587 | 0.069924 | 3.78E−08 | 9.67E−08 | 0.029761 |
| 1518 | 0.069794 | 0.176014 | 0.197566 | 0.001827 |
| 100003001 | 0.064862 | 0.096912 | 0.112213 | 0.002748 |
| X - 12221 | 0.063781 | 2.86E−05 | 5.43E−05 | 0.01733 |
| 100001126 | 0.063769 | 0.305695 | 0.329671 | 0.001047 |
| 100002122 | 0.062773 | 1.69E−05 | 3.32E−05 | 0.018315 |
| 100008999 | 0.061545 | 0.025154 | 0.031089 | 0.004993 |
| 100001300 | 0.061295 | 0.041996 | 0.050764 | 0.004121 |
| 100001605 | 0.060642 | 0.000532 | 0.000861 | 0.01191 |
| 100001051 | 0.060427 | 0.199497 | 0.221663 | 0.001642 |
| 100006126 | 0.060353 | 0.027193 | 0.033235 | 0.004859 |
| X - 16935 | 0.059659 | 6.37E−06 | 1.32E−05 | 0.020139 |
| 100004328 | 0.059032 | 0.747708 | 0.768672 | 0.000103 |
| 100008920 | 0.058966 | 0.516784 | 0.546598 | 0.00042 |
| 100000042 | 0.058828 | 0.258925 | 0.281997 | 0.001272 |
| 100000841 | 0.058762 | 0.002027 | 0.002974 | 0.009465 |
| X - 12822 | 0.057473 | 0.000131 | 0.00024 | 0.014499 |
| X - 23314 | 0.057217 | 0.204197 | 0.224617 | 0.001608 |
| X - 15728 | 0.057172 | 7.08E−27 | 6.49E−26 | 0.108667 |
| 100001541 | 0.056209 | 0.131519 | 0.149145 | 0.002269 |
| 100001055 | 0.056172 | 0.011833 | 0.015495 | 0.006306 |
| X - 18249 | 0.054302 | 0.00363 | 0.005054 | 0.008412 |
| 240 | 0.052766 | 0.017548 | 0.022187 | 0.005616 |
| 100001034 | 0.051379 | 2.98E−06 | 6.43E−06 | 0.021559 |

[0414] Novel Associations Between Human Genetics and Circulating Blood Metabolites

[0415] Several studies found that human genetics affect serum metabolites^{6,7,29}. In this study we measured hundreds of novel molecules which were not yet identified in previously published studies including both serum metabolomics and human genetics, and therefore set to look for novel associations between single nucleotide polymorphisms (SNPs) and serum metabolites levels. Notably, we found 553 statistically significant associations with genetic for 67 metabolites (p<5×10⁻¹¹), many of which are novel. This includes the unknown metabolite X-24809 which was associated with rs4539242 that alone explained 52% of its variance. To further validate our results, we set to replicate previous reported associations between SNPs and the levels of circulating blood metabolites. Among the 529 metabolites analysed in a previous large study which included 7824 individuals⁶, 301 were also measured by us using the same MS platform (Metabolon, inc.; Methods), and 111 of them were reported to have significant associations with SNPs. Due to the difference in cohort sizes, we were limited in terms of the statistical power needed for the replication of relatively small effect variants. Overall, we found a high correlation between the EV of a model based on top significantly associated SNPs in the previous study and a model based on the single top associated SNP in our study (Pearson R=0.73, p<10⁻²⁰; FIG. 18). In our cohort, we found significant associations between SNPs and 14 out of the 111 metabolites, but no significant associations for any of the remaining 190 metabolites (p<10⁻⁶ for only replicating a subgroup of known associations, Fisher exact test). We found that in 11 cases out of the 14 the association between the metabolite and the specific SNP reported in the previous study was replicated in this study, while in the other three cases the associations that we found are novel, in all these cases, the EV by the reported SNP in both the previous study and in this study was highly similar (R=0.91, p<10⁻⁴).

[0416] Diet and Gut Microbiome Data Independently Explain a Wide Range of Metabolites

[0417] Diet and gut microbiome had the largest predictive power and there is a significant correlation in the metabolites that they each predicted well (FIG. 2E). Since diet is known to modulate the composition of the gut microbiome³⁰⁻³², we sought to unravel which metabolites are more likely to be driven by diet and which by the gut microbiota, by comparing the EV of metabolites obtained by a model based on diet and by one based on gut microbiome data (FIG. 4A). If the prediction of metabolites by the microbiome was confounded by diet, in other words if diet affects both the metabolites and the microbiome, then we would expect that all microbiome-predicted metabolites could also be predicted (possibly with higher accuracy) by diet. However, we found that although some metabolites were significantly predicted by both diet and gut microbiome, many metabolites were predicted well by only one of the two data types (FIG. 4A). To measure the contribution of the microbiome to the prediction of each metabolite, we compared the EV of a model based on both diet and microbiome to a model based only on diet data (FIG. 4B). We found that adding microbiome data to the prediction model improved the model's accuracy in 66% of cases (median and max gain of 2.1%, 61.2% respectively; FIG. 4C). Finally, 34 metabolites were significantly predicted only using the gut microbiome, and the predictions of multiple others improved upon introducing microbiome to the models. Taken together, these results suggest that the gut microbiome modulates the production of many circulating metabolites independent of diet.

[0418] We next sought to interpret the diet and gut microbiome models and ask which dietary features and bacterial taxa drive the predictions of each metabolite. Our diet data consists of both answers to food frequency questionnaires and one week of dietary logging collected in real-time via a mobile App we devised²⁵, and thus allows us to address the predictive power of both long term and short term nutritional patterns. The gut microbiome composition is represented as relative abundance of bacterial species and we estimated it based on high depth metagenomic sequencing followed by mapping to a unique and comprehensive microbial database that was recently published³³ (Methods). In order to explain the output of our machine learning models and find specific associations between features and metabolite levels we used SHAP (SHapley Additive exPlanations)³⁴, a feature attribution analysis tool which assigns each feature an importance value (SHAP value) for a particular prediction³⁵ (Methods). Shapley values based analysis in gut microbiome data was recently demonstrated to be useful, as it allowed for the estimation of complex contributions of gut microbiome taxa to functional shifts, while maintaining global community composition properties³⁶.

[0419] We found dozens of diet features and bacterial taxa that were strongly predictive of blood metabolites in our models (FIG. 4F; FIGS. 19A-F). Notably, the reported consumption of coffee (both long- and short-term) had higher importance compared to other dietary features with respect to a large number of xenobiotics and unknown compounds. As previously reported³⁷, metabolites from the xanthine metabolism pathway such as paraxanthine (Prediction Pearson R=0.64, p<10⁻²⁰, based on diet data) and caffeine (Prediction R=0.68, p<10⁻²⁰) were significantly predicted using coffee consumption. These metabolites were also significantly predicted using gut microbiome data, with one bacterial feature from the Clostridiceae family being the main predictor. Another strong predictor was the reported consumption of fish, which was assigned with the highest SHAP values in models based on diet features which accurately predicted the levels of several blood lipids such as 3-Carboxy-4-methyl-5-propyl-2-furanpropionic acid (CMPF; prediction R=0.71, p<10⁻²⁰), a potent uremic toxin known to accumulate in the serum of chronic kidney disease (CKD) patients³⁸ and which was also suggested to prevent and reverses steatosis³⁹. Other examples included saccharin (Prediction R=0.6, p<10⁻²⁰) and acesulfame (Prediction R=0.47, p<10⁻²⁰, two artificial sweeteners whose main predictors were the reported consumption of artificial sweeteners and diet soda. As mentioned above, microbiome data alone accurately predicted the levels of many metabolites such as X-16124 (Pearson R=0.77, p<10⁻²⁰), an unknown metabolite whose main predictor is the relative abundance of a bacteria from the Eggerthellaceae family, and X-11850 (R=0.7, p<10⁻²⁰), another unknown compound whose main predictor is a species of Clostridium. The microbiome data was also highly predictive of two uremic toxins (phenylacetylglutamine, R=0.63, p<10⁻²⁰, and indoxyl sulfate, R=0.37, p<10⁻²⁰) previously reported in association with CKD⁴⁰ and several other comorbidities^{41,42}, and these predictions were positively driven by a bacteria from the Lachnospiraceae family.

[0420] As a more global view, we next asked whether a few bacterial features are important for the prediction of many metabolites, or whether metabolite prediction is specific to several unique important taxa. To this end, for each metabolite we defined its main predictor as the bacterial taxa with the maximal mean absolute SHAP value. We found that 19 bacterial taxa were the main predictors for the top 50 predicted metabolites (Prediction R>0.4; Table 7). One bacterial feature from the Clostridiceae family was the main predictor of 22 of these metabolites which are also strongly associated with coffee consumption in diet-based models. Clostridium sp. CAG:138 was the main predictor of 5 metabolites, including 3 unknown compounds, phenylacetylcarnitine (R=0.47, p<10⁻²⁰) and p-cresol-glucuronide (R=0.64, p<10⁻²⁰) which was previously reported to be metabolized by Clostridium⁴³. Furthermore, 6 bacterial features were the main predictors of 2 metabolites each, and each of the other 11 bacterial features was a main predictor of a single metabolite. Hence, in most cases many specific bacteria are required in order to accurately predict the levels of distinct metabolites, but in some cases a single bacteria might underlie the predictions of a broad metabolic pathway involving dozens of metabolites. In terms of higher bacterial taxonomy levels, among the bacterial features that best predicted the top 100 metabolites, 89 belonged to Firmicutes, 4 to Actinobacteria and 7 to an unknown phylum, showing the strong predictive power of Firmicutes. Interestingly, although Bacteroidetes is the second most abundant phylum in our cohort (FIG. 20), none of its species was a main predictor for any of the 100 metabolites best predicted with microbiome data.

[0421] We next asked whether these single best predictors are sufficient for the accurate prediction of each metabolite or whether additional information regarding the composition of the gut microbiome is needed. To this end, for each metabolite we compared the results from a full model of the microbiome to a prediction model based only on the strongest predictor (FIG. 4D). We found that for most of the metabolites which were best predicted using microbiome data, a model based only on the single best predictor could explain 20-70% of the variance that the full model explained with a median of 36%, showing that for many metabolites the relative abundance of other bacterial taxa are needed for better predictions. In addition, this result implies that the levels of these metabolites are associated with different bacterial taxa in different individuals, as in the case of cinnamoylglycine which is significantly predicted using the full gut microbiome composition (R=0.49, p<10⁻²⁰), yet a model based only on its top predictor fails to provide a significant prediction. In contrast, some metabolites are exclusively predicted by a single bacterial species, as in the case of the unknown metabolite X-16124, for which a model based only on the relative abundance of a bacteria from the Eggerthellaceae family explained 93% of the variance compared to the full model. Indeed in 95% of the individuals where this bacteria was detectable in stool this metabolite was also detectable in their serum, compared to only 23% of individuals for which this bacteria was not detected in their stool (p<10⁻²⁰, FIG. 4E).

TABLE 7

| | | Prediction | mean absolute |
|---|---|---|---|
| BIOCHEMICAL | Main driver | Pearson R | SHAP values |
| X - 11850 | (14306) S: Clostridium sp | 0.71031646 | 0.377656597 |
| | CAG 138 | | |
| X - 11843 | (14306) S: Clostridium sp | 0.666618163 | 0.354302695 |
| | CAG 138 | | |
| X - 12013 | (14306) S: Clostridium sp | 0.648938368 | 0.302711426 |
| | CAG 138 | | |
| p-cresol-glucuronide* | (14306) S: Clostridium sp | 0.634978874 | 0.169905629 |
| | CAG 138 | | |
| phenylacetylcarnitine | (14306) S: Clostridium sp | 0.452402753 | 0.102290219 |
| | CAG 138 | | |
| 5alpha-androstan- | (14311) F: Clostridiaceae | 0.43740413 | 0.099953342 |
| 3beta,17alpha-diol disulfate | | | |
| 4-methylcatechol sulfate | (14397) S: Collinsella sp | 0.403773094 | 0.210294783 |
| | CAG 289 | | |
| X - 16124 | (14816) F: Eggerthellaceae | 0.797710646 | 0.731921094 |
| 4-ethylcatechol sulfate | (14861) U: Unknown | 0.413293556 | 0.13518011 |
| X - 12816 | (14921) U: Unknown | 0.557555233 | 0.345160261 |
| X - 24410 | (15119) F: Clostridiales | 0.444238234 | 0.208132929 |
| | unclassified | | |
| X - 24811 | (15154) F: Clostridiales | 0.538397579 | 0.486675273 |
| | unclassified | | |
| 5-acetylamino-6-amino-3- | (15154) F: Clostridiales | 0.525783812 | 0.384463759 |
| methyluracil | unclassified | | |
| caffeine | (15154) F: Clostridiales | 0.479015705 | 0.247431918 |
| | unclassified | | |
| 1,7-dimethylurate | (15154) F: Clostridiales | 0.516271766 | 0.379716336 |
| | unclassified | | |
| 1,3-dimethylurate | (15154) F: Clostridiales | 0.506154168 | 0.432380221 |
| | unclassified | | |
| theophylline | (15154) F: Clostridiales | 0.500430564 | 0.35139537 |
| | unclassified | | |
| paraxanthine | (15154) F: Clostridiales | 0.494814811 | 0.480019756 |
| | unclassified | | |
| quinate | (15154) F: Clostridiales | 0.550659433 | 0.320069825 |
| | unclassified | | |
| X - 21442 | (15154) F: Clostridiales | 0.485910453 | 0.325317846 |
| | unclassified | | |
| 1,3,7-trimethylurate | (15154) F: Clostridiales | 0.481535209 | 0.332818145 |
| | unclassified | | |
| 1-methylurate | (15154) F: Clostridiales | 0.543233686 | 0.354953786 |
| | unclassified | | |
| 1-methylxanthine | (15154) F: Clostridiales | 0.522307846 | 0.409986488 |
| | unclassified | | |
| citraconate/glutaconate | (15154) F: Clostridiales | 0.397920928 | 0.126892778 |
| | unclassified | | |
| X - 23649 | (15154) F: Clostridiales | 0.405318367 | 0.214755421 |
| | unclassified | | |
| X - 12837 | (15154) F: Clostridiales | 0.449837283 | 0.17833279 |
| | unclassified | | |
| 3-methyl catechol sulfate (1) | (15154) F: Clostridiales | 0.430459047 | 0.195565418 |
| | unclassified | | |
| X - 23655 | (15154) F: Clostridiales | 0.419593407 | 0.266598091 |
| | unclassified | | |
| 3-hydroxypyridine sulfate | (15154) F: Clostridiales | 0.421956386 | 0.158726692 |
| | unclassified | | |
| taurolithocholate 3-sulfate | (15216) F: Clostridiales | 0.409120959 | 0.082624734 |
| | unclassified | | |
| 3-phenylpropionate | (15236) G: Firmicutes | 0.463566191 | 0.061088396 |
| (hydrocinnamate) | unclassified | | |
| cinnamoylglycine | (15236) G: Firmicutes | 0.50723076 | 0.095710259 |
| | unclassified | | |
| isoursodeoxycholate | (15265) S: Firmicutes | 0.45029973 | 0.072828701 |
| | bacterium CAG 103 | | |
| p-cresol sulfate | (15271) S: Ruthenibacterium | 0.588586011 | 0.131445263 |
| | lactatiformans | | |
| X - 23997 | (15356) U: Unknown | 0.413579828 | 0.109760662 |
| X - 12216 | (15369) S: Faecalibacterium | 0.473979701 | 0.081022475 |
| | sp CAG 74 | | |
| X - 12126 | (15369) S: Faecalibacterium | 0.506863696 | 0.116282931 |
| | sp CAG 74 | | |
| X - 12261 | (3926) U: Unknown | 0.652153347 | 0.165363667 |
| X - 17612 | (3957) F: Lachnospiraceae | 0.426420399 | 0.086057928 |
| phenylacetate | (3957) F: Lachnospiraceae | 0.564932682 | 0.083074571 |
| X - 17469 | (4552) S: Ruminococcus sp | 0.405437752 | 0.067777374 |
| glycolithocholate sulfate* | (4552) S: Ruminococcus sp | 0.458290469 | 0.113144654 |
| X - 21821 | (4564) S: Ruminococcus | 0.433421509 | 0.067984888 |
| | torques | | |
| X - 17351 | (4564) S: Ruminococcus | 0.416500421 | 0.085811771 |
| | torques | | |
| X - 12851 | (4782) U: Unknown | 0.479290527 | 0.141919097 |
| indolepropionate | (4810) S: Blautia sp CAG | 0.402571341 | 0.090296832 |
| | 237 | | |
| phenylacetylglutamine | (4951) S: Roseburia | 0.605077279 | 0.072142918 |
| | intestinalis | | |
| X - 13729 | (5190) S: Firmicutes | 0.412316821 | 0.14903645 |
| | bacterium CAG 102 | | |
| N-acetyl-cadaverine | (5843) S: Allisonella | 0.464233346 | 0.339842275 |
| | histaminiformans | | |
| ursodeoxycholate | (6148) F: | 0.412223334 | 0.133438158 |
| | Peptostreptococcaceae | | |

[0422] We also explored which metabolites were best explained by gut microbiome data. For each of the metabolite groups which were significantly predicted using the gut microbiome we computed a score between 0 and 1, representing the fraction of variance that the microbiome data model explains out of that explained by the sum of the microbiome model and the next best model from the feature groups except microbiome. For 80 microbiome predicted metabolite groups, the score was higher than 0.5, indicating that microbiome had the highest predictive power among all feature groups tested (Table 8).

TABLE 8

| | | | Next best r2 | Next best |
|---|---|---|---|---|
| | | | (other than | (other than |
| BIOCHEMICAL | Score | Microbiome r2 | Microbiome) | Microbiome) |
| carnitine | 0.276977 | 0.059446 | 0.155178 | Sex |
| 3-phenylpropionate | 0.765705 | 0.212152 | 0.064916 | Diet |
| (hydrocinnamate) | | | | |
| phenylacetate + | 0.927233 | 0.376409 | 0.02954 | Diet |
| phenylacetylglutamine | | | | |
| hippurate | 0.435493 | 0.132882 | 0.172249 | Diet |
| xanthurenate | 0.342061 | 0.016314 | 0.031379 | Diet |
| 3-methyl-2-oxovalerate + 4- | 0.157003 | 0.032823 | 0.176237 | Diet |
| methyl-2-oxopentanoate | | | | |
| 3-methylhistidine | 0.237835 | 0.098778 | 0.316545 | Diet |
| glucuronate | 0.308446 | 0.026981 | 0.060492 | Time of day |
| glycodeoxycholate | 0.7384 | 0.150068 | 0.053166 | Time of day |
| quinate | 0.367987 | 0.303854 | 0.521864 | Diet |
| theobromine + 7- | 0.276803 | 0.044924 | 0.117371 | Diet |
| methylxanthine | | | | |
| gentisate | 0.365171 | 0.104458 | 0.181595 | Diet |
| paraxanthine | 0.366152 | 0.24232 | 0.419483 | Diet |
| indolelactate | 0.090336 | 0.023379 | 0.235425 | Sex |
| 3-indoxyl sulfate | 0.756091 | 0.129252 | 0.041696 | Diet |
| 1,5-anhydroglucitol (1,5-AG) | 0.376695 | 0.170413 | 0.281977 | Diet |
| 2-arachidonoylglycerol (20:4) | 0.333827 | 0.01343 | 0.0268 | Diet |
| docosahexaenoate (DHA; | 0.099721 | 0.022662 | 0.204594 | Diet |
| 22:6n3) | | | | |
| alpha-hydroxyisocaproate | 0.190883 | 0.068172 | 0.288966 | Sex |
| phenyllactate (PLA) | 0.107697 | 0.018901 | 0.156605 | Sex |
| N-acetylaspartate (NAA) | 0.569841 | 0.052896 | 0.03993 | Anthropometrics |
| dehydroisoandrosterone | 0.21087 | 0.059998 | 0.224529 | Age |
| sulfate (DHEA-S) + | | | | |
| androstenediol | | | | |
| (3beta,17beta) monosulfate | | | | |
| (1) | | | | |
| acetylcarnitine (C2) | 0.242397 | 0.032595 | 0.101875 | Diet |
| 1-palmitoylglycerol (16:0) | 0.200892 | 0.02802 | 0.111459 | Cardiometabolic |
| tartronate (hydroxymalonate) | 0.367069 | 0.046048 | 0.079399 | Diet |
| oxalate (ethanedioate) | 0.299409 | 0.085133 | 0.199205 | Diet |
| 2,3-dihydroxypyridine | 0.332366 | 0.167731 | 0.336927 | Diet |
| 1-oleoylglycerol (18:1) | 0.075271 | 0.009936 | 0.122073 | Cardiometabolic |
| 2-oleoylglycerol (18:1) | 0.237011 | 0.020489 | 0.065958 | Anthropometrics |
| 2-linoleoylglycerol (18:2) | 0.42404 | 0.020463 | 0.027794 | Sex |
| N-acetylglycine | 0.363161 | 0.044588 | 0.078189 | Diet |
| threonate | 0.436455 | 0.101397 | 0.130922 | Diet |
| indoleacetate | 0.617335 | 0.053492 | 0.033158 | Diet |
| 1-methylhistidine | 0.308979 | 0.080211 | 0.179388 | Sex |
| isobutyrylcarnitine (C4) | 0.392293 | 0.0513 | 0.079469 | Diet |
| glycolithocholate | 0.766774 | 0.092844 | 0.02824 | Time of day |
| indolepropionate | 0.705066 | 0.155376 | 0.064995 | Diet |
| trigonelline (N′- | 0.26634 | 0.13141 | 0.361983 | Diet |
| methylnicotinate) | | | | |
| dodecanedioate | 0.395794 | 0.054011 | 0.082451 | Diet |
| 3-methylxanthine | 0.266129 | 0.046021 | 0.126905 | Diet |
| gamma-glutamylvaline | 0.268344 | 0.088646 | 0.2417 | Diet |
| 5-hydroxyhexanoate | 0.888408 | 0.127023 | 0.015955 | Time of day |
| propionylglycine | 0.293976 | 0.032648 | 0.078409 | Diet |
| propionylcarnitine (C3) | 0.397752 | 0.076808 | 0.116297 | Anthropometrics |
| 3-hydroxy-2-ethylpropionate | 0.358802 | 0.05234 | 0.093534 | Diet |
| 3-carboxy-4-methyl-5-propyl- | 0.079797 | 0.04595 | 0.529887 | Diet |
| 2-furanpropanoate (CMPF) | | | | |
| I-urobilinogen | 0.667928 | 0.086 | 0.042756 | Time of day |
| tauro-beta-muricholate | 0.334622 | 0.042089 | 0.083692 | Anthropometrics |
| N-acetylarginine | 0.171476 | 0.021006 | 0.101494 | Cardiometabolic |
| piperine | 0.379707 | 0.025898 | 0.042307 | Seasonal effects |
| myristoylcarnitine | 0.154516 | 0.021401 | 0.117106 | Diet |
| (C14) + palmitoylcarnitine | | | | |
| (C16) | | | | |
| epiandrosterone | 0.224373 | 0.03567 | 0.123306 | Sex |
| sulfate + androsterone sulfate | | | | |
| alpha-hydroxyisovalerate | 0.266863 | 0.07422 | 0.2039 | Sex |
| p-cresol sulfate | 0.940319 | 0.366329 | 0.023251 | Diet |
| DSGEGDFXAEGGGVR* + | 0.233223 | 0.02929 | 0.096297 | Diet |
| Fibrinopeptide A (5- | | | | |
| 16)* + Fibrinopeptide A (7- | | | | |
| 16)* + Fibrinopeptide A (3- | | | | |
| 16)** | | | | |
| stearoylcarnitine (C18) | 0.126388 | 0.02328 | 0.160912 | Diet |
| isovalerylcarnitine (C5) | 0.263186 | 0.057778 | 0.161754 | Cardiometabolic |
| 1,7- | 0.369806 | 0.266644 | 0.454393 | Diet |
| dimethylurate + theophylline | | | | |
| 1-methylurate + 1,3- | 0.379695 | 0.304028 | 0.496689 | Diet |
| dimethylurate | | | | |
| 5-acetylamino-6- | 0.366103 | 0.137479 | 0.238041 | Diet |
| formylamino-3-methyluracil | | | | |
| 5-acetylamino-6-amino-3- | 0.361042 | 0.269664 | 0.477241 | Diet |
| methyluracil | | | | |
| 1-methylxanthine | 0.354964 | 0.288703 | 0.524628 | Diet |
| N1-methylinosine | 0.269149 | 0.034367 | 0.093322 | Diet |
| 4-hydroxyhippurate | 0.357954 | 0.019849 | 0.035602 | Diet |
| 7-methylguanine | 0.563232 | 0.092589 | 0.0718 | Diet |
| 3-methylcytidine | 0.550664 | 0.048046 | 0.039205 | Age |
| N1-Methyl-2-pyridone-5- | 0.217095 | 0.043443 | 0.156667 | Diet |
| carboxamide | | | | |
| 1-docosahexaenoylglycerol | 0.255119 | 0.059142 | 0.172678 | Diet |
| (22:6) | | | | |
| gamma-glutamylisoleucine* | 0.206551 | 0.053026 | 0.203694 | Anthropometrics |
| oleoylcarnitine (C18:1) | 0.192587 | 0.012451 | 0.052201 | Sex |
| gamma-glutamyl-2- | 0.484066 | 0.052892 | 0.056374 | Diet |
| aminobutyrate | | | | |
| 2-methylbutyrylcarnitine (C5) | 0.383153 | 0.093097 | 0.149879 | Sex |
| phenol sulfate | 0.92377 | 0.131786 | 0.010875 | Age |
| pyroglutamine* | 0.101858 | 0.040868 | 0.360359 | Sex |
| 2-hydroxy-3-methylvalerate | 0.1959 | 0.053295 | 0.218756 | Sex |
| dimethyl sulfoxide (DMSO) | 0.409281 | 0.081046 | 0.116975 | Diet |
| glutarylcarnitine (C5-DC) | 0.071028 | 0.015927 | 0.208308 | Sex |
| tiglylcarnitine (C5:1-DC) | 0.179638 | 0.040058 | 0.182934 | Diet |
| catechol sulfate + O- | 0.31156 | 0.0758 | 0.167492 | Diet |
| methylcatechol sulfate | | | | |
| 7-alpha-hydroxy-3-oxo-4- | 0.422661 | 0.033347 | 0.04555 | Sex |
| cholestenoate (7-Hoca) | | | | |
| tetradecanedioate | 0.293974 | 0.016216 | 0.038946 | Sex |
| 1-myristoylglycerol (14:0) | 0.182225 | 0.029043 | 0.130336 | Anthropometrics |
| 3-(3- | 0.453199 | 0.087249 | 0.10527 | Diet |
| hydroxyphenyl)propionate + 3- | | | | |
| hydroxyhippurate + X - 12543 | | | | |
| ectoine | 0.207595 | 0.02318 | 0.088479 | Sex |
| glycolithocholate sulfate* | 0.814685 | 0.206354 | 0.046939 | Sex |
| taurolithocholate 3-sulfate | 0.855405 | 0.190948 | 0.032277 | Anthropometrics |
| deoxycarnitine | 0.146301 | 0.054833 | 0.319963 | Sex |
| 1-ribosyl-imidazoleacetate* | 0.357369 | 0.028333 | 0.050949 | Diet |
| indoleacetylglutamine | 0.281227 | 0.013213 | 0.03377 | Age |
| hexanoylglutamine | 0.205895 | 0.030468 | 0.117512 | Macronutrients |
| tryptophan betaine | 0.223764 | 0.081053 | 0.281174 | Diet |
| 4-ethylphenylsulfate | 0.276416 | 0.076357 | 0.199882 | Diet |
| 3-methyladipate | 0.373318 | 0.031094 | 0.052197 | Diet |
| o-cresol sulfate | 0.058764 | 0.019915 | 0.318978 | Time of day |
| 4-allylphenol sulfate | 0.461766 | 0.059053 | 0.068832 | Diet |
| N-methylproline + stachydrine | 0.168014 | 0.043504 | 0.215429 | Diet |
| beta-cryptoxanthin | 0.260259 | 0.111969 | 0.318252 | Diet |
| 5alpha-androstan- | 0.125245 | 0.04892 | 0.341679 | Sex |
| 3beta,17beta-diol disulfate | | | | |
| 5alpha-pregnan- | 0.214237 | 0.029969 | 0.109918 | Age |
| 3beta,20alpha-diol disulfate | | | | |
| glycocholenate sulfate* | 0.16895 | 0.013276 | 0.065304 | Diet |
| androstenediol (3beta,17beta) | 0.167763 | 0.030466 | 0.151134 | Sex |
| disulfate (1) | | | | |
| pregnen-diol disulfate | 0.30319 | 0.054851 | 0.126061 | Sex |
| C21H34O8S2* + pregnenetriol | | | | |
| disulfate* | | | | |
| androstenediol (3beta,17beta) | 0.225886 | 0.05468 | 0.187388 | Sex |
| disulfate (2) | | | | |
| 21-hydroxypregnenolone | 0.199878 | 0.022581 | 0.090394 | Age |
| disulfate | | | | |
| 5alpha-androstan- | 0.254411 | 0.100841 | 0.295528 | Sex |
| 3alpha,17alpha-diol | | | | |
| monosulfate | | | | |
| 5alpha-pregnan- | 0.237568 | 0.047354 | 0.151974 | Age |
| 3beta,20alpha-diol | | | | |
| monosulfate (2) + 5alpha- | | | | |
| pregnan-3beta,20beta-diol | | | | |
| monosulfate (1) | | | | |
| 5alpha-pregnan-3(alpha or | 0.216205 | 0.029103 | 0.105504 | Age |
| beta),20beta-diol disulfate | | | | |
| 5alpha-androstan- | 0.123633 | 0.096467 | 0.683802 | Sex |
| 3alpha,17beta-diol disulfate | | | | |
| 5alpha-androstan- | 0.147812 | 0.030066 | 0.173341 | Sex |
| 3alpha,17beta-diol | | | | |
| monosulfate (1) + 5alpha- | | | | |
| androstan-3beta,17beta-diol | | | | |
| monosulfate (2) | | | | |
| 5alpha-androstan- | 0.557296 | 0.213581 | 0.169664 | Sex |
| 3beta,17alpha-diol disulfate | | | | |
| androstenediol (3alpha, | 0.187007 | 0.051007 | 0.221749 | Sex |
| 17alpha) monosulfate (2) | | | | |
| androstenediol (3alpha, | 0.16319 | 0.049941 | 0.25609 | Sex |
| 17alpha) monosulfate (3) | | | | |
| 5alpha-pregnan-3beta-ol,20-one | 0.206087 | 0.027644 | 0.106492 | Age |
| sulfate | | | | |
| 4-hydroxycoumarin | 0.80298 | 0.10379 | 0.025466 | Time of day |
| pregn steroid monosulfate | 0.238328 | 0.076802 | 0.245452 | Age |
| C21H34O5S* + pregnenolone | | | | |
| sulfate | | | | |
| sphingomyelin (d18:1/18:1, | 0.335254 | 0.045242 | 0.089706 | Sex |
| d18:2/18:0) | | | | |
| 17alpha- | 0.174737 | 0.039231 | 0.185283 | Age |
| hydroxypregnenolone 3- | | | | |
| sulfate | | | | |
| andro steroid monosulfate | 0.233965 | 0.024136 | 0.079025 | Age |
| C19H28O6S (1)* + 16a- | | | | |
| hydroxy DHEA 3-sulfate | | | | |
| ergothioneine | 0.419401 | 0.105559 | 0.146132 | Diet |
| S-methylmethionine | 0.273073 | 0.04592 | 0.122239 | Diet |
| indole-3-carboxylic acid | 0.701777 | 0.044805 | 0.01904 | Time of day |
| tridecenedioate (C13:1-DC)* | 0.136806 | 0.029936 | 0.188882 | Diet |
| N-acetyl-3-methylhistidine* | 0.245217 | 0.03119 | 0.096003 | Diet |
| 7-methylurate | 0.307947 | 0.049891 | 0.11212 | Diet |
| N-acetyl-cadaverine | 0.780853 | 0.184978 | 0.051914 | Diet |
| cinnamoylglycine | 0.742039 | 0.246357 | 0.085643 | Diet |
| 2,3-dihydroxyisovalerate | 0.468748 | 0.030495 | 0.034561 | Sex |
| cysteinylglycine disulfide* | 0.07097 | 0.014108 | 0.184685 | Anthropometrics |
| isoursodeoxycholate | 0.926202 | 0.201975 | 0.016093 | Anthropometrics |
| formiminoglutamate | 0.307344 | 0.056343 | 0.126979 | Cardiometabolic |
| L-urobilin | 0.85654 | 0.151148 | 0.025315 | Time of day |
| S-methylcysteine + S- | 0.148468 | 0.040269 | 0.230963 | Diet |
| methylcysteine sulfoxide | | | | |
| androsterone glucuronide | 0.050174 | 0.012288 | 0.232627 | Sex |
| argininate* | 0.270733 | 0.0546 | 0.147073 | Diet |
| 1-lignoceroyl-GPC (24:0) | 0.385846 | 0.091729 | 0.146006 | Diet |
| 1-(1-enyl-palmitoyl)-GPC | 0.246711 | 0.015476 | 0.047253 | Anthropometrics |
| (P-16:0)* | | | | |
| 1-methyl-5- | 0.253327 | 0.125742 | 0.37062 | Diet |
| imidazoleacetate + X - 13835 | | | | |
| glycoursodeoxycholate | 0.926769 | 0.146924 | 0.01161 | Diet |
| tauroursodeoxycholate | 0.643116 | 0.044636 | 0.02477 | Time of day |
| 15-methylpalmitate + myristate | 0.071405 | 0.014394 | 0.187193 | Diet |
| (14:0) | | | | |
| 1-(1-enyl-palmitoyl)-GPE (P- | 0.2704 | 0.040271 | 0.108661 | Diet |
| 16:0)* + 1-(1-enyl-oleoyl)- | | | | |
| GPE(P-18:1)* | | | | |
| 1-(1-enyl-stearoyl)-GPE | 0.223621 | 0.049078 | 0.170391 | Diet |
| (P-18:0)* | | | | |
| N-oleoyltaurine | 0.308874 | 0.023147 | 0.051792 | Diet |
| linoleoylcarnitine (C18:2)* | 0.166332 | 0.028811 | 0.144404 | Sex |
| leucylalanine | 0.074872 | 0.012745 | 0.15748 | Diet |
| N-palmitoyltaurine | 0.357112 | 0.021222 | 0.038204 | Anthropometrics |
| trimethylamine N-oxide | 0.351416 | 0.041943 | 0.077412 | Diet |
| imidazole propionate | 0.50283 | 0.058109 | 0.057455 | Sex |
| pregnanediol-3-glucuronide | 0.343259 | 0.045552 | 0.087153 | Age |
| 3-hydroxybutyrylcarnitine (1) | 0.297005 | 0.064329 | 0.152263 | Macronutrients |
| 5-hydroxymethyl-2-furoic | 0.437487 | 0.036237 | 0.046592 | Diet |
| acid | | | | |
| N-acetylcarnosine | 0.189673 | 0.120697 | 0.515647 | Sex |
| margaroylcarnitine* | 0.442252 | 0.037078 | 0.046761 | Diet |
| N-methyltaurine | 0.322565 | 0.047903 | 0.100604 | Diet |
| glycohyocholate + X - 22716 | 0.353491 | 0.055731 | 0.101928 | Diet |
| 4-methylcatechol sulfate | 0.84032 | 0.144559 | 0.02747 | Time of day |
| 3-methyl catechol sulfate | 0.390624 | 0.185658 | 0.289628 | Diet |
| (1) + 3-methyl catechol sulfate | | | | |
| (2) | | | | |
| indolin-2-one | 0.874083 | 0.143459 | 0.020666 | Sex |
| 3-acetylphenol sulfate | 0.428795 | 0.101779 | 0.135582 | Diet |
| sphingomyelin (d18:1/14:0, | 0.30794 | 0.112004 | 0.251715 | Diet |
| d16:1/16:0)* | | | | |
| N-delta-acetylornithine | 0.333084 | 0.100466 | 0.201158 | Diet |
| acisoga | 0.414816 | 0.043529 | 0.061406 | Diet |
| benzoylcarnitine* | 0.617258 | 0.099975 | 0.061992 | Diet |
| N-formylanthranilic acid | 0.288919 | 0.012053 | 0.029664 | Diet |
| N2,N5-diacetylornithine | 0.359311 | 0.10592 | 0.188867 | Diet |
| 1H-indole-7-acetic acid | 0.570809 | 0.086686 | 0.065179 | Time of day |
| 3-(3- | 0.312026 | 0.042273 | 0.093206 | Diet |
| hydroxyphenyl)propionate | | | | |
| sulfate | | | | |
| methyl glucopyranoside | 0.357751 | 0.131982 | 0.236939 | Diet |
| (alpha + beta) | | | | |
| sphingomyelin (d18:2/14:0, | 0.305079 | 0.091381 | 0.208152 | Sex |
| d18:1/14:1)* | | | | |
| 5alpha-androstan- | 0.154317 | 0.142246 | 0.779535 | Sex |
| 3alpha,17beta-diol | | | | |
| monosulfate (2) | | | | |
| 4-hydroxychlorothalonil | 0.365537 | 0.041478 | 0.071994 | Diet |
| 3-hydroxypyridine sulfate + | 0.382638 | 0.224392 | 0.362042 | Diet |
| X - 23655 | | | | |
| phenylacetylcarnitine | 0.883782 | 0.18954 | 0.024925 | Sex |
| arabonate/xylonate | 0.358472 | 0.066979 | 0.119867 | Diet |
| pregnanolone/allopregnanolone | 0.147609 | 0.02298 | 0.132703 | Age |
| sulfate | | | | |
| p-cresol-glucuronide* | 0.928391 | 0.401115 | 0.030939 | Anthropometrics |
| 6-hydroxyindole sulfate + | 0.789913 | 0.123466 | 0.032837 | Diet |
| X - 21310 | | | | |
| sphingomyelin (d18:1/22:1, | 0.337653 | 0.052896 | 0.103761 | Sex |
| d18:2/22:0, d16:1/24:1)* | | | | |
| sphingomyelin (d17:1/16:0, | 0.255659 | 0.104608 | 0.304562 | Diet |
| d18:1/15:0, | | | | |
| d16:1/17:0)* + sphingomyelin | | | | |
| (d18:1/17:0, d17:1/18:0, | | | | |
| d19:1/16:0) | | | | |
| 3-methoxycatechol sulfate | 0.409823 | 0.029801 | 0.042916 | Diet |
| (1) + 1,2,3-benzenetriol | | | | |
| sulfate (2) | | | | |
| arabitol/xylitol | 0.439269 | 0.051734 | 0.066039 | Age |
| citraconate/glutaconate + maleate | 0.425319 | 0.167781 | 0.226702 | Diet |
| adipoylcarnitine (C6-DC) | 0.226355 | 0.027684 | 0.094619 | Diet |
| glycodeoxycholate sulfate | 0.377098 | 0.02516 | 0.04156 | Seasonal effects |
| taurodeoxycholic acid 3- | 0.482548 | 0.051577 | 0.055307 | Time of day |
| sulfate | | | | |
| phenol glucuronide | 0.779761 | 0.054834 | 0.015488 | Sex |
| linoleoyl ethanolamide | 0.282102 | 0.009612 | 0.024462 | Time of day |
| 1-stearoyl-2- | 0.130097 | 0.035116 | 0.234806 | Diet |
| docosahexaenoyl-GPC | | | | |
| (18:0/22:6) | | | | |
| 2-hydroxybutyrate/2- | 0.179884 | 0.041659 | 0.189928 | Diet |
| hydroxyisobutyrate | | | | |
| 2-hydroxylaurate | 0.208051 | 0.05741 | 0.218534 | Sex |
| sphingomyelin (d18:2/24:1, | 0.158306 | 0.029344 | 0.156017 | Sex |
| d18:1/24:2)* | | | | |
| 1-palmitoyl-2-palmitoleoyl- | 0.271175 | 0.047007 | 0.126339 | Diet |
| GPC (16:0/16:1)* + 1- | | | | |
| myristoyl-2-palmitoyl-GPC | | | | |
| (14:0/16:0) | | | | |
| gamma-tocopherol/beta- | 0.295388 | 0.041578 | 0.09918 | Diet |
| tocopherol | | | | |
| 1-(1-enyl-stearoyl)-2- | 0.187762 | 0.073886 | 0.319622 | Diet |
| arachidonoyl-GPE (P- | | | | |
| 18:0/20:4)* | | | | |
| 1-(1-enyl-palmitoyl)-2- | 0.286155 | 0.137336 | 0.342599 | Diet |
| arachidonoyl-GPE (P- | | | | |
| 16:0/20:4)* | | | | |
| 1-(1-enyl-palmitoyl)-2-oleoyl- | 0.221341 | 0.057445 | 0.202087 | Anthropometrics |
| GPC (P-16:0/18:1)* | | | | |
| 1-(1-enyl-palmitoyl)-2- | 0.175395 | 0.047465 | 0.223155 | Diet |
| arachidonoyl-GPC (P- | | | | |
| 16:0/20:4)* | | | | |
| sphingomyelin (d18:0/18:0, | 0.205885 | 0.022245 | 0.085801 | Cardiometabolic |
| d19:0/17:0)* + sphingomyelin | | | | |
| (d18:0/20:0, d16:0/22:0)* | | | | |
| myristoyl | 0.241208 | 0.049654 | 0.156202 | Diet |
| dihydrosphingomyelin | | | | |
| (d18:0/14:0)* | | | | |
| 1-(1-enyl-palmitoyl)-2- | 0.32451 | 0.055708 | 0.115959 | Diet |
| linoleoyl-GPE (P-16:0/18:2)* | | | | |
| 1-oleoyl-2-docosahexaenoyl- | 0.231722 | 0.033848 | 0.112222 | Diet |
| GPC (18:1/22:6)* | | | | |
| 1-palmitoyl-2-gamma- | 0.242427 | 0.01428 | 0.044623 | Anthropometrics |
| linolenoyl-GPC | | | | |
| (16:0/18:3n6)* | | | | |
| 1-(1-enyl-palmitoyl)-2- | 0.211229 | 0.016329 | 0.060975 | Sex |
| palmitoleoyl-GPC (P- | | | | |
| 16:0/16:1)* | | | | |
| 1-oleoyl-2-docosahexaenoyl- | 0.281112 | 0.024935 | 0.063767 | Diet |
| GPE (18:1/22:6)* | | | | |
| 2-methylserine | 0.253501 | 0.028295 | 0.083321 | Diet |
| glycocholate glucuronide (1) | 0.837853 | 0.071558 | 0.013848 | Drugs |
| 14-HDoHE/17-HDoHE | 0.444463 | 0.032585 | 0.040728 | Seasonal effects |
| catechol glucuronide | 0.238255 | 0.026107 | 0.083469 | Diet |
| palmitoloelycholine | 0.482857 | 0.026824 | 0.028729 | Sex |
| eicosapentaenoylcholine | 0.37232 | 0.018401 | 0.031021 | Cardiometabolic |
| caffeic acid sulfate | 0.24934 | 0.050395 | 0.151718 | Diet |
| 2,3-dihydroxy-2- | 0.28063 | 0.037595 | 0.096372 | Diet |
| methylbutyrate | | | | |
| linoleoyl-arachidonoyl- | 0.15431 | 0.011884 | 0.06513 | Cardiometabolic |
| glycerol (18:2/20:4) | | | | |
| [2]* + linoleoyl-arachidonoyl- | | | | |
| glycerol (18:2/20:4) [1]* | | | | |
| perfluorooctanesulfonic acid | 0.168419 | 0.051079 | 0.252208 | Diet |
| (PFOS) | | | | |
| 2-hydroxynervonate* | 0.354288 | 0.03507 | 0.063918 | Diet |
| N-palmitoyl- | 0.577092 | 0.042882 | 0.031425 | Diet |
| heptadecasphingosine | | | | |
| (d17:1/16:0)* | | | | |
| ceramide (d18:1/14:0, | 0.335338 | 0.070115 | 0.138972 | Diet |
| d16:1/16:0)* | | | | |
| glycosyl ceramide | 0.319625 | 0.02929 | 0.062349 | Sex |
| (d18:2/24:1, d18:1/24:2)* | | | | |
| sphingomyelin (d18:1/19:0, | 0.281767 | 0.08422 | 0.21468 | Diet |
| d19:1/18:0)* + sphingomyelin | | | | |
| (d18:1/21:0, d17:1/22:0, | | | | |
| d16:1/23:0)* | | | | |
| sphingomyelin (d18:2/21:0, | 0.323837 | 0.086469 | 0.180544 | Sex |
| d16:2/23:0)* + sphingomyelin | | | | |
| (d18:2/23:0, d18:1/23:1, | | | | |
| d17:1/24:1)* | | | | |
| sphingomyelin (d18:2/23:1)* | 0.257535 | 0.083923 | 0.241946 | Diet |
| sphingomyelin (d17:2/16:0, | 0.342481 | 0.109936 | 0.211062 | Diet |
| d18:2/15:0)* | | | | |
| linolenoylcarnitine (C18:3)* | 0.210918 | 0.020812 | 0.07786 | Sex |
| cerotoylcarnitine (C26)* | 0.11618 | 0.013297 | 0.101154 | Sex |
| ximenoylcarnitine (C26:1)* | 0.265347 | 0.020312 | 0.056238 | Age |
| arachidonoylcarnitine (C20:4) | 0.094692 | 0.018103 | 0.173076 | Sex |
| docosahexaenoylcarnitine | 0.317392 | 0.017468 | 0.037569 | Diet |
| (C22:6)* | | | | |
| N-trimethyl 5-aminovalerate | 0.165255 | 0.029086 | 0.14692 | Diet |
| carotene diol (2) + carotene | 0.460312 | 0.11677 | 0.136906 | Diet |
| diol (1) | | | | |
| carotene diol (3) | 0.141962 | 0.013149 | 0.079477 | Diet |
| hydroxy-CMPF* | 0.039891 | 0.021204 | 0.51034 | Diet |
| dodecenedioate (C12:1-DC)* | 0.192548 | 0.033906 | 0.142187 | Time of day |
| 3-carboxy-4-methyl-5-pentyl- | 0.334037 | 0.070428 | 0.14041 | Diet |
| 2-furanpropionate (3- | | | | |
| CMPFP)** | | | | |
| glucuronide of C10H18O2 | 0.343845 | 0.017662 | 0.033704 | Seasonal effects |
| (7)* | | | | |
| perfluorooctanoate (PFOA) | 0.376413 | 0.027342 | 0.045295 | Anthropometrics |
| N-methylhydroxyproline** | 0.217206 | 0.022951 | 0.082713 | Diet |
| N,N,N-trimethyl- | 0.096878 | 0.043365 | 0.404257 | Sex |
| alanylproline betaine (TMAP) | | | | |
| gamma-glutamylcitrulline* | 0.484649 | 0.052195 | 0.055501 | Sex |
| glycine conjugate of | 0.302041 | 0.061761 | 0.142718 | Diet |
| C10H14O2 (1)* | | | | |
| N-acetyl-isoputreanine* | 0.324644 | 0.030469 | 0.063385 | Diet |
| 2-naphthol sulfate | 0.477464 | 0.037791 | 0.041359 | LifeStyle |
| dihydrocaffeate sulfate (2) | 0.303748 | 0.046147 | 0.105779 | Diet |
| 2,6-dihydroxybenzoic acid | 0.166009 | 0.036423 | 0.182979 | Diet |
| 2,3-dihydroxy-5-methylthio- | 0.096753 | 0.02623 | 0.24487 | Cardiometabolic |
| 4-pentenoate (DMTPA)* | | | | |
| taurochenodeoxycholic acid | 0.357058 | 0.024331 | 0.043812 | Time of day |
| 3-sulfate | | | | |
| eicosenedioate (C20:1-DC)* | 0.232762 | 0.06327 | 0.208553 | Diet |
| hydroxy-N6,N6,N6- | 0.197005 | 0.040766 | 0.166161 | Sex |
| trimethyllysine* | | | | |
| picolinoylglycine | 0.337869 | 0.051426 | 0.100781 | Age |
| sarcosine | 0.33884 | 0.023562 | 0.045975 | Time of day |
| glycerate | 0.691439 | 0.046054 | 0.020552 | Sex |
| N-acetylmethionine | 0.470656 | 0.042956 | 0.048313 | Seasonal effects |
| thyroxine | 0.299497 | 0.027143 | 0.063486 | Sex |
| alpha-tocopherol | 0.430181 | 0.052832 | 0.069982 | Age |
| vanillylmandelate (VMA) | 0.112075 | 0.02733 | 0.216523 | Age |
| chenodeoxycholate | 0.652154 | 0.027443 | 0.014637 | Time of day |
| 2-aminobutyrate | 0.267642 | 0.074972 | 0.205149 | Diet |
| urate | 0.146965 | 0.062233 | 0.361222 | Anthropometrics |
| ursodeoxycholate | 0.817802 | 0.152604 | 0.033999 | Sex |
| 4-hydroxyphenylpyruvate | 0.142653 | 0.012647 | 0.076009 | Diet |
| isocitrate | 0.303912 | 0.034287 | 0.078531 | Diet |
| creatine | 0.088312 | 0.023386 | 0.241425 | Diet |
| cys-gly, oxidized | 0.109975 | 0.013287 | 0.107532 | Sex |
| choline | 0.237484 | 0.013308 | 0.042728 | Diet |
| anthranilate | 0.78757 | 0.114992 | 0.031017 | Age |
| cholate | 0.609831 | 0.086449 | 0.05531 | Time of day |
| N-palmitoyl-sphingosine | 0.52251 | 0.059534 | 0.054405 | Age |
| (d18:1/16:0) | | | | |
| stearoyl sphingomyelin | 0.345845 | 0.064702 | 0.122383 | Diet |
| (d18:1/18:0) | | | | |
| N-stearoyl-sphingosine | 0.30437 | 0.049542 | 0.113227 | Diet |
| (d18:1/18:0)* | | | | |
| taurodeoxycholate | 0.958573 | 0.095894 | 0.004144 | Macronutrients |
| N6,N6,N6-trimethyllysine | 0.227981 | 0.038408 | 0.130061 | Sex |
| 3-(4-hydroxyphenyl)lactate | 0.184398 | 0.062185 | 0.27505 | Sex |
| biliverdin + bilirubin (E,E)* | 0.226841 | 0.032125 | 0.109494 | Sex |
| 3-hydroxybutyrate (BHBA) | 0.193033 | 0.037267 | 0.155792 | Macronutrients |
| creatinine | 0.145844 | 0.083478 | 0.4889 | Sex |
| cystine | 0.193485 | 0.038517 | 0.160552 | Age |
| deoxycholate | 0.706467 | 0.035508 | 0.014753 | Age |
| gamma-glutamylglutamate | 0.271228 | 0.048136 | 0.129338 | Anthropometrics |
| glutarate (pentanedioate) | 0.621059 | 0.087665 | 0.053489 | Sex |
| guanidinoacetate | 0.13674 | 0.021507 | 0.135779 | Sex |
| myo-inositol | 0.511408 | 0.070411 | 0.06727 | Time of day |
| isoleucine | 0.189793 | 0.031782 | 0.135676 | Diet |
| 2-aminoadipate | 0.224225 | 0.057367 | 0.198478 | Diet |
| citrulline | 0.446846 | 0.046122 | 0.057095 | Age |
| leucine + gamma- | 0.288715 | 0.06693 | 0.164891 | Anthropometrics |
| glutamylleucine | | | | |
| malate | 0.321709 | 0.033531 | 0.070697 | Diet |
| nicotinamide | 0.127478 | 0.018211 | 0.124646 | Time of day |
| ornithine | 0.167702 | 0.018443 | 0.091533 | Anthropometrics |
| phytanate | 0.180388 | 0.033068 | 0.150248 | Diet |
| proline | 0.289837 | 0.025212 | 0.061775 | Sex |
| retinol (Vitamin A) | 0.250333 | 0.027347 | 0.081897 | Cardiometabolic |
| taurine | 0.599726 | 0.035708 | 0.023833 | Seasonal effects |
| urea | 0.260789 | 0.051152 | 0.144991 | Diet |
| glutamate | 0.18149 | 0.040377 | 0.182097 | Anthropometrics |
| valine | 0.186757 | 0.032666 | 0.142244 | Diet |
| caffeine + 1,3,7-trimethylurate | 0.394336 | 0.270008 | 0.414708 | Diet |
| caprate (10:0) | 0.1687 | 0.02295 | 0.11309 | Diet |
| alpha-ketoglutarate | 0.226222 | 0.035558 | 0.121624 | Anthropometrics |
| X - 01911 | 0.223063 | 0.016043 | 0.055877 | Sex |
| X - 11261 | 0.315102 | 0.048919 | 0.10633 | Diet |
| X - 11299 + X - 11483 | 0.754082 | 0.025772 | 0.008405 | Macronutrients |
| X - 11308 | 0.25473 | 0.119144 | 0.348583 | Diet |
| X - 11315 | 0.266674 | 0.135361 | 0.372229 | Diet |
| X - 11378 | 0.158686 | 0.052512 | 0.278406 | Sex |
| X - 11381 | 0.205243 | 0.072687 | 0.281463 | Diet |
| X - 11444 | 0.083443 | 0.018535 | 0.203599 | Anthropometrics |
| X - 11470 | 0.068143 | 0.011831 | 0.16179 | Time of day |
| X - 11478 | 0.42134 | 0.056492 | 0.077585 | Diet |
| X - 11485 | 0.232614 | 0.023795 | 0.078497 | Diet |
| X - 11491 | 0.205863 | 0.018237 | 0.070353 | Anthropometrics |
| X - 11640 | 0.403971 | 0.053868 | 0.079478 | Diet |
| X - 11795 | 0.110742 | 0.034854 | 0.279879 | Diet |
| X - 11843 + X - 11850 + | 0.953159 | 0.479096 | 0.023544 | Macronutrients |
| X - 12013 | | | | |
| X - 11849 | 0.102283 | 0.019434 | 0.170569 | Diet |
| X - 11852 | 0.436372 | 0.014419 | 0.018625 | Diet |
| X - 11858 | 0.051082 | 0.017322 | 0.321775 | Diet |
| X - 11880 + X - 11372 | 0.278849 | 0.137921 | 0.356687 | Diet |
| X - 12063 | 0.123077 | 0.041351 | 0.294627 | Anthropometrics |
| X - 12101 | 0.178396 | 0.028461 | 0.131076 | Diet |
| X - 12126 | 0.846036 | 0.251003 | 0.045678 | Diet |
| X - 12206 | 0.47295 | 0.034313 | 0.038238 | Diet |
| X - 12212 | 0.503736 | 0.057528 | 0.056675 | Diet |
| X - 12216 | 0.933304 | 0.234275 | 0.016742 | Time of day |
| X - 12221 | 0.316174 | 0.048395 | 0.10467 | Diet |
| 4-ethylcatechol sulfate | 0.383336 | 0.182636 | 0.293803 | Diet |
| X - 12261 | 0.964726 | 0.403181 | 0.014742 | Cardiometabolic |
| X - 12283 | 0.640942 | 0.128873 | 0.072195 | Diet |
| X - 12306 | 0.592862 | 0.17703 | 0.121572 | Diet |
| X - 12329 + N- | 0.401011 | 0.113761 | 0.169925 | Diet |
| (2-furoyl)glycine | | | | |
| X - 12411 | 0.256335 | 0.036709 | 0.106498 | Time of day |
| X - 12544 | 0.283296 | 0.043788 | 0.110778 | Diet |
| X - 12718 | 0.619573 | 0.14593 | 0.089603 | Age |
| X - 12730 | 0.424132 | 0.107163 | 0.1455 | Diet |
| X - 12738 | 0.429681 | 0.094466 | 0.125386 | Diet |
| X - 12798 | 0.278326 | 0.024121 | 0.062544 | Diet |
| X - 12816 | 0.527171 | 0.311965 | 0.279807 | Diet |
| X - 12822 | 0.569941 | 0.081195 | 0.061267 | Sex |
| X - 12830 | 0.568434 | 0.037847 | 0.028734 | Time of day |
| X - 12837 | 0.590399 | 0.222416 | 0.154305 | Diet |
| X - 12851 | 0.938032 | 0.269466 | 0.017802 | Sex |
| X - 12906 | 0.182565 | 0.03077 | 0.137774 | Time of day |
| X - 13431 | 0.297652 | 0.042781 | 0.100947 | Diet |
| X - 13684 | 0.144862 | 0.019582 | 0.115595 | Sex |
| X - 13703 + X - 13255 | 0.387965 | 0.060009 | 0.094668 | Diet |
| X - 13729 | 0.759983 | 0.18146 | 0.057308 | Diet |
| X - 13844 | 0.110693 | 0.038524 | 0.309501 | Diet |
| X - 13866 | 0.154912 | 0.025277 | 0.137895 | Diet |
| X - 14082 | 0.484328 | 0.062808 | 0.066872 | Diet |
| X - 14662 | 0.754385 | 0.122946 | 0.040029 | Diet |
| X - 14939 | 0.135131 | 0.036604 | 0.234274 | Diet |
| X - 15461 | 0.442749 | 0.061711 | 0.077671 | Cardiometabolic |
| X - 15503 | 0.131259 | 0.036143 | 0.239213 | Age |
| X - 15728 | 0.582189 | 0.046332 | 0.03325 | Seasonal effects |
| X - 16087 | 0.389475 | 0.080624 | 0.126383 | Diet |
| X - 16124 | 0.945499 | 0.572857 | 0.033021 | Seasonal effects |
| X - 16580 | 0.32773 | 0.051125 | 0.104872 | Diet |
| X - 16654 | 0.879092 | 0.124415 | 0.017112 | Sex |
| X - 16935 | 0.304491 | 0.082094 | 0.187518 | Diet |
| X - 16944 | 0.372807 | 0.03057 | 0.051429 | Diet |
| X - 17145 | 0.390481 | 0.163885 | 0.255816 | Diet |
| X - 17185 | 0.240775 | 0.094821 | 0.298997 | Diet |
| X - 17337 | 0.345807 | 0.044816 | 0.084783 | Diet |
| X - 17354 + X - 22509 | 0.508746 | 0.11158 | 0.107743 | Diet |
| X - 17367 + X - 17325 | 0.207975 | 0.041148 | 0.156702 | Diet |
| X - 17469 | 0.889628 | 0.181012 | 0.022457 | LifeStyle |
| X - 17612 | 0.879879 | 0.200559 | 0.02738 | Time of day |
| X - 17653 | 0.209 | 0.049858 | 0.188697 | Diet |
| X - 17654 | 0.272664 | 0.064005 | 0.170734 | Diet |
| X - 17655 | 0.172795 | 0.024202 | 0.11586 | Diet |
| X - 17676 | 0.221321 | 0.040236 | 0.141564 | Diet |
| X - 18240 | 0.485008 | 0.074912 | 0.079543 | Diet |
| X - 18249 | 0.275114 | 0.115544 | 0.304443 | Diet |
| X - 18606 | 0.340199 | 0.04149 | 0.080469 | Diet |
| X - 18886 | 0.300093 | 0.069255 | 0.161523 | Diet |
| X - 18887 | 0.294542 | 0.019636 | 0.04703 | Time of day |
| X - 18899 | 0.102736 | 0.009298 | 0.081209 | Diet |
| X - 18901 | 0.281107 | 0.048952 | 0.125188 | Diet |
| X - 18914 | 0.244488 | 0.101505 | 0.313669 | Diet |
| X - 18922 | 0.203237 | 0.064215 | 0.251745 | Diet |
| X - 19434 | 0.648943 | 0.075494 | 0.04084 | Time of day |
| X - 21285 | 0.207055 | 0.031312 | 0.119913 | Sex |
| X - 21286 | 0.84225 | 0.121941 | 0.022839 | Time of day |
| X - 21319 | 0.273118 | 0.048592 | 0.129323 | Diet |
| X - 21339 | 0.248849 | 0.101561 | 0.306562 | Diet |
| X - 21364 | 0.163809 | 0.028826 | 0.147146 | Sex |
| X - 21383 | 0.19078 | 0.038465 | 0.163157 | Diet |
| X - 21410 | 0.333429 | 0.042032 | 0.084028 | Diet |
| X - 21442 | 0.315377 | 0.229695 | 0.498624 | Diet |
| X - 21467 | 0.38719 | 0.024764 | 0.039194 | Drugs |
| X - 21657 | 0.412839 | 0.034462 | 0.049014 | Sex |
| X - 21659 + X - 21474 | 0.324629 | 0.035262 | 0.073361 | Seasonal effects |
| X - 21661 + X - 11847 | 0.04478 | 0.010795 | 0.230265 | Diet |
| X - 21736 | 0.392913 | 0.128818 | 0.199036 | Diet |
| X - 21752 | 0.361439 | 0.161664 | 0.285614 | Diet |
| X - 21821 + X - 17351 | 0.697643 | 0.190367 | 0.082505 | Diet |
| X - 21829 | 0.429735 | 0.09914 | 0.131561 | Diet |
| X - 21839 | 0.869517 | 0.046487 | 0.006976 | Time of day |
| X - 21845 | 0.751507 | 0.077756 | 0.025711 | Time of day |
| X - 22162 | 0.637822 | 0.143328 | 0.081386 | Time of day |
| X - 22520 | 0.677537 | 0.097295 | 0.046306 | Time of day |
| X - 22834 | 0.784112 | 0.057478 | 0.015825 | Seasonal effects |
| X - 23314 | 0.343232 | 0.050182 | 0.096022 | Diet |
| X - 23583 | 0.374073 | 0.018852 | 0.031545 | Time of day |
| X - 23585 | 0.412576 | 0.018921 | 0.02694 | Seasonal effects |
| X - 23587 | 0.492778 | 0.073376 | 0.075527 | Diet |
| X - 23639 | 0.374358 | 0.159606 | 0.26674 | Diet |
| X - 23649 | 0.378597 | 0.175167 | 0.287507 | Diet |
| X - 23652 | 0.245643 | 0.132477 | 0.40683 | Diet |
| X - 23654 | 0.211333 | 0.041121 | 0.153456 | Anthropometrics |
| X - 23659 | 0.390389 | 0.071798 | 0.112116 | Diet |
| X - 23680 | 0.225153 | 0.023519 | 0.08094 | Diet |
| X - 23782 | 0.306691 | 0.045979 | 0.10394 | Diet |
| X - 23974 | 0.293538 | 0.025475 | 0.061312 | Diet |
| X - 23997 | 0.939331 | 0.218763 | 0.014129 | LifeStyle |
| X - 24243 | 0.638978 | 0.144722 | 0.081768 | Diet |
| X - 24328 | 0.077111 | 0.0184 | 0.220214 | Sex |
| X - 24337 | 0.232288 | 0.03201 | 0.105794 | Diet |
| X - 24352 | 0.288702 | 0.028808 | 0.070977 | Diet |
| X - 24410 | 0.775694 | 0.192359 | 0.055624 | Diet |
| X - 24435 | 0.354507 | 0.019877 | 0.036192 | Time of day |
| X - 24455 | 0.301566 | 0.013947 | 0.032302 | Time of day |
| X - 24473 | 0.359349 | 0.078371 | 0.139721 | Diet |
| X - 24475 | 0.226309 | 0.064789 | 0.221498 | Diet |
| X - 24512 | 0.120053 | 0.013585 | 0.099577 | Sex |
| X - 24544 | 0.270667 | 0.052693 | 0.141986 | Age |
| X - 24556 | 0.434236 | 0.049206 | 0.06411 | Diet |
| X - 24693 | 0.383104 | 0.064027 | 0.103099 | Diet |
| X - 24736 | 0.408414 | 0.06513 | 0.09434 | Diet |
| X - 24748 | 0.198616 | 0.015027 | 0.060632 | Diet |
| X - 24760 + 3- | 0.280665 | 0.044235 | 0.113372 | Diet |
| hydroxyhippurate sulfate | | | | |
| X - 24801 | 0.145752 | 0.037726 | 0.221109 | Anthropometrics |
| X - 24811 | 0.387112 | 0.286808 | 0.454083 | Diet |
| X - 24947 | 0.459853 | 0.039444 | 0.046332 | Sex |
| X - 24948 | 0.258436 | 0.079687 | 0.228657 | Sex |
| X - 24949 | 0.162358 | 0.059267 | 0.30577 | Diet |
| X - 24951 | 0.323964 | 0.087978 | 0.18359 | Diet |
| X - 24972 | 0.401434 | 0.055144 | 0.082224 | Age |

[0423] Identification and Candidate Structures of Microbiome-Related Unknown Compounds

[0424] Metabolites that are accurately predicted by the gut microbiome are of particular interest as they may be modulated by perturbing the bacterial community. Since many of the metabolites that were predicted by the gut microbiome with high accuracy are unknown, we sought their identification. Here we provide the chemical identification of 11 compounds and candidate structures for 19 other compounds previously tagged as unknown (Table 9). Among these metabolites are some of those that are predicted by the microbiome with the highest accuracy, including X-11850, X-12261 and X-11843. These were all predicted with R²>0.45 using the microbiome, and are likely to be derivatives of aromatic amino acids, a class of molecules known to be metabolized by the gut microbiome. This list constitutes a major step towards mapping the metabolic producing and modulating potential of the human gut microbiome.

TABLE 9

| Metabolite | | Microbiome |
|---|---|---|
| name | Identified molecule | R² |
| X - 12837 | glucuronide of C19H28O4 (2)* | 0.28 |
| X - 12230 | 4-ethylcatechol sulfate | 0.23 |
| X - 23649 | 3-hydroxypyridine glucuronide | 0.21 |
| X - 12329 | 3-hydroxy-2-methylpyridine sulfate | 0.17 |
| X - 17145 | branched chain 14:0 dicarboxylic acid** | 0.16 |
| X - 14662 | glycoursodeoxycholate sulfate (1) | 0.14 |
| X - 17469 | lithocholic acid sulfate (1) | 0.12 |
| X - 16654 | deoxycholic acid (12 or 24)-sulfate* | 0.12 |
| X - 18249 | 3,5-dichloro-2,6-dihydroxybenzoic acid | 0.09 |
| X - 11640 | enterolactone sulfate | 0.07 |
| X - 18914 | 3-bromo-5-chloro-2,6-dihydroxybenzoic acid* | 0.04 |

| Metabolite | | Microbiome |
|---|---|---|
| name | Candidate structure | R² |
| X - 11850 | aromatic amino acid related metabolite | 0.52 |
| X - 12261 | aromatic amino acid related metabolite | 0.47 |
| X - 11843 | aromatic amino acid related metabolite | 0.46 |
| X - 23655 | pyridine related | 0.31 |
| X - 12126 | aromatic amino acid related metabolite | 0.27 |
| X - 12216 | aromatic amino acid related metabolite | 0.25 |
| X - 24410 | piperidine related | 0.19 |
| X - 17185 | phenol-related | 0.19 |
| X - 12718 | aromatic amino acid related metabolite | 0.17 |
| X - 17354 | polyphenol related | 0.16 |
| X - 21286 | pyridine related | 0.14 |
| X - 12283 | aromatic amino acid related metabolite | 0.14 |
| X - 12738 | phenol-related | 0.14 |
| X - 24243 | piperidine related | 0.13 |
| X - 22520 | fatty acid conjugate | 0.13 |
| X - 11315 | amino acid derivative | 0.12 |
| X - 22509 | polyphenol related | 0.12 |
| X - 13844 | benzoic acid derivative | 0.1 |
| X - 13835 | aromatic amino acid related metabolite | 0.08 |

[0425] In Table 9, names of unknown compounds as provided by Metabolon Inc along with their new identification and candidate structures are provided. Microbiome R2 is the EV of each metabolite as estimated by a prediction model based on gut microbiome data

[0426] Networks of Interactions Between Features Explain Diverse Metabolites

[0427] As multiple metabolites were significantly predicted using more than one feature group, we next examined how different feature groups interact in explaining the levels of these metabolites. By building separate predictive models each based on a different feature group and using SHAP in order to estimate the impact of each specific feature on the output of the models, we uncovered a dense network of interactions between feature groups in explaining metabolite levels (FIG. 5A).

[0428] As mentioned above, we found that the reported consumption of coffee was linked to a large number of metabolites, most of which are unknown compounds and xenobiotics from the xanthine metabolism pathway. Notably, we found that a specific bacterial species from the Clostridiales order was linked to a large number of these metabolites (FIG. 5B), suggesting a possible interaction between coffee consumption and the presence of this bacteria in explaining the levels of these metabolites. Being the most predictive features among their feature categories, coffee consumption and this Clostridiales species may be targets for validation using interventional studies.

[0429] We next focused on metabolites which were significantly explained using seasonal effects, and examined which dietary features interact with them (FIG. 5C). The consumption of citrus fruits such as oranges positively affected (on average) the prediction of several metabolites such as stachydrine, a known biomarker for the consumption of citrus fruits⁴⁵ (also named proline betaine; significantly predicted by diet, Pearson R=0.50, p<10⁻²⁰), which in turn had higher values in samples taken in winter months compared to samples taken during the summer, consistent with the fact that oranges are seasonal fruits available in Israel mostly during winter. Another example is N-methyltaurine (R=0.35, p<10⁻²⁰), an amino acid which has higher levels in samples taken during winter, and whose prediction was negatively affected, on average, by the consumption of watermelon, a summer seasonal fruit.

[0430] Finally, we explored some known examples of associations between metabolites and features to further validate the quality of data in our cohort (FIG. 5D). The diurnal cycle is known to regulate the levels of multiple circulating metabolites. We found that the levels of cortisol were lower in samples taken during the second half of the day (Prediction with time of day, R=0.63, p<10⁻²⁰, positive SHAP value for samples taken in the morning), consistent with previous studies showing that cortisol levels peak early in the morning⁴⁶. We also found that the levels of tobacco-related metabolites such as cotinine (Prediction R=0.72 by lifestyle, p<10⁻²⁰) were higher in samples of active smokers (positive SHAP values for smoking), and that no other feature could significantly explain their levels. Finally, we found that blood levels of serotonin (Prediction R=0.46 by drugs, p<10⁻⁶) were lower in samples of participants who reported taking psychiatric drugs (negative SHAP values), despite serotonin being a therapeutic target for selective serotonin reuptake inhibitors (SSRI)⁴⁷ which are prescribed to increase serotonin levels in the brain.

[0431] Metabolites Explained by Bread Increase Following a Bread Consumption Intervention

[0432] As a proof of concept examining whether some of the feature-metabolite interactions we uncovered may be causal, we profiled the serum metabolome of samples from a randomized cross-over trial that we previously conducted⁴⁸, in which we compared the effects of consuming artisanal whole-grain sourdough bread (hereinafter, “sourdough bread”) to those of industrial white bread made from refined wheat (“white bread”). Twenty healthy subjects were randomly divided into two groups of 10, who then underwent a 1-week-long dietary intervention of increased bread consumption, where each group received a different type of bread. Following two weeks of washout, the intervention was performed again, switching bread types between the groups. (FIG. 6C). In the present study, we performed metabolomic profiling of blood samples that were taken at both the beginning and the end of the first week of intervention, in order to estimate the effect of the dietary intervention on serum metabolites.

[0433] We used the healthy cohort of 458 participants for which we had one week of logged normal diet, without any intervention (FIG. 6A) to identify potential associations between the reported consumption of white and whole-wheat breads and the levels of metabolites (FIG. 6B). We ranked the metabolites according to the mean absolute SHAP value for consumption of whole-wheat bread computed based on the 458 participants, and selected the top 5% positively and negatively associated metabolites for further analysis (FIG. 6B). Notably, analyzing the metabolomic samples of subjects who received the sourdough bread intervention, we found that metabolites that were positively associated with the consumption of whole-wheat bread in our cohort increased significantly more (median fold-change 1.44) than metabolites that were negatively associated with the consumption of whole-wheat bread in the 458-participants cohort (median fold-change 0.66, p<10⁻⁸, Mann-Whitney U; FIG. 6D). Moreover, we found no statistically significant differences when comparing the mean fold-change of these metabolites in the group which received the white bread intervention (p>0.3, Mann-Whitney U; FIG. 6D).

[0434] Some of the metabolites which increased in levels following the sourdough bread intervention were previously reported to be linked to the consumption of whole-grain wheat flour. A notable example is betaine, an amino acid which has been shown to protect internal organs, improve vascular risk factors⁴⁹ and is also known to be highly abundant in a wide variety of foods, of which wheat bran and wheat germ are the highest naturally occurring sources^{50,51}. We found that in the group that received sourdough bread the mean fold-change in betaine levels was 6.16, while the mean fold-change in the group that received white bread was 0.82 (Mann-Whitney U p<0.004; FIG. 6E; Methods), consistent with the correlation between betaine levels and the consumption of whole-grain wheat in the larger cohort (Spearman R=0.14, p<0.003). Another example is cytosine, for which the mean fold-change was far greater in the sourdough bread compared to the white bread group, 78.5 vs. 0.53, respectively (Mann-Whitney U p<0.002; FIG. 6F). Unlike betaine, the levels of cytosine were not previously linked to the rate or type of bread consumption.

[0435] We also performed a similar analysis using metabolites that were associated with white bread consumption in our cohort, but did not find significant changes in these metabolites in the bread intervention study, potentially stemming from high white wheat consumption in the typical diet before the intervention. Overall, these results suggest that some of the associations that we found between the consumption of whole-wheat bread and the levels of metabolites in our larger cohort might be causal, as their levels increase following a dietary intervention that increased the consumption of whole-wheat bread.

### Sequence Identifiers for Metagenomic Sequences of Unknown Bacteria

[0436] Table 10 provides the sequence identifier for the metagenomic sequences of the unknown bacteria.

TABLE 10

| Seq ID | unknown bacteria number |
|---|---|
| 1 | 14921 |
| 2 | 13981 |
| 3 | 14252 |
| 4 | 4781 |
| 5 | 14999 |
| 6 | 14764 |
| 7 | 15385 |
| 8 | 4121 |
| 9 | 4121 |
| 10 | 14027 |
| 11 | 4121 |
| 12 | 4342 |
| 13 | 15403 |
| 14 | 13983 |
| 15 | 4029 |
| 16 | 4342 |
| 17 | 14999 |
| 18 | 4130 |
| 19 | 14250 |
| 20 | 4781 |
| 21 | 15390 |
| 22 | 14263 |
| 23 | 14250 |
| 24 | 15403 |
| 25 | 14999 |
| 26 | 14974 |
| 27 | 4029 |
| 28 | 4029 |
| 29 | 14921 |
| 30 | 14932 |
| 31 | 15403 |
| 32 | 4781 |
| 33 | 15403 |
| 34 | 13981 |
| 35 | 4342 |
| 36 | 15385 |
| 37 | 14263 |
| 38 | 8767 |
| 39 | 14263 |
| 40 | 14899 |
| 41 | 14921 |
| 42 | 3926 |
| 43 | 4121 |
| 44 | 14999 |
| 45 | 14999 |
| 46 | 14020 |
| 47 | 14252 |
| 48 | 14027 |
| 49 | 15403 |
| 50 | 14252 |
| 51 | 3964 |
| 52 | 14932 |
| 53 | 4395 |
| 54 | 14974 |
| 55 | 4130 |
| 56 | 14253 |
| 57 | 15403 |
| 58 | 15390 |
| 59 | 14999 |
| 60 | 14937 |
| 61 | 14252 |
| 62 | 14999 |
| 63 | 4342 |
| 64 | 4767 |
| 65 | 13982 |
| 66 | 4130 |
| 67 | 15350 |
| 68 | 14921 |
| 69 | 3574 |
| 70 | 3964 |
| 71 | 15395 |
| 72 | 14027 |
| 73 | 15403 |
| 74 | 4121 |
| 75 | 4121 |
| 76 | 14899 |
| 77 | 4394 |
| 78 | 4029 |
| 79 | 4781 |
| 80 | 4781 |
| 81 | 13983 |
| 82 | 14253 |
| 83 | 14921 |
| 84 | 8767 |
| 85 | 4781 |
| 86 | 14252 |
| 87 | 14252 |
| 88 | 15403 |
| 89 | 4029 |
| 90 | 4121 |
| 91 | 4029 |
| 92 | 15356 |
| 93 | 14999 |
| 94 | 4121 |
| 95 | 15390 |
| 96 | 15395 |
| 97 | 4781 |
| 98 | 8767 |
| 99 | 15403 |
| 100 | 4029 |
| 101 | 15403 |
| 102 | 15356 |
| 103 | 4029 |
| 104 | 15350 |
| 105 | 4781 |
| 106 | 14252 |
| 107 | 14764 |
| 108 | 4130 |
| 109 | 15403 |
| 110 | 15385 |
| 111 | 4130 |
| 112 | 14921 |
| 113 | 3574 |
| 114 | 14253 |
| 115 | 15403 |
| 116 | 4782 |
| 117 | 3926 |
| 118 | 4394 |
| 119 | 14937 |
| 120 | 14764 |
| 121 | 14252 |
| 122 | 15356 |
| 123 | 4029 |
| 124 | 14764 |
| 125 | 3952 |
| 126 | 15356 |
| 127 | 4342 |
| 128 | 4342 |
| 129 | 15403 |
| 130 | 14937 |
| 131 | 4029 |
| 132 | 15403 |
| 133 | 14861 |
| 134 | 8767 |
| 135 | 15350 |
| 136 | 3574 |
| 137 | 4130 |
| 138 | 13981 |
| 139 | 14999 |
| 140 | 14252 |
| 141 | 3940 |
| 142 | 3952 |
| 143 | 3926 |
| 144 | 15403 |
| 145 | 14252 |
| 146 | 14252 |
| 147 | 14252 |
| 148 | 14999 |
| 149 | 4767 |
| 150 | 4781 |
| 151 | 15403 |
| 152 | 14999 |
| 153 | 14250 |
| 154 | 14252 |
| 155 | 14252 |
| 156 | 14027 |
| 157 | 4130 |
| 158 | 4029 |
| 159 | 14999 |
| 160 | 14899 |
| 161 | 13981 |
| 162 | 4395 |
| 163 | 8767 |
| 164 | 14764 |
| 165 | 14252 |
| 166 | 3574 |
| 167 | 4029 |
| 168 | 14252 |
| 169 | 15350 |
| 170 | 14253 |
| 171 | 4767 |
| 172 | 4767 |
| 173 | 4130 |
| 174 | 14932 |
| 175 | 14764 |
| 176 | 14999 |
| 177 | 14253 |
| 178 | 4342 |
| 179 | 4342 |
| 180 | 3574 |
| 181 | 14999 |
| 182 | 14999 |
| 183 | 15403 |
| 184 | 13981 |
| 185 | 14921 |
| 186 | 4767 |
| 187 | 14921 |
| 188 | 4342 |
| 189 | 14921 |
| 190 | 14899 |
| 191 | 3926 |
| 192 | 4121 |
| 193 | 14252 |
| 194 | 14250 |
| 195 | 4394 |
| 196 | 4121 |
| 197 | 14999 |
| 198 | 4029 |
| 199 | 15390 |
| 200 | 15356 |
| 201 | 14974 |
| 202 | 14999 |
| 203 | 4121 |
| 204 | 14999 |
| 205 | 15403 |
| 206 | 15395 |
| 207 | 15385 |
| 208 | 4781 |
| 209 | 14899 |
| 210 | 14974 |
| 211 | 14252 |
| 212 | 4394 |
| 213 | 4781 |
| 214 | 4029 |
| 215 | 14999 |
| 216 | 14921 |
| 217 | 4394 |
| 218 | 4342 |
| 219 | 14252 |
| 220 | 14252 |
| 221 | 4121 |
| 222 | 3574 |
| 223 | 14253 |
| 224 | 3952 |
| 225 | 4394 |
| 226 | 4342 |
| 227 | 8767 |
| 228 | 15350 |
| 229 | 14027 |
| 230 | 3952 |
| 231 | 14252 |
| 232 | 3964 |
| 233 | 4121 |
| 234 | 14999 |
| 235 | 15356 |
| 236 | 4781 |
| 237 | 14937 |
| 238 | 4130 |
| 239 | 14999 |
| 240 | 14252 |
| 241 | 4342 |
| 242 | 14899 |
| 243 | 14974 |
| 244 | 14252 |
| 245 | 14932 |
| 246 | 14899 |
| 247 | 14253 |
| 248 | 14921 |
| 249 | 13981 |
| 250 | 15385 |
| 251 | 4342 |
| 252 | 14999 |
| 253 | 14250 |
| 254 | 14999 |
| 255 | 14764 |
| 256 | 15350 |
| 257 | 4782 |
| 258 | 14861 |
| 259 | 14253 |
| 260 | 3952 |
| 261 | 4394 |
| 262 | 4781 |
| 263 | 14252 |
| 264 | 14932 |
| 265 | 14252 |
| 266 | 4029 |
| 267 | 14764 |
| 268 | 3964 |
| 269 | 15395 |
| 270 | 15385 |
| 271 | 15403 |
| 272 | 4029 |
| 273 | 4029 |
| 274 | 4029 |
| 275 | 14899 |
| 276 | 14252 |
| 277 | 15403 |
| 278 | 14921 |
| 279 | 14250 |
| 280 | 3574 |
| 281 | 13982 |
| 282 | 14027 |
| 283 | 14974 |
| 284 | 3952 |
| 285 | 14999 |
| 286 | 15356 |
| 287 | 4342 |
| 288 | 4029 |
| 289 | 14252 |
| 290 | 14937 |
| 291 | 4781 |
| 292 | 15350 |
| 293 | 14999 |
| 294 | 14263 |
| 295 | 14899 |
| 296 | 14999 |
| 297 | 14999 |
| 298 | 14027 |
| 299 | 14921 |
| 300 | 14252 |
| 301 | 3926 |
| 302 | 14999 |
| 303 | 4342 |
| 304 | 14764 |
| 305 | 4029 |
| 306 | 14253 |
| 307 | 3940 |
| 308 | 15356 |
| 309 | 14764 |
| 310 | 13981 |
| 311 | 14899 |
| 312 | 14899 |
| 313 | 15395 |
| 314 | 4342 |
| 315 | 14764 |
| 316 | 15403 |
| 317 | 4029 |
| 318 | 3964 |
| 319 | 14921 |
| 320 | 4781 |
| 321 | 14764 |
| 322 | 4029 |
| 323 | 3940 |
| 324 | 14252 |
| 325 | 14253 |
| 326 | 4342 |
| 327 | 14999 |
| 328 | 15356 |
| 329 | 14999 |
| 330 | 4342 |
| 331 | 15403 |
| 332 | 3574 |
| 333 | 14999 |
| 334 | 4342 |
| 335 | 14999 |
| 336 | 14252 |
| 337 | 3952 |
| 338 | 14921 |
| 339 | 14932 |
| 340 | 15403 |
| 341 | 15350 |
| 342 | 4342 |
| 343 | 3952 |
| 344 | 14252 |
| 345 | 4029 |
| 346 | 14252 |
| 347 | 14252 |
| 348 | 14974 |
| 349 | 4029 |
| 350 | 14999 |
| 351 | 14253 |
| 352 | 13981 |
| 353 | 3952 |
| 354 | 14921 |
| 355 | 14764 |
| 356 | 15403 |
| 357 | 14252 |
| 358 | 14974 |
| 359 | 15390 |
| 360 | 15390 |
| 361 | 3574 |
| 362 | 4394 |
| 363 | 14899 |
| 364 | 14252 |
| 365 | 14764 |
| 366 | 14764 |
| 367 | 3940 |
| 368 | 14999 |
| 369 | 13981 |
| 370 | 4781 |
| 371 | 4029 |
| 372 | 14027 |
| 373 | 13981 |
| 374 | 14932 |
| 375 | 14899 |
| 376 | 13981 |
| 377 | 14252 |
| 378 | 15403 |
| 379 | 15395 |
| 380 | 15350 |
| 381 | 4342 |
| 382 | 14899 |
| 383 | 4395 |
| 384 | 4029 |
| 385 | 13981 |
| 386 | 14263 |
| 387 | 14253 |
| 388 | 3574 |
| 389 | 13981 |
| 390 | 14252 |
| 391 | 14999 |
| 392 | 14921 |
| 393 | 15403 |
| 394 | 4342 |
| 395 | 4342 |
| 396 | 4029 |
| 397 | 14252 |
| 398 | 4342 |
| 399 | 3574 |
| 400 | 4121 |
| 401 | 14999 |
| 402 | 14764 |
| 403 | 4029 |
| 404 | 14252 |
| 405 | 4782 |
| 406 | 14764 |
| 407 | 3952 |
| 408 | 14861 |
| 409 | 14899 |
| 410 | 13982 |
| 411 | 14999 |
| 412 | 14999 |
| 413 | 4781 |
| 414 | 15385 |
| 415 | 14999 |
| 416 | 4782 |
| 417 | 13981 |
| 418 | 14937 |
| 419 | 3940 |
| 420 | 4029 |
| 421 | 15350 |
| 422 | 4342 |
| 423 | 4121 |
| 424 | 4767 |
| 425 | 3940 |
| 426 | 14921 |
| 427 | 3964 |
| 428 | 3964 |
| 429 | 13981 |
| 430 | 15350 |
| 431 | 14252 |
| 432 | 4767 |
| 433 | 15350 |
| 434 | 14764 |
| 435 | 4121 |
| 436 | 14252 |
| 437 | 4781 |
| 438 | 14253 |
| 439 | 4394 |
| 440 | 14899 |
| 441 | 14999 |
| 442 | 14999 |
| 443 | 14921 |
| 444 | 4781 |
| 445 | 14999 |
| 446 | 5184 |
| 447 | 4342 |
| 448 | 14027 |
| 449 | 14999 |
| 450 | 13981 |
| 451 | 14764 |
| 452 | 14932 |
| 453 | 14764 |
| 454 | 13981 |
| 455 | 3574 |
| 456 | 3964 |
| 457 | 13982 |
| 458 | 3574 |
| 459 | 4781 |
| 460 | 4781 |
| 461 | 4782 |
| 462 | 14252 |
| 463 | 3952 |
| 464 | 15403 |
| 465 | 15390 |
| 466 | 14252 |
| 467 | 14250 |
| 468 | 14764 |
| 469 | 14999 |
| 470 | 4342 |
| 471 | 3952 |
| 472 | 13981 |
| 473 | 14999 |
| 474 | 14027 |
| 475 | 14999 |
| 476 | 3964 |
| 477 | 3574 |
| 478 | 14250 |
| 479 | 3574 |
| 480 | 4121 |
| 481 | 8767 |
| 482 | 14999 |
| 483 | 15350 |
| 484 | 14899 |
| 485 | 4782 |
| 486 | 15390 |
| 487 | 3952 |
| 488 | 14974 |
| 489 | 14764 |
| 490 | 4394 |
| 491 | 13981 |
| 492 | 14974 |
| 493 | 4342 |
| 494 | 4781 |
| 495 | 15403 |
| 496 | 15385 |
| 497 | 14932 |
| 498 | 14764 |
| 499 | 14253 |
| 500 | 4130 |
| 501 | 3952 |
| 502 | 14252 |
| 503 | 14253 |
| 504 | 4029 |
| 505 | 3940 |
| 506 | 14999 |
| 507 | 14899 |
| 508 | 14253 |
| 509 | 3574 |
| 510 | 14252 |
| 511 | 14252 |
| 512 | 14999 |
| 513 | 4029 |
| 514 | 14999 |
| 515 | 4767 |
| 516 | 14252 |
| 517 | 4342 |
| 518 | 4029 |
| 519 | 13981 |
| 520 | 14252 |
| 521 | 13983 |
| 522 | 14999 |
| 523 | 3964 |
| 524 | 15403 |
| 525 | 4342 |
| 526 | 14252 |
| 527 | 14252 |
| 528 | 3574 |
| 529 | 15390 |
| 530 | 14764 |
| 531 | 14764 |
| 532 | 14253 |
| 533 | 14999 |
| 534 | 15403 |
| 535 | 4395 |
| 536 | 14253 |
| 537 | 14020 |
| 538 | 4342 |
| 539 | 14899 |
| 540 | 14252 |
| 541 | 3940 |
| 542 | 14921 |
| 543 | 14250 |
| 544 | 15395 |
| 545 | 15385 |
| 546 | 14999 |
| 547 | 14999 |
| 548 | 4029 |
| 549 | 14937 |
| 550 | 14764 |
| 551 | 4130 |
| 552 | 3926 |
| 553 | 14764 |
| 554 | 14250 |
| 555 | 4782 |
| 556 | 14252 |
| 557 | 15385 |
| 558 | 14250 |
| 559 | 14974 |
| 560 | 15385 |
| 561 | 14974 |
| 562 | 4130 |
| 563 | 14253 |
| 564 | 14899 |
| 565 | 4767 |
| 566 | 14899 |
| 567 | 4121 |
| 568 | 14921 |
| 569 | 14252 |
| 570 | 3964 |
| 571 | 14252 |
| 572 | 4767 |
| 573 | 4121 |
| 574 | 14921 |
| 575 | 14764 |
| 576 | 13981 |
| 577 | 14999 |
| 578 | 14921 |
| 579 | 4782 |
| 580 | 14764 |
| 581 | 15395 |
| 582 | 14921 |
| 583 | 15403 |
| 584 | 14252 |
| 585 | 4781 |
| 586 | 14921 |
| 587 | 14764 |
| 588 | 14999 |
| 589 | 14921 |
| 590 | 13983 |
| 591 | 14921 |
| 592 | 15350 |
| 593 | 14932 |
| 594 | 14764 |
| 595 | 15385 |
| 596 | 3574 |
| 597 | 4781 |
| 598 | 4767 |
| 599 | 14899 |
| 600 | 3964 |
| 601 | 4342 |
| 602 | 13981 |
| 603 | 14921 |
| 604 | 13982 |
| 605 | 14999 |
| 606 | 14974 |
| 607 | 14932 |
| 608 | 4029 |
| 609 | 15385 |
| 610 | 15350 |
| 611 | 4767 |
| 612 | 4130 |
| 613 | 14263 |
| 614 | 14252 |
| 615 | 4782 |
| 616 | 4781 |
| 617 | 14252 |
| 618 | 4767 |
| 619 | 14252 |
| 620 | 4029 |
| 621 | 14921 |
| 622 | 13982 |
| 623 | 3926 |
| 624 | 14999 |
| 625 | 14999 |
| 626 | 15403 |
| 627 | 4782 |
| 628 | 3952 |
| 629 | 4121 |
| 630 | 14252 |
| 631 | 14764 |
| 632 | 14937 |
| 633 | 3574 |
| 634 | 4394 |
| 635 | 15403 |
| 636 | 4342 |
| 637 | 4767 |
| 638 | 3574 |
| 639 | 14250 |
| 640 | 14764 |
| 641 | 3574 |
| 642 | 15395 |
| 643 | 15356 |
| 644 | 14764 |
| 645 | 13981 |
| 646 | 4121 |
| 647 | 4394 |
| 648 | 14861 |
| 649 | 4130 |
| 650 | 14921 |
| 651 | 4029 |
| 652 | 14252 |
| 653 | 14020 |
| 654 | 14250 |
| 655 | 3574 |
| 656 | 15356 |
| 657 | 14921 |
| 658 | 15356 |
| 659 | 14999 |
| 660 | 14937 |
| 661 | 3574 |
| 662 | 3574 |
| 663 | 4029 |
| 664 | 4342 |
| 665 | 4781 |
| 666 | 3574 |
| 667 | 15403 |
| 668 | 14999 |
| 669 | 14764 |
| 670 | 4782 |
| 671 | 3574 |
| 672 | 4130 |
| 673 | 14899 |
| 674 | 4342 |
| 675 | 4781 |
| 676 | 14253 |
| 677 | 15385 |
| 678 | 4781 |
| 679 | 4029 |
| 680 | 14921 |
| 681 | 14253 |
| 682 | 13981 |
| 683 | 14252 |
| 684 | 14899 |
| 685 | 14974 |
| 686 | 14252 |
| 687 | 14899 |
| 688 | 3574 |
| 689 | 14252 |
| 690 | 4394 |
| 691 | 14921 |
| 692 | 8767 |
| 693 | 14263 |
| 694 | 15395 |
| 695 | 3964 |
| 696 | 14027 |
| 697 | 3940 |
| 698 | 15403 |
| 699 | 3940 |
| 700 | 14921 |
| 701 | 3964 |
| 702 | 14899 |
| 703 | 14764 |
| 704 | 15403 |
| 705 | 14999 |
| 706 | 3964 |
| 707 | 4781 |
| 708 | 14253 |
| 709 | 14999 |
| 710 | 4342 |
| 711 | 15350 |
| 712 | 4342 |
| 713 | 5184 |
| 714 | 4121 |
| 715 | 4342 |
| 716 | 4029 |
| 717 | 4029 |
| 718 | 14932 |
| 719 | 4767 |
| 720 | 3926 |
| 721 | 15403 |
| 722 | 15403 |
| 723 | 13981 |
| 724 | 14764 |
| 725 | 14764 |
| 726 | 4029 |
| 727 | 15403 |
| 728 | 14252 |
| 729 | 14764 |
| 730 | 3964 |
| 731 | 14921 |
| 732 | 4342 |
| 733 | 4029 |
| 734 | 15403 |
| 735 | 3940 |
| 736 | 4781 |
| 737 | 14253 |
| 738 | 15385 |
| 739 | 14999 |
| 740 | 4781 |
| 741 | 4029 |
| 742 | 4342 |
| 743 | 14027 |
| 744 | 15403 |
| 745 | 15395 |
| 746 | 14999 |
| 747 | 14899 |
| 748 | 4782 |
| 749 | 3926 |
| 750 | 15395 |
| 751 | 14999 |
| 752 | 14899 |
| 753 | 4342 |
| 754 | 4029 |
| 755 | 4342 |
| 756 | 14027 |
| 757 | 14937 |
| 758 | 3952 |
| 759 | 14899 |
| 760 | 14921 |
| 761 | 13981 |
| 762 | 14250 |
| 763 | 15390 |
| 764 | 14999 |
| 765 | 15356 |
| 766 | 3574 |
| 767 | 15350 |
| 768 | 4029 |
| 769 | 15403 |
| 770 | 3574 |
| 771 | 14764 |
| 772 | 14252 |
| 773 | 14974 |
| 774 | 14252 |
| 775 | 5184 |
| 776 | 15403 |
| 777 | 4130 |
| 778 | 3964 |
| 779 | 3574 |
| 780 | 14027 |
| 781 | 4121 |
| 782 | 3952 |
| 783 | 4029 |
| 784 | 3574 |
| 785 | 4781 |
| 786 | 14253 |
| 787 | 14999 |
| 788 | 4767 |
| 789 | 14252 |
| 790 | 14921 |
| 791 | 4395 |
| 792 | 15356 |
| 793 | 13983 |
| 794 | 14999 |
| 795 | 15403 |
| 796 | 4782 |
| 797 | 3964 |
| 798 | 3574 |
| 799 | 14252 |
| 800 | 14861 |
| 801 | 3964 |
| 802 | 15403 |
| 803 | 14999 |
| 804 | 15403 |
| 805 | 13981 |
| 806 | 4029 |
| 807 | 14020 |
| 808 | 14027 |
| 809 | 14764 |
| 810 | 14252 |
| 811 | 3574 |
| 812 | 4781 |
| 813 | 14764 |
| 814 | 3926 |
| 815 | 14999 |
| 816 | 3574 |
| 817 | 14250 |
| 818 | 13981 |
| 819 | 4342 |
| 820 | 3574 |
| 821 | 14974 |
| 822 | 14252 |
| 823 | 4342 |
| 824 | 15350 |
| 825 | 3574 |
| 826 | 15350 |
| 827 | 14999 |
| 828 | 14764 |
| 829 | 3574 |
| 830 | 14764 |
| 831 | 15350 |
| 832 | 4029 |
| 833 | 3940 |
| 834 | 3952 |
| 835 | 14250 |
| 836 | 14921 |
| 837 | 14999 |
| 838 | 4767 |
| 839 | 4781 |
| 840 | 4342 |
| 841 | 4029 |
| 842 | 15395 |
| 843 | 15403 |
| 844 | 13981 |
| 845 | 4342 |
| 846 | 3952 |
| 847 | 13982 |
| 848 | 14932 |
| 849 | 14974 |
| 850 | 15403 |
| 851 | 15356 |
| 852 | 3574 |
| 853 | 3940 |
| 854 | 14250 |
| 855 | 14899 |
| 856 | 14999 |
| 857 | 14861 |
| 858 | 14937 |
| 859 | 14250 |
| 860 | 14974 |
| 861 | 14999 |
| 862 | 14027 |
| 863 | 15385 |
| 864 | 14764 |
| 865 | 4130 |
| 866 | 13981 |
| 867 | 15395 |
| 868 | 4767 |
| 869 | 13981 |
| 870 | 3926 |
| 871 | 15350 |
| 872 | 15385 |
| 873 | 4781 |
| 874 | 4394 |
| 875 | 4029 |
| 876 | 14027 |
| 877 | 4781 |
| 878 | 4781 |
| 879 | 14764 |
| 880 | 14253 |
| 881 | 4029 |
| 882 | 4342 |
| 883 | 5184 |
| 884 | 3574 |
| 885 | 3940 |
| 886 | 3940 |
| 887 | 14999 |
| 888 | 14921 |
| 889 | 15356 |
| 890 | 4342 |
| 891 | 15385 |
| 892 | 15390 |
| 893 | 14252 |
| 894 | 14764 |
| 895 | 14764 |
| 896 | 15356 |
| 897 | 4029 |
| 898 | 3926 |
| 899 | 15385 |
| 900 | 14921 |
| 901 | 3952 |
| 902 | 15403 |
| 903 | 14999 |
| 904 | 15403 |
| 905 | 14999 |
| 906 | 14899 |
| 907 | 4394 |
| 908 | 4395 |
| 909 | 14764 |
| 910 | 14252 |
| 911 | 14252 |
| 912 | 4782 |
| 913 | 14252 |
| 914 | 14899 |
| 915 | 15350 |
| 916 | 8767 |
| 917 | 14252 |
| 918 | 14974 |
| 919 | 14999 |
| 920 | 3574 |
| 921 | 3940 |
| 922 | 14999 |
| 923 | 14252 |
| 924 | 14252 |
| 925 | 15403 |
| 926 | 14899 |
| 927 | 14252 |
| 928 | 3940 |
| 929 | 14252 |
| 930 | 14937 |
| 931 | 14253 |
| 932 | 14764 |
| 933 | 15395 |
| 934 | 3574 |
| 935 | 4781 |
| 936 | 3574 |
| 937 | 14252 |
| 938 | 15350 |
| 939 | 15385 |
| 940 | 3964 |
| 941 | 14252 |
| 942 | 14027 |
| 943 | 14921 |
| 944 | 3940 |
| 945 | 15350 |
| 946 | 14999 |
| 947 | 4342 |
| 948 | 15403 |
| 949 | 14027 |
| 950 | 4029 |
| 951 | 14899 |
| 952 | 3574 |
| 953 | 4767 |
| 954 | 14921 |
| 955 | 14999 |
| 956 | 14250 |
| 957 | 14764 |
| 958 | 14764 |
| 959 | 14999 |
| 960 | 14999 |
| 961 | 13981 |
| 962 | 15385 |
| 963 | 4781 |
| 964 | 14764 |
| 965 | 15403 |
| 966 | 4029 |
| 967 | 14250 |
| 968 | 4781 |
| 969 | 14764 |
| 970 | 14974 |
| 971 | 14764 |
| 972 | 15350 |
| 973 | 3574 |
| 974 | 4781 |
| 975 | 4767 |
| 976 | 3574 |
| 977 | 4781 |
| 978 | 14921 |
| 979 | 4781 |
| 980 | 14999 |
| 981 | 14937 |
| 982 | 14027 |
| 983 | 4121 |
| 984 | 14252 |
| 985 | 4394 |
| 986 | 4767 |
| 987 | 15350 |
| 988 | 4767 |
| 989 | 4781 |
| 990 | 14027 |
| 991 | 4121 |
| 992 | 15403 |
| 993 | 3964 |
| 994 | 4342 |
| 995 | 14932 |
| 996 | 4767 |
| 997 | 14252 |
| 998 | 14999 |
| 999 | 4029 |
| 1000 | 14899 |
| 1001 | 4781 |
| 1002 | 4394 |
| 1003 | 4781 |
| 1004 | 14921 |
| 1005 | 4130 |
| 1006 | 4342 |
| 1007 | 4782 |
| 1008 | 14027 |
| 1009 | 8767 |
| 1010 | 14974 |
| 1011 | 14764 |
| 1012 | 4029 |
| 1013 | 15403 |
| 1014 | 3940 |
| 1015 | 4767 |
| 1016 | 3964 |
| 1017 | 4394 |
| 1018 | 4342 |
| 1019 | 3964 |
| 1020 | 15356 |
| 1021 | 14974 |
| 1022 | 14027 |
| 1023 | 14999 |
| 1024 | 14252 |
| 1025 | 4781 |
| 1026 | 4029 |
| 1027 | 4781 |
| 1028 | 3940 |
| 1029 | 14252 |
| 1030 | 4394 |
| 1031 | 14252 |
| 1032 | 14999 |
| 1033 | 14764 |
| 1034 | 4767 |
| 1035 | 14999 |
| 1036 | 15356 |
| 1037 | 3964 |
| 1038 | 14999 |
| 1039 | 4342 |
| 1040 | 15403 |
| 1041 | 15403 |
| 1042 | 14253 |
| 1043 | 14764 |
| 1044 | 14020 |
| 1045 | 14253 |
| 1046 | 15385 |
| 1047 | 4342 |
| 1048 | 14263 |
| 1049 | 15356 |
| 1050 | 14252 |
| 1051 | 14932 |
| 1052 | 4029 |
| 1053 | 13981 |
| 1054 | 3574 |
| 1055 | 4029 |
| 1056 | 4342 |
| 1057 | 14764 |
| 1058 | 4029 |
| 1059 | 14252 |
| 1060 | 4029 |
| 1061 | 14921 |
| 1062 | 4394 |
| 1063 | 3574 |
| 1064 | 3940 |
| 1065 | 14974 |
| 1066 | 15350 |
| 1067 | 4781 |
| 1068 | 15403 |
| 1069 | 15403 |
| 1070 | 8767 |
| 1071 | 14999 |
| 1072 | 14999 |
| 1073 | 14974 |
| 1074 | 4342 |
| 1075 | 15395 |
| 1076 | 3926 |
| 1077 | 14921 |
| 1078 | 4342 |
| 1079 | 14764 |
| 1080 | 14921 |
| 1081 | 4029 |
| 1082 | 4781 |
| 1083 | 4767 |
| 1084 | 14921 |
| 1085 | 3926 |
| 1086 | 14263 |
| 1087 | 14921 |
| 1088 | 14253 |
| 1089 | 4767 |
| 1090 | 14020 |
| 1091 | 4029 |
| 1092 | 4029 |
| 1093 | 5184 |
| 1094 | 14921 |
| 1095 | 3574 |
| 1096 | 14899 |
| 1097 | 14921 |
| 1098 | 15403 |
| 1099 | 14253 |
| 1100 | 14250 |
| 1101 | 4394 |
| 1102 | 4394 |
| 1103 | 3964 |
| 1104 | 4342 |
| 1105 | 8767 |
| 1106 | 15385 |
| 1107 | 4029 |
| 1108 | 14921 |
| 1109 | 13982 |
| 1110 | 3574 |
| 1111 | 14250 |
| 1112 | 14999 |
| 1113 | 15395 |
| 1114 | 4394 |
| 1115 | 15395 |
| 1116 | 4342 |
| 1117 | 4342 |
| 1118 | 4781 |
| 1119 | 14252 |
| 1120 | 14253 |
| 1121 | 4781 |
| 1122 | 3574 |
| 1123 | 14252 |
| 1124 | 3964 |
| 1125 | 4029 |
| 1126 | 15350 |
| 1127 | 14999 |
| 1128 | 4394 |
| 1129 | 14764 |
| 1130 | 14899 |
| 1131 | 14250 |
| 1132 | 4121 |
| 1133 | 4781 |
| 1134 | 3964 |
| 1135 | 3926 |
| 1136 | 15390 |
| 1137 | 3574 |
| 1138 | 14253 |
| 1139 | 14932 |
| 1140 | 14999 |
| 1141 | 14899 |
| 1142 | 14027 |
| 1143 | 4029 |
| 1144 | 14020 |
| 1145 | 14764 |
| 1146 | 14899 |
| 1147 | 3952 |
| 1148 | 14764 |
| 1149 | 14921 |
| 1150 | 14932 |
| 1151 | 4767 |
| 1152 | 4342 |
| 1153 | 14252 |
| 1154 | 3964 |
| 1155 | 15403 |
| 1156 | 13981 |
| 1157 | 13981 |
| 1158 | 3952 |
| 1159 | 15356 |
| 1160 | 4781 |
| 1161 | 14252 |
| 1162 | 14899 |
| 1163 | 14921 |
| 1164 | 14974 |
| 1165 | 14921 |
| 1166 | 14921 |
| 1167 | 4121 |
| 1168 | 3952 |
| 1169 | 14764 |
| 1170 | 15385 |
| 1171 | 14899 |
| 1172 | 5184 |
| 1173 | 3574 |
| 1174 | 14921 |
| 1175 | 4130 |
| 1176 | 3940 |
| 1177 | 14252 |
| 1178 | 14999 |
| 1179 | 14899 |
| 1180 | 14899 |
| 1181 | 14027 |
| 1182 | 14999 |
| 1183 | 14764 |
| 1184 | 15350 |
| 1185 | 4029 |
| 1186 | 4029 |
| 1187 | 14999 |
| 1188 | 14020 |
| 1189 | 14999 |
| 1190 | 15356 |
| 1191 | 14999 |
| 1192 | 14764 |
| 1193 | 3574 |
| 1194 | 13981 |
| 1195 | 3574 |
| 1196 | 4781 |
| 1197 | 4130 |
| 1198 | 14253 |
| 1199 | 4121 |
| 1200 | 4130 |
| 1201 | 14252 |
| 1202 | 15356 |
| 1203 | 3574 |
| 1204 | 14921 |
| 1205 | 15395 |
| 1206 | 15395 |
| 1207 | 8767 |
| 1208 | 4029 |
| 1209 | 14252 |
| 1210 | 4781 |
| 1211 | 3964 |
| 1212 | 14921 |
| 1213 | 15403 |
| 1214 | 4781 |
| 1215 | 14027 |
| 1216 | 4342 |
| 1217 | 15356 |
| 1218 | 14999 |
| 1219 | 3952 |
| 1220 | 4029 |
| 1221 | 4781 |
| 1222 | 4342 |
| 1223 | 14252 |
| 1224 | 14899 |
| 1225 | 3940 |
| 1226 | 3952 |
| 1227 | 14999 |
| 1228 | 14027 |
| 1229 | 4130 |
| 1230 | 3964 |
| 1231 | 14999 |
| 1232 | 14764 |
| 1233 | 3574 |
| 1234 | 4781 |
| 1235 | 14921 |
| 1236 | 14252 |
| 1237 | 14999 |
| 1238 | 15385 |
| 1239 | 4342 |
| 1240 | 14921 |
| 1241 | 4781 |
| 1242 | 14937 |
| 1243 | 14899 |
| 1244 | 8767 |
| 1245 | 4781 |
| 1246 | 3964 |
| 1247 | 3964 |
| 1248 | 3952 |
| 1249 | 15390 |
| 1250 | 4781 |
| 1251 | 4342 |
| 1252 | 4781 |
| 1253 | 14764 |
| 1254 | 4781 |
| 1255 | 14252 |
| 1256 | 15350 |
| 1257 | 4342 |
| 1258 | 14899 |
| 1259 | 4342 |
| 1260 | 15385 |
| 1261 | 14899 |
| 1262 | 15385 |
| 1263 | 14764 |
| 1264 | 14999 |
| 1265 | 3952 |
| 1266 | 14252 |
| 1267 | 14999 |
| 1268 | 14921 |
| 1269 | 15385 |
| 1270 | 4130 |
| 1271 | 4029 |
| 1272 | 14252 |
| 1273 | 14999 |
| 1274 | 15385 |
| 1275 | 4781 |
| 1276 | 14921 |
| 1277 | 4342 |
| 1278 | 4781 |
| 1279 | 14253 |
| 1280 | 14764 |
| 1281 | 14764 |
| 1282 | 4394 |
| 1283 | 15390 |
| 1284 | 14764 |
| 1285 | 15403 |
| 1286 | 5184 |
| 1287 | 4781 |
| 1288 | 4394 |
| 1289 | 14932 |
| 1290 | 14252 |
| 1291 | 4781 |
| 1292 | 14252 |
| 1293 | 4029 |
| 1294 | 15350 |
| 1295 | 4782 |
| 1296 | 4029 |
| 1297 | 15356 |
| 1298 | 4029 |
| 1299 | 15403 |
| 1300 | 14999 |
| 1301 | 4130 |
| 1302 | 3940 |
| 1303 | 14252 |
| 1304 | 14999 |
| 1305 | 4342 |
| 1306 | 3926 |
| 1307 | 14764 |
| 1308 | 4781 |
| 1309 | 3574 |
| 1310 | 4767 |
| 1311 | 14764 |
| 1312 | 15403 |
| 1313 | 4342 |
| 1314 | 15403 |
| 1315 | 3940 |
| 1316 | 15356 |
| 1317 | 14921 |
| 1318 | 4029 |
| 1319 | 14921 |
| 1320 | 4781 |
| 1321 | 14253 |
| 1322 | 14252 |
| 1323 | 4121 |
| 1324 | 14921 |
| 1325 | 4342 |
| 1326 | 5184 |
| 1327 | 15403 |
| 1328 | 4782 |
| 1329 | 14999 |
| 1330 | 13981 |
| 1331 | 4029 |
| 1332 | 14263 |
| 1333 | 15395 |
| 1334 | 4029 |
| 1335 | 4781 |
| 1336 | 8767 |
| 1337 | 4767 |
| 1338 | 4767 |
| 1339 | 15356 |
| 1340 | 15356 |
| 1341 | 4394 |
| 1342 | 14252 |
| 1343 | 14999 |
| 1344 | 14253 |
| 1345 | 4130 |
| 1346 | 14999 |
| 1347 | 14253 |
| 1348 | 3952 |
| 1349 | 4029 |
| 1350 | 15356 |
| 1351 | 4029 |
| 1352 | 14253 |
| 1353 | 4767 |
| 1354 | 4130 |
| 1355 | 14252 |
| 1356 | 4130 |
| 1357 | 15395 |
| 1358 | 3926 |
| 1359 | 15390 |
| 1360 | 14932 |
| 1361 | 15356 |
| 1362 | 4342 |
| 1363 | 13981 |
| 1364 | 4781 |
| 1365 | 14252 |
| 1366 | 15356 |
| 1367 | 4394 |
| 1368 | 4782 |
| 1369 | 4767 |
| 1370 | 4029 |
| 1371 | 15350 |
| 1372 | 15395 |
| 1373 | 4395 |
| 1374 | 4782 |
| 1375 | 4029 |
| 1376 | 4782 |
| 1377 | 14921 |
| 1378 | 13981 |
| 1379 | 3952 |
| 1380 | 4342 |
| 1381 | 4767 |
| 1382 | 14999 |
| 1383 | 14764 |
| 1384 | 13981 |
| 1385 | 3574 |
| 1386 | 14999 |
| 1387 | 4342 |
| 1388 | 14899 |
| 1389 | 3574 |
| 1390 | 4342 |
| 1391 | 4342 |
| 1392 | 14999 |
| 1393 | 15356 |
| 1394 | 4029 |
| 1395 | 3952 |
| 1396 | 14899 |
| 1397 | 4394 |
| 1398 | 3952 |
| 1399 | 4029 |
| 1400 | 13982 |
| 1401 | 14921 |
| 1402 | 14999 |
| 1403 | 4029 |
| 1404 | 14999 |
| 1405 | 4342 |
| 1406 | 14253 |
| 1407 | 4781 |
| 1408 | 5184 |
| 1409 | 4782 |
| 1410 | 4394 |
| 1411 | 14020 |
| 1412 | 4029 |
| 1413 | 14899 |
| 1414 | 14027 |
| 1415 | 3940 |
| 1416 | 8767 |
| 1417 | 3940 |
| 1418 | 14263 |
| 1419 | 4029 |
| 1420 | 3574 |
| 1421 | 14252 |
| 1422 | 15395 |
| 1423 | 4029 |
| 1424 | 4342 |
| 1425 | 4029 |
| 1426 | 4394 |
| 1427 | 14999 |
| 1428 | 15395 |
| 1429 | 13982 |
| 1430 | 4029 |
| 1431 | 4767 |
| 1432 | 14263 |
| 1433 | 14252 |
| 1434 | 4781 |
| 1435 | 3952 |
| 1436 | 15395 |
| 1437 | 4342 |
| 1438 | 14764 |
| 1439 | 14253 |
| 1440 | 4781 |
| 1441 | 3574 |
| 1442 | 4342 |
| 1443 | 3926 |
| 1444 | 14921 |
| 1445 | 14764 |
| 1446 | 14861 |
| 1447 | 14999 |
| 1448 | 14253 |
| 1449 | 4781 |
| 1450 | 14974 |
| 1451 | 15403 |
| 1452 | 4394 |
| 1453 | 4767 |
| 1454 | 15403 |
| 1455 | 4342 |
| 1456 | 3964 |
| 1457 | 14764 |
| 1458 | 15350 |
| 1459 | 14999 |
| 1460 | 15395 |
| 1461 | 14921 |
| 1462 | 3574 |
| 1463 | 4029 |
| 1464 | 14974 |
| 1465 | 4782 |
| 1466 | 4342 |
| 1467 | 14252 |
| 1468 | 3574 |
| 1469 | 14974 |
| 1470 | 14252 |
| 1471 | 14764 |
| 1472 | 4394 |
| 1473 | 4781 |
| 1474 | 4781 |
| 1475 | 4029 |
| 1476 | 14899 |
| 1477 | 14764 |
| 1478 | 14252 |
| 1479 | 14027 |
| 1480 | 14861 |
| 1481 | 4767 |
| 1482 | 15350 |
| 1483 | 15403 |
| 1484 | 14999 |
| 1485 | 14252 |
| 1486 | 3940 |
| 1487 | 14921 |
| 1488 | 4130 |
| 1489 | 14999 |
| 1490 | 4342 |
| 1491 | 14974 |
| 1492 | 4342 |
| 1493 | 4394 |
| 1494 | 14999 |
| 1495 | 14253 |
| 1496 | 4395 |
| 1497 | 4395 |
| 1498 | 13982 |
| 1499 | 4342 |
| 1500 | 14974 |
| 1501 | 14974 |
| 1502 | 3574 |
| 1503 | 13982 |
| 1504 | 14921 |
| 1505 | 4394 |
| 1506 | 14263 |
| 1507 | 4394 |
| 1508 | 15385 |
| 1509 | 15356 |
| 1510 | 14932 |
| 1511 | 13981 |
| 1512 | 15403 |
| 1513 | 13983 |
| 1514 | 4130 |
| 1515 | 15385 |
| 1516 | 14263 |
| 1517 | 4781 |
| 1518 | 4767 |
| 1519 | 3940 |
| 1520 | 14252 |
| 1521 | 14921 |
| 1522 | 14764 |
| 1523 | 14899 |
| 1524 | 15350 |
| 1525 | 15395 |
| 1526 | 15385 |
| 1527 | 4029 |
| 1528 | 15385 |
| 1529 | 4394 |
| 1530 | 14974 |
| 1531 | 15385 |
| 1532 | 4781 |
| 1533 | 15385 |
| 1534 | 4395 |
| 1535 | 4029 |
| 1536 | 14921 |
| 1537 | 3940 |
| 1538 | 14921 |
| 1539 | 14937 |
| 1540 | 14027 |
| 1541 | 15390 |
| 1542 | 3574 |
| 1543 | 4781 |
| 1544 | 14921 |
| 1545 | 14764 |
| 1546 | 4029 |
| 1547 | 15390 |
| 1548 | 15385 |
| 1549 | 14253 |
| 1550 | 13983 |
| 1551 | 15390 |
| 1552 | 15350 |
| 1553 | 14999 |
| 1554 | 4395 |
| 1555 | 4781 |
| 1556 | 14999 |
| 1557 | 14999 |
| 1558 | 14999 |
| 1559 | 4130 |
| 1560 | 14921 |
| 1561 | 14921 |
| 1562 | 15350 |
| 1563 | 14252 |
| 1564 | 15385 |
| 1565 | 4029 |
| 1566 | 8767 |
| 1567 | 4782 |
| 1568 | 4781 |
| 1569 | 15390 |
| 1570 | 14974 |
| 1571 | 4342 |
| 1572 | 14921 |
| 1573 | 4029 |
| 1574 | 14764 |
| 1575 | 4781 |
| 1576 | 4395 |
| 1577 | 15403 |
| 1578 | 14764 |
| 1579 | 4121 |
| 1580 | 14020 |
| 1581 | 14937 |
| 1582 | 4342 |
| 1583 | 14921 |
| 1584 | 4394 |
| 1585 | 4781 |
| 1586 | 4130 |
| 1587 | 14999 |
| 1588 | 14899 |
| 1589 | 13981 |
| 1590 | 4782 |
| 1591 | 14937 |
| 1592 | 15350 |
| 1593 | 14921 |
| 1594 | 4342 |
| 1595 | 3574 |
| 1596 | 4767 |
| 1597 | 4342 |
| 1598 | 14999 |
| 1599 | 4781 |
| 1600 | 14921 |
| 1601 | 14921 |
| 1602 | 4029 |
| 1603 | 4029 |
| 1604 | 4781 |
| 1605 | 14764 |
| 1606 | 3940 |
| 1607 | 4342 |
| 1608 | 14252 |
| 1609 | 3574 |
| 1610 | 14764 |
| 1611 | 13982 |
| 1612 | 15395 |
| 1613 | 4781 |
| 1614 | 4394 |
| 1615 | 15385 |
| 1616 | 14974 |
| 1617 | 14999 |
| 1618 | 15395 |
| 1619 | 14999 |
| 1620 | 13981 |
| 1621 | 14252 |
| 1622 | 14764 |
| 1623 | 15395 |
| 1624 | 14764 |
| 1625 | 15356 |
| 1626 | 14764 |
| 1627 | 15403 |
| 1628 | 14253 |
| 1629 | 3940 |
| 1630 | 14764 |
| 1631 | 15395 |
| 1632 | 4782 |
| 1633 | 14020 |
| 1634 | 4767 |
| 1635 | 15385 |
| 1636 | 4781 |
| 1637 | 14263 |
| 1638 | 14974 |
| 1639 | 14921 |
| 1640 | 14937 |
| 1641 | 14252 |
| 1642 | 14921 |
| 1643 | 14250 |
| 1644 | 14252 |
| 1645 | 14263 |
| 1646 | 14921 |
| 1647 | 14250 |
| 1648 | 14764 |
| 1649 | 4767 |
| 1650 | 15395 |
| 1651 | 14250 |
| 1652 | 4029 |
| 1653 | 14999 |
| 1654 | 15356 |
| 1655 | 3964 |
| 1656 | 15403 |
| 1657 | 13981 |
| 1658 | 14764 |
| 1659 | 15395 |
| 1660 | 4767 |
| 1661 | 4781 |
| 1662 | 3952 |
| 1663 | 4394 |
| 1664 | 4121 |
| 1665 | 13981 |
| 1666 | 3574 |
| 1667 | 14253 |
| 1668 | 14252 |
| 1669 | 4029 |
| 1670 | 4029 |
| 1671 | 3952 |
| 1672 | 14252 |
| 1673 | 15403 |
| 1674 | 14764 |
| 1675 | 4029 |
| 1676 | 3574 |
| 1677 | 15356 |
| 1678 | 14027 |
| 1679 | 14921 |
| 1680 | 3940 |
| 1681 | 14263 |
| 1682 | 14250 |
| 1683 | 13981 |
| 1684 | 14250 |
| 1685 | 14253 |
| 1686 | 14937 |
| 1687 | 14921 |
| 1688 | 4781 |
| 1689 | 14250 |
| 1690 | 14253 |
| 1691 | 15350 |
| 1692 | 14253 |
| 1693 | 14999 |
| 1694 | 13981 |
| 1695 | 4342 |
| 1696 | 14921 |
| 1697 | 4029 |
| 1698 | 14899 |
| 1699 | 3574 |
| 1700 | 3940 |
| 1701 | 4394 |
| 1702 | 14999 |
| 1703 | 15350 |
| 1704 | 14253 |
| 1705 | 4342 |
| 1706 | 4342 |
| 1707 | 3952 |
| 1708 | 4781 |
| 1709 | 15356 |
| 1710 | 14937 |
| 1711 | 14253 |
| 1712 | 14899 |
| 1713 | 4767 |
| 1714 | 4342 |
| 1715 | 4121 |
| 1716 | 4342 |
| 1717 | 4029 |
| 1718 | 14999 |
| 1719 | 14974 |
| 1720 | 14899 |
| 1721 | 15385 |
| 1722 | 4130 |
| 1723 | 3952 |
| 1724 | 4395 |
| 1725 | 4782 |
| 1726 | 4130 |
| 1727 | 14932 |
| 1728 | 3574 |
| 1729 | 4342 |
| 1730 | 14764 |
| 1731 | 13981 |
| 1732 | 4029 |
| 1733 | 4767 |
| 1734 | 14027 |
| 1735 | 14263 |
| 1736 | 14263 |
| 1737 | 4029 |
| 1738 | 14252 |
| 1739 | 4130 |
| 1740 | 13981 |
| 1741 | 14252 |
| 1742 | 4342 |
| 1743 | 3926 |
| 1744 | 13981 |
| 1745 | 4029 |
| 1746 | 14921 |
| 1747 | 14764 |
| 1748 | 14932 |
| 1749 | 14921 |
| 1750 | 14764 |
| 1751 | 14252 |
| 1752 | 4130 |
| 1753 | 13981 |
| 1754 | 14252 |
| 1755 | 14020 |
| 1756 | 3940 |
| 1757 | 13981 |
| 1758 | 14764 |
| 1759 | 15403 |
| 1760 | 14027 |
| 1761 | 15403 |
| 1762 | 14999 |
| 1763 | 15403 |
| 1764 | 14899 |
| 1765 | 4767 |
| 1766 | 14921 |
| 1767 | 14764 |
| 1768 | 4130 |
| 1769 | 13981 |
| 1770 | 14999 |
| 1771 | 14764 |
| 1772 | 4130 |
| 1773 | 14027 |
| 1774 | 15350 |
| 1775 | 3952 |
| 1776 | 14020 |
| 1777 | 14937 |
| 1778 | 14937 |
| 1779 | 14252 |
| 1780 | 15403 |
| 1781 | 15350 |
| 1782 | 14252 |
| 1783 | 14999 |
| 1784 | 4782 |
| 1785 | 13981 |
| 1786 | 14263 |
| 1787 | 14974 |
| 1788 | 14921 |
| 1789 | 14027 |
| 1790 | 14974 |
| 1791 | 4767 |
| 1792 | 14999 |
| 1793 | 4029 |
| 1794 | 14263 |
| 1795 | 4029 |
| 1796 | 14899 |
| 1797 | 4029 |
| 1798 | 14252 |
| 1799 | 14764 |
| 1800 | 14252 |
| 1801 | 14253 |
| 1802 | 4029 |
| 1803 | 15395 |
| 1804 | 4781 |
| 1805 | 4029 |
| 1806 | 14027 |
| 1807 | 3926 |
| 1808 | 14252 |
| 1809 | 14921 |
| 1810 | 14921 |
| 1811 | 15390 |
| 1812 | 14253 |
| 1813 | 14253 |
| 1814 | 14252 |
| 1815 | 4121 |
| 1816 | 3574 |
| 1817 | 4781 |
| 1818 | 14252 |
| 1819 | 3574 |
| 1820 | 15350 |
| 1821 | 4342 |
| 1822 | 15403 |
| 1823 | 13982 |
| 1824 | 14252 |
| 1825 | 14253 |
| 1826 | 3574 |
| 1827 | 3964 |
| 1828 | 3952 |
| 1829 | 13983 |
| 1830 | 4029 |
| 1831 | 4029 |
| 1832 | 8767 |
| 1833 | 14999 |
| 1834 | 15350 |
| 1835 | 4782 |
| 1836 | 3964 |
| 1837 | 14020 |
| 1838 | 4342 |
| 1839 | 14020 |
| 1840 | 4395 |
| 1841 | 14250 |
| 1842 | 14764 |
| 1843 | 14899 |
| 1844 | 13981 |
| 1845 | 4782 |
| 1846 | 14921 |
| 1847 | 4781 |
| 1848 | 14999 |
| 1849 | 3574 |
| 1850 | 3940 |
| 1851 | 4781 |
| 1852 | 4342 |
| 1853 | 14252 |
| 1854 | 3574 |
| 1855 | 4767 |
| 1856 | 14764 |
| 1857 | 14252 |
| 1858 | 14252 |
| 1859 | 4029 |
| 1860 | 3952 |
| 1861 | 4342 |
| 1862 | 3952 |
| 1863 | 14253 |
| 1864 | 4394 |
| 1865 | 4781 |
| 1866 | 15356 |
| 1867 | 4029 |
| 1868 | 14027 |
| 1869 | 14921 |
| 1870 | 15395 |
| 1871 | 4342 |
| 1872 | 14999 |
| 1873 | 14999 |
| 1874 | 4342 |
| 1875 | 8767 |
| 1876 | 4781 |
| 1877 | 4342 |
| 1878 | 4767 |
| 1879 | 14899 |
| 1880 | 14921 |
| 1881 | 4029 |
| 1882 | 4767 |
| 1883 | 14253 |
| 1884 | 4767 |
| 1885 | 14932 |
| 1886 | 4029 |
| 1887 | 3964 |
| 1888 | 15385 |
| 1889 | 14027 |
| 1890 | 4781 |
| 1891 | 4781 |
| 1892 | 4342 |
| 1893 | 14252 |
| 1894 | 4767 |
| 1895 | 14999 |
| 1896 | 4029 |
| 1897 | 14764 |
| 1898 | 14764 |
| 1899 | 4342 |
| 1900 | 14764 |
| 1901 | 3574 |
| 1902 | 3964 |
| 1903 | 14252 |
| 1904 | 14937 |
| 1905 | 14999 |
| 1906 | 3574 |
| 1907 | 13981 |
| 1908 | 14764 |
| 1909 | 14252 |
| 1910 | 4029 |
| 1911 | 3952 |
| 1912 | 3574 |
| 1913 | 4781 |
| 1914 | 13983 |
| 1915 | 14764 |
| 1916 | 4394 |
| 1917 | 4130 |
| 1918 | 3574 |
| 1919 | 14974 |
| 1920 | 14921 |
| 1921 | 4029 |
| 1922 | 4782 |
| 1923 | 4029 |
| 1924 | 3952 |
| 1925 | 4029 |
| 1926 | 14252 |
| 1927 | 3574 |
| 1928 | 14252 |
| 1929 | 13981 |
| 1930 | 14253 |
| 1931 | 4781 |
| 1932 | 3574 |
| 1933 | 14899 |
| 1934 | 4394 |
| 1935 | 13981 |
| 1936 | 14999 |
| 1937 | 15356 |
| 1938 | 14899 |
| 1939 | 14252 |
| 1940 | 15395 |
| 1941 | 3574 |
| 1942 | 3926 |
| 1943 | 4342 |
| 1944 | 3574 |
| 1945 | 4342 |
| 1946 | 4029 |
| 1947 | 15356 |
| 1948 | 4342 |
| 1949 | 4767 |
| 1950 | 4029 |
| 1951 | 14027 |
| 1952 | 4121 |
| 1953 | 3964 |
| 1954 | 4781 |
| 1955 | 14764 |
| 1956 | 14252 |
| 1957 | 3574 |
| 1958 | 4767 |
| 1959 | 4781 |
| 1960 | 15350 |
| 1961 | 15385 |
| 1962 | 15385 |
| 1963 | 13982 |
| 1964 | 4130 |
| 1965 | 3574 |
| 1966 | 4029 |
| 1967 | 14932 |
| 1968 | 14764 |
| 1969 | 14250 |
| 1970 | 14999 |
| 1971 | 3952 |
| 1972 | 14252 |
| 1973 | 14899 |
| 1974 | 4342 |
| 1975 | 14999 |
| 1976 | 4782 |
| 1977 | 14764 |
| 1978 | 14899 |
| 1979 | 14921 |
| 1980 | 15385 |
| 1981 | 15350 |
| 1982 | 14921 |
| 1983 | 14932 |
| 1984 | 4342 |
| 1985 | 4781 |
| 1986 | 4121 |
| 1987 | 15403 |
| 1988 | 4342 |
| 1989 | 15350 |
| 1990 | 4394 |
| 1991 | 14764 |
| 1992 | 13981 |
| 1993 | 4130 |
| 1994 | 14252 |
| 1995 | 15356 |
| 1996 | 14899 |
| 1997 | 14999 |
| 1998 | 14999 |
| 1999 | 14999 |
| 2000 | 3574 |
| 2001 | 14999 |
| 2002 | 14921 |
| 2003 | 3964 |
| 2004 | 3574 |
| 2005 | 3574 |
| 2006 | 14250 |
| 2007 | 14899 |
| 2008 | 14999 |
| 2009 | 4781 |
| 2010 | 4394 |
| 2011 | 4781 |
| 2012 | 4782 |
| 2013 | 14921 |
| 2014 | 15385 |
| 2015 | 15385 |
| 2016 | 4130 |
| 2017 | 3940 |
| 2018 | 14263 |
| 2019 | 14932 |
| 2020 | 14252 |
| 2021 | 14764 |
| 2022 | 4342 |
| 2023 | 14921 |
| 2024 | 14899 |
| 2025 | 13981 |
| 2026 | 14921 |
| 2027 | 14252 |
| 2028 | 14899 |
| 2029 | 3574 |
| 2030 | 4767 |
| 2031 | 3952 |
| 2032 | 14764 |
| 2033 | 14999 |
| 2034 | 4130 |
| 2035 | 3574 |
| 2036 | 14027 |
| 2037 | 4029 |
| 2038 | 14253 |
| 2039 | 15403 |
| 2040 | 3964 |
| 2041 | 14252 |
| 2042 | 14899 |
| 2043 | 8767 |
| 2044 | 14252 |
| 2045 | 4781 |
| 2046 | 14899 |
| 2047 | 15403 |
| 2048 | 3964 |
| 2049 | 14999 |
| 2050 | 14999 |
| 2051 | 3574 |
| 2052 | 14999 |
| 2053 | 4767 |
| 2054 | 14921 |
| 2055 | 14252 |
| 2056 | 14253 |
| 2057 | 15385 |
| 2058 | 5184 |
| 2059 | 4781 |
| 2060 | 14020 |
| 2061 | 13983 |
| 2062 | 4781 |
| 2063 | 14974 |
| 2064 | 4029 |
| 2065 | 14999 |
| 2066 | 14252 |
| 2067 | 14027 |
| 2068 | 14250 |
| 2069 | 4781 |
| 2070 | 15356 |
| 2071 | 14253 |
| 2072 | 4394 |
| 2073 | 14764 |
| 2074 | 4342 |
| 2075 | 14263 |
| 2076 | 14999 |
| 2077 | 8767 |
| 2078 | 13981 |
| 2079 | 4781 |
| 2080 | 4342 |
| 2081 | 3964 |
| 2082 | 14252 |
| 2083 | 4767 |
| 2084 | 15390 |
| 2085 | 15390 |
| 2086 | 14250 |
| 2087 | 3574 |
| 2088 | 13981 |
| 2089 | 4767 |
| 2090 | 15385 |
| 2091 | 14999 |
| 2092 | 4782 |
| 2093 | 3964 |
| 2094 | 4782 |
| 2095 | 4767 |
| 2096 | 3574 |
| 2097 | 3940 |
| 2098 | 3574 |
| 2099 | 14921 |
| 2100 | 14921 |
| 2101 | 3940 |
| 2102 | 14937 |
| 2103 | 14899 |
| 2104 | 14921 |
| 2105 | 4782 |
| 2106 | 14861 |
| 2107 | 14932 |
| 2108 | 4029 |
| 2109 | 4130 |
| 2110 | 14252 |
| 2111 | 14253 |
| 2112 | 4130 |
| 2113 | 14974 |
| 2114 | 15356 |
| 2115 | 14250 |
| 2116 | 4781 |
| 2117 | 14974 |
| 2118 | 14253 |
| 2119 | 4767 |
| 2120 | 13981 |
| 2121 | 14921 |
| 2122 | 3964 |
| 2123 | 14999 |
| 2124 | 4781 |
| 2125 | 14899 |
| 2126 | 15403 |
| 2127 | 14263 |
| 2128 | 15385 |
| 2129 | 14921 |
| 2130 | 14921 |
| 2131 | 14899 |
| 2132 | 4781 |
| 2133 | 4121 |
| 2134 | 4342 |
| 2135 | 14764 |
| 2136 | 4121 |
| 2137 | 4781 |
| 2138 | 14764 |
| 2139 | 14253 |
| 2140 | 14999 |
| 2141 | 14253 |
| 2142 | 4767 |
| 2143 | 15356 |
| 2144 | 4029 |
| 2145 | 4029 |
| 2146 | 3574 |
| 2147 | 15385 |
| 2148 | 4130 |
| 2149 | 3926 |
| 2150 | 14263 |
| 2151 | 14020 |
| 2152 | 14899 |
| 2153 | 3574 |
| 2154 | 4029 |
| 2155 | 14764 |
| 2156 | 14250 |
| 2157 | 3952 |
| 2158 | 4781 |
| 2159 | 4342 |
| 2160 | 14921 |
| 2161 | 14921 |
| 2162 | 3964 |
| 2163 | 14252 |
| 2164 | 15403 |
| 2165 | 13981 |
| 2166 | 14252 |
| 2167 | 14253 |
| 2168 | 3952 |
| 2169 | 14999 |
| 2170 | 4342 |
| 2171 | 14252 |
| 2172 | 15385 |
| 2173 | 4342 |
| 2174 | 14764 |
| 2175 | 3940 |
| 2176 | 8767 |
| 2177 | 14937 |
| 2178 | 13981 |
| 2179 | 4767 |
| 2180 | 14921 |
| 2181 | 15395 |
| 2182 | 14921 |
| 2183 | 14764 |
| 2184 | 14253 |
| 2185 | 4781 |
| 2186 | 4781 |
| 2187 | 4029 |
| 2188 | 15403 |
| 2189 | 4342 |
| 2190 | 14999 |
| 2191 | 14999 |
| 2192 | 15390 |
| 2193 | 15385 |
| 2194 | 3574 |
| 2195 | 3574 |
| 2196 | 14921 |
| 2197 | 4781 |
| 2198 | 15356 |
| 2199 | 14932 |
| 2200 | 4342 |
| 2201 | 14764 |
| 2202 | 14027 |
| 2203 | 4781 |
| 2204 | 14999 |
| 2205 | 4394 |
| 2206 | 14027 |
| 2207 | 4029 |
| 2208 | 14764 |
| 2209 | 15356 |
| 2210 | 3940 |
| 2211 | 4767 |
| 2212 | 14027 |
| 2213 | 14974 |
| 2214 | 3964 |
| 2215 | 4029 |
| 2216 | 14764 |
| 2217 | 4130 |
| 2218 | 4781 |
| 2219 | 4767 |
| 2220 | 13982 |
| 2221 | 15390 |
| 2222 | 14899 |
| 2223 | 14027 |
| 2224 | 4121 |
| 2225 | 14253 |
| 2226 | 4121 |
| 2227 | 4394 |
| 2228 | 13982 |
| 2229 | 4394 |
| 2230 | 4782 |
| 2231 | 4394 |
| 2232 | 14921 |
| 2233 | 3964 |
| 2234 | 14974 |
| 2235 | 15356 |
| 2236 | 4029 |
| 2237 | 14253 |
| 2238 | 4781 |
| 2239 | 3952 |
| 2240 | 4782 |
| 2241 | 14921 |
| 2242 | 14999 |
| 2243 | 4781 |
| 2244 | 14999 |
| 2245 | 14999 |
| 2246 | 4029 |
| 2247 | 14861 |
| 2248 | 14027 |
| 2249 | 4342 |
| 2250 | 14974 |
| 2251 | 4121 |
| 2252 | 13981 |
| 2253 | 3926 |
| 2254 | 14252 |
| 2255 | 4029 |
| 2256 | 3940 |
| 2257 | 14252 |
| 2258 | 4394 |
| 2259 | 14921 |
| 2260 | 4342 |
| 2261 | 4767 |
| 2262 | 14932 |
| 2263 | 14999 |
| 2264 | 14921 |
| 2265 | 4029 |
| 2266 | 4342 |
| 2267 | 15390 |
| 2268 | 4130 |
| 2269 | 15385 |
| 2270 | 14764 |
| 2271 | 4029 |
| 2272 | 3574 |
| 2273 | 4130 |
| 2274 | 4394 |
| 2275 | 15403 |
| 2276 | 14974 |
| 2277 | 8767 |
| 2278 | 4342 |
| 2279 | 14252 |
| 2280 | 13982 |
| 2281 | 4782 |
| 2282 | 15385 |
| 2283 | 14764 |
| 2284 | 14252 |
| 2285 | 3574 |
| 2286 | 14253 |
| 2287 | 14253 |
| 2288 | 4029 |
| 2289 | 4767 |
| 2290 | 3952 |
| 2291 | 4029 |
| 2292 | 14252 |
| 2293 | 14932 |
| 2294 | 3964 |
| 2295 | 14764 |
| 2296 | 14921 |
| 2297 | 15385 |
| 2298 | 14764 |
| 2299 | 14999 |
| 2300 | 14253 |
| 2301 | 14263 |
| 2302 | 14252 |
| 2303 | 14899 |
| 2304 | 4029 |
| 2305 | 4767 |
| 2306 | 14263 |
| 2307 | 3952 |
| 2308 | 15385 |
| 2309 | 14899 |
| 2310 | 13981 |
| 2311 | 14999 |
| 2312 | 15403 |
| 2313 | 14937 |
| 2314 | 4342 |
| 2315 | 14250 |
| 2316 | 4130 |
| 2317 | 14253 |
| 2318 | 14921 |
| 2319 | 4394 |
| 2320 | 4781 |
| 2321 | 4029 |
| 2322 | 14899 |
| 2323 | 3574 |
| 2324 | 14252 |
| 2325 | 14921 |
| 2326 | 14921 |
| 2327 | 15403 |
| 2328 | 14252 |
| 2329 | 14999 |
| 2330 | 14921 |
| 2331 | 14252 |
| 2332 | 4029 |
| 2333 | 15385 |
| 2334 | 14921 |
| 2335 | 14899 |
| 2336 | 13981 |
| 2337 | 14764 |
| 2338 | 15395 |
| 2339 | 14974 |
| 2340 | 3574 |
| 2341 | 4130 |
| 2342 | 4781 |
| 2343 | 15385 |
| 2344 | 14899 |
| 2345 | 15403 |
| 2346 | 15385 |
| 2347 | 14252 |
| 2348 | 14921 |
| 2349 | 14921 |
| 2350 | 14250 |
| 2351 | 4394 |
| 2352 | 14899 |
| 2353 | 14921 |
| 2354 | 14027 |
| 2355 | 15385 |
| 2356 | 14764 |
| 2357 | 15395 |
| 2358 | 15395 |
| 2359 | 14252 |
| 2360 | 13983 |
| 2361 | 4395 |
| 2362 | 3940 |
| 2363 | 4767 |
| 2364 | 4029 |
| 2365 | 4121 |
| 2366 | 14999 |
| 2367 | 15390 |
| 2368 | 4781 |
| 2369 | 4029 |
| 2370 | 14921 |
| 2371 | 15403 |
| 2372 | 4394 |
| 2373 | 4781 |
| 2374 | 3952 |
| 2375 | 13981 |
| 2376 | 14252 |
| 2377 | 14253 |
| 2378 | 15403 |
| 2379 | 14764 |
| 2380 | 14921 |
| 2381 | 4121 |
| 2382 | 14937 |
| 2383 | 4121 |
| 2384 | 14764 |
| 2385 | 14999 |
| 2386 | 14764 |
| 2387 | 4029 |
| 2388 | 14999 |
| 2389 | 4029 |
| 2390 | 14999 |
| 2391 | 4781 |
| 2392 | 4767 |
| 2393 | 4781 |
| 2394 | 14921 |
| 2395 | 3952 |
| 2396 | 4781 |
| 2397 | 14252 |
| 2398 | 4130 |
| 2399 | 13981 |
| 2400 | 3952 |
| 2401 | 4394 |
| 2402 | 4767 |
| 2403 | 14899 |
| 2404 | 3574 |
| 2405 | 13982 |
| 2406 | 14253 |
| 2407 | 3964 |
| 2408 | 14999 |
| 2409 | 3574 |
| 2410 | 15403 |
| 2411 | 14253 |
| 2412 | 15385 |
| 2413 | 4767 |
| 2414 | 4029 |
| 2415 | 15385 |
| 2416 | 14027 |
| 2417 | 5184 |
| 2418 | 14937 |
| 2419 | 3926 |
| 2420 | 14937 |
| 2421 | 4781 |
| 2422 | 3964 |
| 2423 | 14921 |
| 2424 | 15356 |
| 2425 | 4342 |
| 2426 | 14252 |
| 2427 | 14764 |
| 2428 | 15356 |
| 2429 | 14252 |
| 2430 | 4029 |
| 2431 | 3926 |
| 2432 | 4342 |
| 2433 | 14250 |
| 2434 | 14921 |
| 2435 | 4029 |
| 2436 | 4781 |
| 2437 | 3574 |
| 2438 | 3574 |
| 2439 | 3940 |
| 2440 | 3952 |
| 2441 | 3574 |
| 2442 | 4342 |
| 2443 | 4029 |
| 2444 | 4121 |
| 2445 | 3940 |
| 2446 | 14253 |
| 2447 | 3574 |
| 2448 | 3952 |
| 2449 | 3964 |
| 2450 | 14252 |
| 2451 | 14764 |
| 2452 | 14937 |
| 2453 | 4029 |
| 2454 | 8767 |
| 2455 | 13981 |
| 2456 | 4394 |
| 2457 | 15350 |
| 2458 | 15350 |
| 2459 | 14974 |
| 2460 | 14937 |
| 2461 | 14921 |
| 2462 | 4130 |
| 2463 | 14999 |
| 2464 | 13981 |
| 2465 | 15350 |
| 2466 | 14974 |
| 2467 | 4029 |
| 2468 | 14932 |
| 2469 | 14250 |
| 2470 | 3574 |
| 2471 | 14250 |
| 2472 | 14764 |
| 2473 | 4781 |
| 2474 | 4121 |
| 2475 | 14764 |
| 2476 | 4029 |
| 2477 | 14921 |
| 2478 | 4342 |
| 2479 | 3964 |
| 2480 | 14999 |
| 2481 | 15385 |
| 2482 | 14937 |
| 2483 | 4767 |
| 2484 | 3574 |
| 2485 | 8767 |
| 2486 | 15395 |
| 2487 | 14027 |
| 2488 | 14899 |
| 2489 | 14899 |
| 2490 | 13983 |
| 2491 | 3574 |
| 2492 | 14921 |
| 2493 | 14263 |
| 2494 | 15403 |
| 2495 | 14253 |
| 2496 | 14020 |
| 2497 | 3574 |
| 2498 | 14263 |
| 2499 | 13981 |
| 2500 | 4121 |
| 2501 | 15385 |
| 2502 | 14253 |
| 2503 | 14921 |
| 2504 | 15390 |
| 2505 | 5184 |
| 2506 | 4342 |
| 2507 | 15390 |
| 2508 | 13983 |
| 2509 | 14250 |
| 2510 | 14999 |
| 2511 | 3574 |
| 2512 | 4781 |
| 2513 | 13981 |
| 2514 | 14974 |
| 2515 | 14937 |
| 2516 | 14764 |
| 2517 | 14027 |
| 2518 | 14932 |
| 2519 | 14764 |
| 2520 | 15395 |
| 2521 | 14974 |
| 2522 | 14999 |
| 2523 | 15385 |
| 2524 | 14764 |
| 2525 | 4130 |
| 2526 | 14027 |
| 2527 | 4121 |
| 2528 | 14899 |
| 2529 | 4121 |
| 2530 | 4130 |
| 2531 | 4342 |
| 2532 | 4121 |
| 2533 | 4130 |
| 2534 | 3964 |
| 2535 | 4394 |
| 2536 | 14861 |
| 2537 | 4342 |
| 2538 | 4767 |
| 2539 | 14999 |
| 2540 | 14027 |
| 2541 | 13981 |
| 2542 | 8767 |
| 2543 | 14921 |
| 2544 | 15403 |
| 2545 | 4767 |
| 2546 | 14253 |
| 2547 | 14932 |
| 2548 | 14999 |
| 2549 | 14764 |
| 2550 | 3574 |
| 2551 | 13982 |
| 2552 | 3952 |
| 2553 | 4394 |
| 2554 | 14027 |
| 2555 | 15385 |
| 2556 | 14921 |
| 2557 | 3952 |
| 2558 | 14974 |
| 2559 | 15403 |
| 2560 | 8767 |
| 2561 | 15350 |
| 2562 | 15390 |
| 2563 | 14253 |
| 2564 | 4029 |
| 2565 | 14252 |
| 2566 | 13981 |
| 2567 | 4029 |
| 2568 | 3964 |
| 2569 | 3940 |
| 2570 | 4767 |
| 2571 | 14764 |
| 2572 | 3574 |
| 2573 | 4767 |
| 2574 | 15350 |
| 2575 | 4781 |
| 2576 | 14921 |
| 2577 | 14764 |
| 2578 | 15403 |
| 2579 | 14899 |
| 2580 | 14899 |
| 2581 | 15350 |
| 2582 | 4781 |
| 2583 | 3926 |
| 2584 | 13981 |
| 2585 | 3926 |
| 2586 | 3964 |
| 2587 | 14253 |
| 2588 | 4395 |
| 2589 | 13982 |
| 2590 | 14252 |
| 2591 | 13981 |
| 2592 | 4342 |
| 2593 | 14253 |
| 2594 | 4394 |
| 2595 | 14921 |
| 2596 | 4130 |
| 2597 | 4029 |
| 2598 | 3926 |
| 2599 | 14899 |
| 2600 | 15356 |
| 2601 | 14263 |
| 2602 | 4029 |
| 2603 | 14999 |
| 2604 | 14974 |
| 2605 | 4782 |
| 2606 | 3964 |
| 2607 | 14999 |
| 2608 | 4395 |
| 2609 | 4781 |
| 2610 | 14764 |
| 2611 | 4394 |
| 2612 | 14027 |
| 2613 | 14764 |
| 2614 | 14999 |
| 2615 | 4029 |
| 2616 | 13981 |
| 2617 | 14252 |
| 2618 | 14253 |
| 2619 | 14764 |
| 2620 | 14921 |
| 2621 | 4394 |
| 2622 | 4342 |
| 2623 | 4029 |
| 2624 | 4342 |
| 2625 | 14999 |
| 2626 | 4342 |
| 2627 | 15385 |
| 2628 | 14937 |
| 2629 | 14764 |
| 2630 | 14921 |
| 2631 | 14253 |
| 2632 | 14252 |
| 2633 | 14764 |
| 2634 | 15395 |
| 2635 | 14932 |
| 2636 | 4394 |
| 2637 | 14252 |
| 2638 | 14999 |
| 2639 | 3964 |
| 2640 | 14253 |
| 2641 | 14999 |
| 2642 | 14999 |
| 2643 | 15395 |
| 2644 | 15356 |
| 2645 | 4029 |
| 2646 | 14932 |
| 2647 | 14937 |
| 2648 | 4767 |
| 2649 | 4781 |
| 2650 | 15385 |
| 2651 | 14921 |
| 2652 | 15390 |
| 2653 | 13981 |
| 2654 | 14937 |
| 2655 | 13981 |
| 2656 | 4781 |
| 2657 | 14974 |
| 2658 | 15350 |
| 2659 | 14899 |
| 2660 | 14253 |
| 2661 | 14764 |
| 2662 | 3574 |
| 2663 | 8767 |
| 2664 | 4781 |
| 2665 | 14764 |
| 2666 | 14253 |
| 2667 | 3940 |
| 2668 | 15356 |
| 2669 | 14999 |
| 2670 | 3574 |
| 2671 | 4342 |
| 2672 | 4342 |
| 2673 | 4342 |
| 2674 | 14764 |
| 2675 | 4029 |
| 2676 | 4029 |
| 2677 | 4394 |
| 2678 | 14250 |
| 2679 | 14899 |
| 2680 | 5184 |
| 2681 | 4029 |
| 2682 | 14921 |
| 2683 | 14999 |
| 2684 | 14937 |
| 2685 | 15403 |
| 2686 | 14999 |
| 2687 | 15385 |
| 2688 | 3926 |
| 2689 | 14263 |
| 2690 | 4029 |
| 2691 | 14899 |
| 2692 | 14999 |
| 2693 | 15395 |
| 2694 | 14764 |
| 2695 | 14899 |
| 2696 | 15390 |
| 2697 | 14764 |
| 2698 | 14999 |
| 2699 | 4342 |
| 2700 | 3574 |
| 2701 | 15385 |
| 2702 | 14999 |
| 2703 | 4767 |
| 2704 | 15403 |
| 2705 | 15403 |
| 2706 | 15390 |
| 2707 | 14932 |
| 2708 | 14764 |
| 2709 | 15403 |
| 2710 | 4342 |
| 2711 | 14764 |
| 2712 | 14253 |
| 2713 | 15403 |
| 2714 | 4781 |
| 2715 | 13981 |
| 2716 | 4029 |
| 2717 | 3952 |
| 2718 | 14252 |
| 2719 | 14999 |
| 2720 | 4029 |
| 2721 | 4781 |
| 2722 | 3926 |
| 2723 | 4767 |
| 2724 | 4342 |
| 2725 | 4029 |
| 2726 | 14252 |
| 2727 | 3926 |
| 2728 | 3952 |
| 2729 | 3940 |
| 2730 | 4029 |
| 2731 | 15403 |
| 2732 | 14252 |
| 2733 | 4342 |
| 2734 | 14921 |
| 2735 | 13981 |
| 2736 | 15403 |
| 2737 | 15403 |
| 2738 | 3952 |
| 2739 | 4767 |
| 2740 | 4767 |
| 2741 | 14764 |
| 2742 | 3574 |
| 2743 | 15403 |
| 2744 | 14263 |
| 2745 | 14253 |
| 2746 | 4781 |
| 2747 | 4029 |
| 2748 | 14999 |
| 2749 | 14921 |
| 2750 | 4394 |
| 2751 | 14999 |
| 2752 | 14899 |
| 2753 | 14253 |
| 2754 | 4121 |
| 2755 | 14974 |
| 2756 | 3940 |
| 2757 | 4394 |
| 2758 | 4394 |
| 2759 | 4029 |
| 2760 | 14252 |
| 2761 | 14899 |
| 2762 | 4029 |
| 2763 | 4121 |
| 2764 | 15403 |
| 2765 | 14921 |
| 2766 | 14999 |
| 2767 | 4130 |
| 2768 | 4029 |
| 2769 | 13981 |
| 2770 | 14252 |
| 2771 | 14253 |
| 2772 | 14999 |
| 2773 | 4394 |
| 2774 | 14252 |
| 2775 | 14932 |
| 2776 | 14921 |
| 2777 | 15395 |
| 2778 | 14999 |
| 2779 | 14921 |
| 2780 | 14252 |
| 2781 | 14999 |
| 2782 | 4342 |
| 2783 | 4342 |
| 2784 | 4342 |
| 2785 | 14253 |
| 2786 | 4121 |
| 2787 | 4121 |
| 2788 | 4781 |
| 2789 | 14999 |
| 2790 | 14999 |
| 2791 | 4767 |
| 2792 | 4342 |
| 2793 | 14932 |
| 2794 | 3940 |
| 2795 | 4130 |
| 2796 | 14899 |
| 2797 | 13981 |
| 2798 | 4781 |
| 2799 | 4342 |
| 2800 | 15395 |
| 2801 | 4767 |
| 2802 | 14252 |
| 2803 | 4342 |
| 2804 | 4767 |
| 2805 | 4029 |
| 2806 | 3574 |
| 2807 | 14921 |
| 2808 | 14999 |
| 2809 | 4767 |
| 2810 | 14999 |
| 2811 | 4130 |
| 2812 | 8767 |
| 2813 | 13981 |
| 2814 | 14020 |
| 2815 | 15356 |
| 2816 | 14999 |
| 2817 | 15395 |
| 2818 | 14999 |
| 2819 | 4781 |
| 2820 | 14764 |
| 2821 | 14764 |
| 2822 | 14027 |
| 2823 | 14999 |
| 2824 | 4394 |
| 2825 | 4342 |
| 2826 | 4029 |
| 2827 | 14921 |
| 2828 | 4781 |
| 2829 | 15350 |
| 2830 | 14932 |
| 2831 | 15350 |
| 2832 | 14974 |
| 2833 | 14921 |
| 2834 | 4130 |
| 2835 | 4029 |
| 2836 | 14027 |
| 2837 | 14899 |
| 2838 | 15356 |
| 2839 | 14253 |
| 2840 | 13983 |
| 2841 | 14253 |
| 2842 | 14932 |
| 2843 | 14999 |
| 2844 | 4029 |
| 2845 | 15395 |
| 2846 | 13982 |
| 2847 | 13981 |
| 2848 | 4767 |
| 2849 | 15385 |
| 2850 | 4781 |
| 2851 | 4130 |
| 2852 | 14921 |
| 2853 | 14921 |
| 2854 | 13981 |
| 2855 | 4121 |
| 2856 | 4121 |
| 2857 | 14899 |
| 2858 | 14974 |
| 2859 | 14921 |
| 2860 | 14999 |
| 2861 | 14250 |
| 2862 | 14921 |
| 2863 | 4781 |
| 2864 | 4342 |
| 2865 | 15385 |
| 2866 | 14974 |
| 2867 | 13981 |
| 2868 | 14764 |
| 2869 | 4342 |
| 2870 | 4130 |
| 2871 | 15403 |
| 2872 | 4342 |
| 2873 | 14252 |
| 2874 | 14932 |
| 2875 | 4395 |
| 2876 | 14027 |
| 2877 | 14250 |
| 2878 | 15385 |
| 2879 | 15403 |
| 2880 | 14252 |
| 2881 | 14252 |
| 2882 | 14921 |
| 2883 | 4782 |
| 2884 | 5184 |
| 2885 | 14921 |
| 2886 | 8767 |
| 2887 | 4121 |
| 2888 | 14999 |
| 2889 | 15395 |
| 2890 | 15390 |
| 2891 | 3574 |
| 2892 | 14252 |
| 2893 | 14253 |
| 2894 | 14252 |
| 2895 | 4342 |
| 2896 | 4342 |
| 2897 | 15395 |
| 2898 | 4029 |
| 2899 | 15350 |
| 2900 | 14899 |
| 2901 | 14932 |
| 2902 | 14937 |
| 2903 | 4394 |
| 2904 | 4342 |
| 2905 | 4130 |
| 2906 | 14921 |
| 2907 | 14263 |
| 2908 | 14921 |
| 2909 | 3964 |
| 2910 | 4395 |
| 2911 | 3574 |
| 2912 | 14921 |
| 2913 | 4782 |
| 2914 | 15395 |
| 2915 | 4121 |
| 2916 | 4782 |
| 2917 | 14899 |
| 2918 | 14764 |
| 2919 | 14974 |
| 2920 | 4394 |
| 2921 | 4781 |
| 2922 | 3574 |
| 2923 | 15350 |
| 2924 | 4029 |
| 2925 | 4342 |
| 2926 | 15403 |
| 2927 | 4029 |
| 2928 | 14263 |
| 2929 | 4395 |
| 2930 | 15350 |
| 2931 | 3574 |
| 2932 | 14937 |
| 2933 | 14974 |
| 2934 | 14921 |
| 2935 | 3574 |
| 2936 | 14899 |
| 2937 | 14252 |
| 2938 | 14921 |
| 2939 | 13981 |
| 2940 | 14999 |
| 2941 | 14263 |
| 2942 | 14253 |
| 2943 | 14932 |
| 2944 | 14899 |
| 2945 | 3952 |
| 2946 | 13982 |
| 2947 | 15395 |
| 2948 | 15403 |
| 2949 | 3964 |
| 2950 | 3926 |
| 2951 | 4781 |
| 2952 | 14252 |
| 2953 | 3952 |
| 2954 | 3574 |
| 2955 | 14921 |
| 2956 | 14252 |
| 2957 | 14252 |
| 2958 | 4130 |
| 2959 | 15395 |
| 2960 | 14999 |
| 2961 | 4029 |
| 2962 | 4121 |
| 2963 | 15390 |
| 2964 | 13982 |
| 2965 | 3940 |
| 2966 | 4029 |
| 2967 | 14764 |
| 2968 | 14764 |
| 2969 | 4342 |
| 2970 | 14974 |
| 2971 | 14764 |
| 2972 | 14020 |
| 2973 | 15356 |
| 2974 | 14921 |
| 2975 | 15403 |
| 2976 | 4767 |
| 2977 | 14999 |
| 2978 | 4342 |
| 2979 | 15403 |
| 2980 | 4781 |
| 2981 | 14921 |
| 2982 | 14027 |
| 2983 | 15356 |
| 2984 | 15395 |
| 2985 | 3940 |
| 2986 | 14250 |
| 2987 | 15395 |
| 2988 | 14253 |
| 2989 | 14999 |
| 2990 | 14764 |
| 2991 | 3574 |
| 2992 | 14027 |
| 2993 | 3964 |
| 2994 | 14932 |
| 2995 | 14252 |
| 2996 | 14921 |
| 2997 | 14250 |
| 2998 | 15385 |
| 2999 | 4782 |
| 3000 | 14999 |
| 3001 | 4394 |
| 3002 | 14252 |
| 3003 | 3574 |
| 3004 | 4781 |
| 3005 | 15385 |
| 3006 | 14999 |
| 3007 | 14932 |
| 3008 | 14999 |
| 3009 | 4782 |
| 3010 | 15350 |
| 3011 | 15350 |
| 3012 | 4767 |
| 3013 | 15390 |
| 3014 | 3574 |
| 3015 | 15403 |
| 3016 | 14252 |
| 3017 | 4781 |
| 3018 | 14252 |
| 3019 | 3574 |
| 3020 | 14027 |
| 3021 | 4781 |
| 3022 | 13983 |
| 3023 | 15403 |
| 3024 | 4342 |
| 3025 | 14999 |
| 3026 | 15403 |
| 3027 | 4130 |
| 3028 | 14252 |
| 3029 | 4394 |
| 3030 | 4782 |
| 3031 | 4130 |
| 3032 | 14999 |
| 3033 | 4121 |
| 3034 | 14027 |
| 3035 | 14252 |
| 3036 | 4342 |
| 3037 | 14932 |
| 3038 | 14974 |
| 3039 | 15390 |
| 3040 | 14999 |
| 3041 | 5184 |
| 3042 | 14921 |
| 3043 | 15403 |
| 3044 | 4029 |
| 3045 | 15356 |
| 3046 | 14974 |
| 3047 | 14764 |
| 3048 | 4781 |
| 3049 | 14921 |
| 3050 | 4029 |
| 3051 | 13981 |
| 3052 | 14932 |
| 3053 | 14027 |
| 3054 | 4781 |
| 3055 | 4130 |
| 3056 | 14921 |
| 3057 | 3574 |
| 3058 | 3926 |
| 3059 | 14253 |
| 3060 | 13981 |
| 3061 | 4121 |
| 3062 | 4781 |
| 3063 | 14263 |
| 3064 | 15385 |
| 3065 | 13981 |
| 3066 | 15403 |
| 3067 | 15356 |
| 3068 | 14252 |
| 3069 | 14921 |
| 3070 | 8767 |
| 3071 | 14027 |
| 3072 | 15385 |
| 3073 | 15403 |
| 3074 | 14764 |
| 3075 | 14253 |
| 3076 | 4342 |
| 3077 | 14999 |
| 3078 | 4394 |
| 3079 | 15350 |
| 3080 | 14027 |
| 3081 | 15403 |
| 3082 | 4130 |
| 3083 | 3964 |
| 3084 | 4394 |
| 3085 | 14861 |
| 3086 | 4781 |
| 3087 | 3952 |
| 3088 | 13981 |
| 3089 | 3574 |
| 3090 | 4395 |
| 3091 | 14921 |
| 3092 | 14027 |
| 3093 | 3574 |
| 3094 | 4121 |
| 3095 | 14999 |
| 3096 | 15395 |
| 3097 | 15395 |
| 3098 | 14027 |
| 3099 | 4029 |
| 3100 | 15403 |
| 3101 | 14027 |
| 3102 | 4767 |
| 3103 | 15403 |
| 3104 | 4342 |
| 3105 | 15356 |
| 3106 | 14764 |
| 3107 | 3940 |
| 3108 | 14027 |
| 3109 | 15395 |
| 3110 | 3964 |
| 3111 | 14932 |
| 3112 | 4130 |
| 3113 | 14899 |
| 3114 | 4029 |
| 3115 | 3574 |
| 3116 | 14921 |
| 3117 | 15385 |
| 3118 | 15403 |
| 3119 | 14250 |
| 3120 | 14252 |
| 3121 | 3964 |
| 3122 | 14263 |
| 3123 | 14899 |
| 3124 | 13981 |
| 3125 | 15403 |
| 3126 | 14999 |
| 3127 | 4394 |
| 3128 | 14250 |
| 3129 | 14252 |
| 3130 | 3574 |
| 3131 | 4781 |
| 3132 | 15395 |
| 3133 | 14937 |
| 3134 | 14252 |
| 3135 | 4130 |
| 3136 | 14921 |
| 3137 | 3940 |
| 3138 | 4121 |
| 3139 | 14027 |
| 3140 | 14999 |
| 3141 | 4394 |
| 3142 | 14252 |
| 3143 | 3940 |
| 3144 | 15403 |
| 3145 | 14899 |
| 3146 | 14263 |
| 3147 | 14252 |
| 3148 | 14921 |
| 3149 | 14764 |
| 3150 | 14252 |
| 3151 | 4342 |
| 3152 | 3952 |
| 3153 | 15403 |
| 3154 | 14252 |
| 3155 | 13982 |
| 3156 | 3952 |
| 3157 | 3964 |
| 3158 | 3574 |
| 3159 | 14252 |
| 3160 | 3940 |
| 3161 | 15403 |
| 3162 | 4342 |
| 3163 | 3574 |
| 3164 | 15350 |
| 3165 | 4767 |
| 3166 | 14921 |
| 3167 | 4029 |
| 3168 | 4342 |
| 3169 | 14764 |
| 3170 | 14937 |
| 3171 | 14252 |
| 3172 | 4342 |
| 3173 | 14899 |
| 3174 | 15385 |
| 3175 | 14764 |
| 3176 | 4029 |
| 3177 | 15395 |
| 3178 | 4130 |
| 3179 | 14999 |
| 3180 | 14252 |
| 3181 | 14921 |
| 3182 | 14921 |
| 3183 | 4767 |
| 3184 | 3940 |
| 3185 | 4781 |
| 3186 | 4029 |
| 3187 | 4767 |
| 3188 | 15350 |
| 3189 | 14252 |
| 3190 | 4342 |
| 3191 | 14764 |
| 3192 | 14764 |
| 3193 | 8767 |
| 3194 | 3952 |
| 3195 | 3940 |
| 3196 | 15350 |
| 3197 | 14764 |
| 3198 | 14921 |
| 3199 | 3940 |
| 3200 | 14921 |
| 3201 | 14252 |
| 3202 | 14974 |
| 3203 | 14999 |
| 3204 | 14252 |
| 3205 | 14921 |
| 3206 | 15403 |
| 3207 | 14764 |
| 3208 | 4121 |
| 3209 | 14999 |
| 3210 | 14999 |
| 3211 | 3964 |
| 3212 | 15356 |
| 3213 | 4121 |
| 3214 | 4029 |
| 3215 | 14899 |
| 3216 | 14252 |
| 3217 | 4767 |
| 3218 | 14999 |
| 3219 | 13981 |
| 3220 | 14253 |
| 3221 | 3574 |
| 3222 | 15403 |
| 3223 | 3574 |
| 3224 | 4029 |
| 3225 | 3926 |
| 3226 | 3574 |
| 3227 | 4342 |
| 3228 | 4029 |
| 3229 | 14999 |
| 3230 | 14253 |
| 3231 | 4342 |
| 3232 | 14921 |
| 3233 | 14899 |
| 3234 | 14999 |
| 3235 | 3964 |
| 3236 | 14250 |
| 3237 | 14921 |
| 3238 | 3940 |
| 3239 | 4029 |
| 3240 | 13981 |
| 3241 | 4781 |
| 3242 | 4781 |
| 3243 | 14252 |
| 3244 | 14974 |
| 3245 | 4781 |
| 3246 | 14921 |
| 3247 | 4781 |
| 3248 | 14764 |
| 3249 | 3940 |
| 3250 | 14027 |
| 3251 | 14899 |
| 3252 | 14764 |
| 3253 | 4121 |
| 3254 | 15403 |
| 3255 | 14252 |
| 3256 | 4029 |
| 3257 | 5184 |
| 3258 | 14020 |
| 3259 | 14974 |
| 3260 | 14020 |
| 3261 | 14974 |
| 3262 | 4121 |
| 3263 | 14999 |
| 3264 | 14921 |
| 3265 | 15403 |
| 3266 | 14899 |
| 3267 | 4342 |
| 3268 | 14764 |
| 3269 | 14253 |
| 3270 | 14921 |
| 3271 | 3964 |
| 3272 | 15390 |
| 3273 | 14861 |
| 3274 | 14921 |
| 3275 | 14764 |
| 3276 | 14253 |
| 3277 | 3574 |
| 3278 | 3926 |
| 3279 | 3926 |
| 3280 | 14253 |
| 3281 | 15385 |
| 3282 | 4342 |
| 3283 | 14921 |
| 3284 | 14921 |
| 3285 | 14263 |
| 3286 | 4029 |
| 3287 | 3952 |
| 3288 | 14999 |
| 3289 | 4342 |
| 3290 | 15385 |
| 3291 | 4781 |
| 3292 | 14252 |
| 3293 | 4130 |
| 3294 | 4767 |
| 3295 | 14861 |
| 3296 | 14921 |
| 3297 | 3952 |
| 3298 | 14252 |
| 3299 | 14999 |
| 3300 | 4781 |
| 3301 | 3964 |
| 3302 | 4342 |
| 3303 | 13981 |
| 3304 | 14899 |
| 3305 | 4782 |
| 3306 | 15356 |
| 3307 | 15403 |
| 3308 | 14764 |
| 3309 | 4342 |
| 3310 | 14263 |
| 3311 | 14999 |
| 3312 | 14921 |
| 3313 | 14937 |
| 3314 | 14921 |
| 3315 | 8767 |
| 3316 | 14764 |
| 3317 | 3574 |
| 3318 | 4394 |
| 3319 | 13981 |
| 3320 | 14764 |
| 3321 | 4342 |
| 3322 | 14899 |
| 3323 | 14899 |
| 3324 | 14921 |
| 3325 | 14253 |
| 3326 | 14899 |
| 3327 | 13981 |
| 3328 | 15385 |
| 3329 | 4782 |
| 3330 | 4767 |
| 3331 | 14253 |
| 3332 | 13981 |
| 3333 | 15385 |
| 3334 | 14253 |
| 3335 | 4781 |
| 3336 | 14764 |
| 3337 | 14899 |
| 3338 | 15350 |
| 3339 | 14027 |
| 3340 | 4781 |
| 3341 | 4781 |
| 3342 | 4342 |
| 3343 | 14250 |
| 3344 | 3952 |
| 3345 | 4342 |
| 3346 | 14250 |
| 3347 | 14974 |
| 3348 | 4394 |
| 3349 | 3940 |
| 3350 | 14764 |
| 3351 | 3574 |
| 3352 | 14253 |
| 3353 | 14974 |
| 3354 | 14764 |
| 3355 | 15395 |
| 3356 | 5184 |
| 3357 | 4781 |
| 3358 | 3940 |
| 3359 | 4781 |
| 3360 | 4395 |
| 3361 | 14999 |
| 3362 | 4781 |
| 3363 | 14999 |
| 3364 | 14921 |
| 3365 | 3964 |
| 3366 | 4395 |
| 3367 | 14252 |
| 3368 | 3964 |
| 3369 | 4395 |
| 3370 | 14999 |
| 3371 | 15403 |
| 3372 | 14252 |
| 3373 | 14253 |
| 3374 | 14764 |
| 3375 | 4394 |
| 3376 | 14252 |
| 3377 | 14020 |
| 3378 | 4342 |
| 3379 | 4130 |
| 3380 | 3952 |
| 3381 | 3574 |
| 3382 | 14999 |
| 3383 | 4130 |
| 3384 | 4781 |
| 3385 | 14899 |
| 3386 | 15350 |
| 3387 | 14932 |
| 3388 | 14921 |
| 3389 | 14999 |
| 3390 | 14252 |
| 3391 | 4781 |
| 3392 | 4342 |
| 3393 | 14252 |
| 3394 | 14999 |
| 3395 | 4781 |
| 3396 | 4394 |
| 3397 | 4342 |
| 3398 | 14764 |
| 3399 | 3926 |
| 3400 | 15403 |
| 3401 | 14252 |
| 3402 | 3952 |
| 3403 | 14932 |
| 3404 | 4029 |
| 3405 | 3964 |
| 3406 | 4767 |
| 3407 | 14252 |
| 3408 | 3964 |
| 3409 | 14974 |
| 3410 | 15350 |
| 3411 | 3574 |
| 3412 | 14899 |
| 3413 | 4342 |
| 3414 | 4029 |
| 3415 | 3952 |
| 3416 | 14921 |
| 3417 | 13981 |
| 3418 | 4029 |
| 3419 | 4029 |
| 3420 | 4782 |
| 3421 | 15385 |
| 3422 | 4029 |
| 3423 | 15350 |
| 3424 | 14027 |
| 3425 | 14263 |
| 3426 | 13981 |
| 3427 | 4342 |
| 3428 | 13981 |
| 3429 | 14921 |
| 3430 | 14899 |
| 3431 | 13981 |
| 3432 | 14932 |
| 3433 | 14932 |
| 3434 | 14921 |
| 3435 | 4029 |
| 3436 | 4130 |
| 3437 | 14999 |
| 3438 | 14937 |
| 3439 | 4342 |
| 3440 | 15350 |
| 3441 | 4130 |
| 3442 | 4395 |
| 3443 | 13983 |
| 3444 | 14027 |
| 3445 | 14999 |
| 3446 | 4342 |
| 3447 | 4029 |
| 3448 | 14252 |
| 3449 | 4781 |
| 3450 | 13982 |
| 3451 | 14263 |
| 3452 | 15403 |
| 3453 | 3952 |
| 3454 | 14764 |
| 3455 | 14252 |
| 3456 | 14764 |
| 3457 | 3964 |
| 3458 | 14921 |
| 3459 | 15403 |
| 3460 | 14252 |
| 3461 | 15350 |
| 3462 | 4029 |
| 3463 | 14252 |
| 3464 | 4781 |
| 3465 | 4029 |
| 3466 | 13982 |
| 3467 | 13982 |
| 3468 | 14974 |
| 3469 | 4781 |
| 3470 | 14999 |
| 3471 | 4130 |
| 3472 | 15403 |
| 3473 | 14027 |
| 3474 | 14999 |
| 3475 | 4781 |
| 3476 | 14252 |
| 3477 | 4782 |
| 3478 | 15385 |
| 3479 | 15395 |
| 3480 | 14764 |
| 3481 | 4121 |
| 3482 | 14921 |
| 3483 | 3574 |
| 3484 | 13981 |
| 3485 | 15356 |
| 3486 | 14764 |
| 3487 | 15390 |
| 3488 | 14999 |
| 3489 | 15395 |
| 3490 | 4342 |
| 3491 | 14921 |
| 3492 | 14764 |
| 3493 | 4130 |
| 3494 | 14253 |
| 3495 | 14252 |
| 3496 | 15385 |
| 3497 | 14999 |
| 3498 | 4781 |
| 3499 | 15385 |
| 3500 | 14252 |
| 3501 | 13982 |
| 3502 | 4029 |
| 3503 | 3574 |
| 3504 | 14764 |
| 3505 | 14252 |
| 3506 | 14250 |
| 3507 | 4121 |
| 3508 | 4781 |
| 3509 | 3964 |
| 3510 | 14253 |
| 3511 | 4121 |
| 3512 | 15403 |
| 3513 | 3940 |
| 3514 | 14252 |
| 3515 | 14252 |
| 3516 | 14999 |
| 3517 | 4394 |
| 3518 | 13983 |
| 3519 | 14252 |
| 3520 | 14764 |
| 3521 | 8767 |
| 3522 | 14252 |
| 3523 | 3574 |
| 3524 | 13981 |
| 3525 | 14253 |
| 3526 | 14999 |
| 3527 | 14999 |
| 3528 | 14764 |
| 3529 | 13981 |
| 3530 | 15395 |
| 3531 | 4782 |
| 3532 | 14027 |
| 3533 | 4342 |
| 3534 | 4781 |
| 3535 | 14974 |
| 3536 | 4342 |
| 3537 | 4781 |
| 3538 | 3940 |
| 3539 | 14999 |
| 3540 | 5184 |
| 3541 | 14999 |
| 3542 | 4781 |
| 3543 | 14027 |
| 3544 | 14252 |
| 3545 | 4394 |
| 3546 | 4029 |
| 3547 | 14974 |
| 3548 | 15403 |
| 3549 | 14252 |
| 3550 | 14252 |
| 3551 | 4767 |
| 3552 | 4767 |
| 3553 | 8767 |
| 3554 | 14999 |
| 3555 | 4781 |
| 3556 | 4121 |
| 3557 | 4767 |
| 3558 | 14999 |
| 3559 | 8767 |
| 3560 | 15390 |
| 3561 | 3926 |
| 3562 | 14263 |
| 3563 | 3574 |
| 3564 | 14027 |
| 3565 | 14999 |
| 3566 | 14999 |
| 3567 | 4121 |
| 3568 | 4121 |
| 3569 | 4781 |
| 3570 | 15350 |
| 3571 | 4767 |
| 3572 | 4395 |
| 3573 | 3940 |
| 3574 | 14263 |
| 3575 | 14899 |
| 3576 | 14764 |
| 3577 | 14764 |
| 3578 | 4781 |
| 3579 | 4782 |
| 3580 | 3964 |
| 3581 | 14027 |
| 3582 | 3964 |
| 3583 | 14932 |
| 3584 | 14921 |
| 3585 | 14020 |
| 3586 | 14921 |
| 3587 | 14250 |
| 3588 | 14899 |
| 3589 | 4781 |
| 3590 | 14921 |
| 3591 | 14937 |
| 3592 | 3940 |
| 3593 | 15385 |
| 3594 | 14253 |
| 3595 | 3926 |
| 3596 | 14027 |
| 3597 | 3574 |
| 3598 | 15403 |
| 3599 | 14253 |
| 3600 | 14253 |
| 3601 | 8767 |
| 3602 | 14899 |
| 3603 | 4342 |
| 3604 | 4029 |
| 3605 | 14764 |
| 3606 | 15403 |
| 3607 | 13981 |
| 3608 | 14252 |
| 3609 | 4781 |
| 3610 | 4781 |
| 3611 | 15403 |
| 3612 | 3964 |
| 3613 | 14861 |
| 3614 | 14937 |
| 3615 | 14027 |
| 3616 | 4781 |
| 3617 | 14764 |
| 3618 | 15385 |
| 3619 | 15385 |
| 3620 | 14252 |
| 3621 | 14253 |
| 3622 | 14027 |
| 3623 | 3952 |
| 3624 | 4767 |
| 3625 | 14999 |
| 3626 | 5184 |
| 3627 | 4767 |
| 3628 | 14974 |
| 3629 | 14027 |
| 3630 | 14764 |
| 3631 | 14764 |
| 3632 | 14974 |
| 3633 | 5184 |
| 3634 | 3964 |
| 3635 | 15356 |
| 3636 | 4767 |
| 3637 | 14263 |
| 3638 | 15395 |
| 3639 | 4781 |
| 3640 | 14027 |
| 3641 | 14764 |
| 3642 | 4029 |
| 3643 | 3940 |
| 3644 | 4342 |
| 3645 | 4767 |
| 3646 | 3574 |
| 3647 | 4121 |
| 3648 | 4781 |
| 3649 | 4342 |
| 3650 | 14999 |
| 3651 | 14020 |
| 3652 | 14937 |
| 3653 | 4029 |
| 3654 | 4781 |
| 3655 | 3964 |
| 3656 | 13981 |
| 3657 | 14999 |
| 3658 | 14764 |
| 3659 | 14899 |
| 3660 | 4029 |
| 3661 | 14252 |
| 3662 | 4342 |
| 3663 | 14027 |
| 3664 | 15356 |
| 3665 | 4781 |
| 3666 | 14861 |
| 3667 | 14253 |
| 3668 | 15390 |
| 3669 | 4029 |
| 3670 | 13981 |
| 3671 | 14253 |
| 3672 | 14937 |
| 3673 | 13981 |
| 3674 | 14999 |
| 3675 | 15385 |
| 3676 | 14252 |
| 3677 | 3940 |
| 3678 | 4394 |
| 3679 | 4342 |
| 3680 | 4342 |
| 3681 | 14263 |
| 3682 | 14974 |
| 3683 | 13981 |
| 3684 | 13983 |
| 3685 | 15350 |
| 3686 | 4342 |
| 3687 | 14899 |
| 3688 | 4130 |
| 3689 | 4342 |
| 3690 | 14937 |
| 3691 | 14999 |
| 3692 | 15350 |
| 3693 | 3940 |
| 3694 | 4767 |
| 3695 | 14921 |
| 3696 | 3940 |
| 3697 | 4394 |
| 3698 | 13983 |
| 3699 | 4029 |
| 3700 | 4130 |
| 3701 | 14999 |
| 3702 | 3926 |
| 3703 | 4767 |
| 3704 | 14027 |
| 3705 | 13981 |
| 3706 | 4029 |
| 3707 | 3940 |
| 3708 | 14252 |
| 3709 | 14764 |
| 3710 | 3574 |
| 3711 | 3940 |
| 3712 | 4342 |
| 3713 | 4767 |
| 3714 | 14764 |
| 3715 | 4029 |
| 3716 | 14764 |
| 3717 | 14764 |
| 3718 | 3574 |
| 3719 | 14252 |
| 3720 | 15390 |
| 3721 | 4781 |
| 3722 | 15403 |
| 3723 | 13981 |
| 3724 | 4781 |
| 3725 | 5184 |
| 3726 | 15385 |
| 3727 | 15403 |
| 3728 | 4029 |
| 3729 | 4767 |
| 3730 | 14764 |
| 3731 | 14937 |
| 3732 | 14932 |
| 3733 | 4781 |
| 3734 | 14252 |
| 3735 | 14899 |
| 3736 | 4130 |
| 3737 | 4781 |
| 3738 | 14899 |
| 3739 | 4767 |
| 3740 | 4342 |
| 3741 | 14027 |
| 3742 | 4029 |
| 3743 | 14764 |
| 3744 | 14250 |
| 3745 | 14899 |
| 3746 | 14250 |
| 3747 | 14999 |
| 3748 | 4767 |
| 3749 | 3964 |
| 3750 | 4121 |
| 3751 | 15390 |
| 3752 | 14764 |
| 3753 | 3926 |
| 3754 | 14027 |
| 3755 | 8767 |
| 3756 | 4130 |
| 3757 | 15395 |
| 3758 | 14252 |
| 3759 | 4781 |
| 3760 | 14921 |
| 3761 | 15385 |
| 3762 | 3964 |
| 3763 | 4781 |
| 3764 | 14764 |
| 3765 | 13981 |
| 3766 | 4767 |
| 3767 | 14921 |
| 3768 | 14899 |
| 3769 | 4781 |
| 3770 | 15356 |
| 3771 | 14937 |
| 3772 | 3574 |
| 3773 | 15390 |
| 3774 | 14999 |
| 3775 | 14252 |
| 3776 | 4394 |
| 3777 | 15403 |
| 3778 | 13981 |
| 3779 | 14974 |
| 3780 | 15356 |
| 3781 | 13981 |
| 3782 | 14999 |
| 3783 | 14252 |
| 3784 | 4029 |
| 3785 | 15403 |
| 3786 | 13981 |
| 3787 | 3940 |
| 3788 | 14252 |
| 3789 | 14764 |
| 3790 | 14932 |
| 3791 | 14252 |
| 3792 | 15403 |
| 3793 | 13981 |
| 3794 | 4342 |
| 3795 | 4130 |
| 3796 | 14252 |
| 3797 | 5184 |
| 3798 | 13981 |
| 3799 | 4121 |
| 3800 | 3952 |
| 3801 | 3574 |
| 3802 | 15350 |
| 3803 | 3574 |
| 3804 | 14999 |
| 3805 | 14253 |
| 3806 | 14027 |
| 3807 | 3952 |
| 3808 | 15385 |
| 3809 | 4342 |
| 3810 | 4342 |
| 3811 | 4029 |
| 3812 | 14899 |
| 3813 | 14921 |
| 3814 | 14932 |
| 3815 | 4767 |
| 3816 | 4781 |
| 3817 | 15350 |
| 3818 | 3964 |
| 3819 | 15403 |
| 3820 | 4029 |
| 3821 | 14999 |
| 3822 | 4781 |
| 3823 | 14899 |
| 3824 | 14027 |
| 3825 | 14937 |
| 3826 | 14764 |
| 3827 | 4767 |
| 3828 | 14253 |
| 3829 | 4781 |
| 3830 | 14252 |
| 3831 | 4781 |
| 3832 | 14253 |
| 3833 | 14027 |
| 3834 | 4121 |
| 3835 | 3574 |
| 3836 | 15395 |
| 3837 | 14252 |
| 3838 | 14921 |
| 3839 | 14250 |
| 3840 | 14027 |
| 3841 | 14250 |
| 3842 | 4781 |
| 3843 | 15350 |
| 3844 | 4121 |
| 3845 | 3964 |
| 3846 | 14861 |
| 3847 | 15356 |
| 3848 | 3574 |
| 3849 | 14252 |
| 3850 | 3964 |
| 3851 | 14253 |
| 3852 | 3940 |
| 3853 | 14252 |
| 3854 | 13981 |
| 3855 | 14764 |
| 3856 | 14974 |
| 3857 | 14253 |
| 3858 | 4121 |
| 3859 | 15403 |
| 3860 | 4130 |
| 3861 | 15385 |
| 3862 | 14764 |
| 3863 | 3952 |
| 3864 | 4767 |
| 3865 | 14764 |
| 3866 | 14253 |
| 3867 | 14932 |
| 3868 | 3574 |
| 3869 | 14861 |
| 3870 | 4029 |
| 3871 | 3964 |
| 3872 | 14252 |
| 3873 | 4130 |
| 3874 | 4029 |
| 3875 | 4342 |
| 3876 | 14932 |
| 3877 | 14764 |
| 3878 | 4781 |
| 3879 | 13981 |
| 3880 | 4130 |
| 3881 | 3926 |
| 3882 | 15350 |
| 3883 | 4394 |
| 3884 | 4130 |
| 3885 | 13981 |
| 3886 | 15390 |
| 3887 | 4029 |
| 3888 | 14250 |
| 3889 | 4029 |
| 3890 | 3952 |
| 3891 | 4394 |
| 3892 | 4782 |
| 3893 | 4029 |
| 3894 | 14932 |
| 3895 | 14899 |
| 3896 | 14932 |
| 3897 | 4767 |
| 3898 | 14921 |
| 3899 | 14999 |
| 3900 | 4781 |
| 3901 | 4029 |
| 3902 | 14937 |
| 3903 | 14250 |
| 3904 | 3964 |
| 3905 | 14764 |
| 3906 | 4029 |
| 3907 | 3926 |
| 3908 | 15350 |
| 3909 | 14252 |
| 3910 | 15385 |
| 3911 | 15403 |
| 3912 | 13981 |
| 3913 | 14252 |
| 3914 | 14999 |
| 3915 | 4342 |
| 3916 | 14921 |
| 3917 | 14999 |
| 3918 | 4121 |
| 3919 | 14974 |
| 3920 | 14974 |
| 3921 | 14250 |
| 3922 | 14252 |
| 3923 | 14861 |
| 3924 | 15403 |
| 3925 | 14253 |
| 3926 | 14764 |
| 3927 | 14253 |
| 3928 | 15350 |
| 3929 | 4029 |
| 3930 | 13981 |
| 3931 | 15356 |
| 3932 | 4130 |
| 3933 | 3940 |
| 3934 | 4781 |
| 3935 | 13981 |
| 3936 | 14252 |
| 3937 | 13981 |
| 3938 | 14999 |
| 3939 | 4781 |
| 3940 | 14999 |
| 3941 | 14999 |
| 3942 | 14252 |
| 3943 | 4130 |
| 3944 | 15356 |
| 3945 | 4767 |
| 3946 | 14974 |
| 3947 | 14999 |
| 3948 | 14937 |
| 3949 | 4782 |
| 3950 | 4781 |
| 3951 | 15385 |
| 3952 | 14899 |
| 3953 | 13981 |
| 3954 | 4781 |
| 3955 | 14999 |
| 3956 | 4029 |
| 3957 | 4121 |
| 3958 | 4342 |
| 3959 | 14899 |
| 3960 | 14253 |
| 3961 | 4781 |
| 3962 | 14974 |
| 3963 | 14999 |
| 3964 | 4781 |
| 3965 | 14252 |
| 3966 | 14999 |
| 3967 | 4767 |
| 3968 | 14937 |
| 3969 | 15390 |
| 3970 | 14921 |
| 3971 | 3940 |
| 3972 | 14932 |
| 3973 | 14974 |
| 3974 | 14999 |
| 3975 | 4121 |
| 3976 | 14932 |
| 3977 | 4394 |
| 3978 | 3964 |
| 3979 | 14252 |
| 3980 | 14027 |
| 3981 | 4029 |
| 3982 | 4781 |
| 3983 | 4395 |
| 3984 | 15350 |
| 3985 | 14764 |
| 3986 | 14932 |
| 3987 | 14999 |
| 3988 | 3940 |
| 3989 | 14999 |
| 3990 | 14252 |
| 3991 | 14764 |
| 3992 | 8767 |
| 3993 | 13981 |
| 3994 | 14999 |
| 3995 | 14252 |
| 3996 | 14899 |
| 3997 | 14921 |
| 3998 | 4394 |
| 3999 | 14999 |
| 4000 | 14253 |
| 4001 | 3964 |
| 4002 | 14250 |
| 4003 | 15390 |
| 4004 | 4781 |
| 4005 | 4029 |
| 4006 | 14999 |
| 4007 | 4782 |
| 4008 | 14020 |
| 4009 | 14999 |
| 4010 | 4130 |
| 4011 | 4029 |
| 4012 | 3964 |
| 4013 | 3940 |
| 4014 | 15350 |
| 4015 | 14764 |
| 4016 | 4342 |
| 4017 | 4395 |
| 4018 | 13981 |
| 4019 | 14764 |
| 4020 | 15350 |
| 4021 | 3940 |
| 4022 | 14764 |
| 4023 | 3926 |
| 4024 | 14250 |
| 4025 | 15390 |
| 4026 | 15403 |
| 4027 | 13981 |
| 4028 | 4782 |
| 4029 | 4029 |
| 4030 | 14921 |
| 4031 | 14253 |
| 4032 | 14899 |
| 4033 | 13981 |
| 4034 | 14921 |
| 4035 | 4394 |
| 4036 | 14020 |
| 4037 | 14253 |
| 4038 | 14999 |
| 4039 | 4395 |
| 4040 | 3964 |
| 4041 | 8767 |
| 4042 | 14250 |
| 4043 | 15403 |
| 4044 | 14861 |
| 4045 | 4395 |
| 4046 | 14932 |
| 4047 | 3574 |
| 4048 | 14974 |
| 4049 | 15395 |
| 4050 | 3574 |
| 4051 | 4029 |
| 4052 | 14027 |
| 4053 | 4342 |
| 4054 | 4781 |
| 4055 | 14764 |
| 4056 | 14921 |
| 4057 | 15403 |
| 4058 | 4781 |
| 4059 | 4782 |
| 4060 | 14250 |
| 4061 | 4342 |
| 4062 | 3574 |
| 4063 | 4767 |
| 4064 | 15403 |
| 4065 | 3574 |
| 4066 | 15350 |
| 4067 | 3926 |
| 4068 | 14999 |
| 4069 | 15403 |
| 4070 | 14999 |
| 4071 | 14999 |
| 4072 | 15350 |
| 4073 | 4394 |
| 4074 | 15403 |
| 4075 | 4029 |
| 4076 | 4029 |
| 4077 | 14974 |
| 4078 | 14252 |
| 4079 | 14020 |
| 4080 | 14937 |
| 4081 | 15395 |
| 4082 | 14974 |
| 4083 | 14921 |
| 4084 | 4130 |
| 4085 | 15403 |
| 4086 | 4029 |
| 4087 | 4342 |
| 4088 | 3940 |
| 4089 | 14921 |
| 4090 | 14250 |
| 4091 | 14974 |
| 4092 | 4029 |
| 4093 | 14252 |
| 4094 | 14764 |
| 4095 | 4767 |
| 4096 | 15403 |
| 4097 | 4781 |
| 4098 | 4342 |
| 4099 | 3964 |
| 4100 | 15390 |
| 4101 | 14999 |
| 4102 | 4394 |
| 4103 | 14999 |
| 4104 | 13983 |
| 4105 | 4394 |
| 4106 | 14764 |
| 4107 | 14899 |
| 4108 | 14999 |
| 4109 | 14999 |
| 4110 | 4130 |
| 4111 | 14252 |
| 4112 | 13981 |
| 4113 | 4121 |
| 4114 | 15385 |
| 4115 | 15395 |
| 4116 | 14250 |
| 4117 | 3940 |
| 4118 | 14252 |
| 4119 | 4029 |
| 4120 | 14921 |
| 4121 | 14932 |
| 4122 | 15350 |
| 4123 | 4130 |
| 4124 | 14764 |
| 4125 | 14999 |
| 4126 | 3574 |
| 4127 | 15350 |
| 4128 | 4767 |
| 4129 | 14027 |
| 4130 | 14932 |
| 4131 | 13981 |
| 4132 | 14253 |
| 4133 | 14937 |
| 4134 | 14899 |
| 4135 | 14899 |
| 4136 | 13981 |
| 4137 | 14999 |
| 4138 | 4342 |
| 4139 | 14253 |
| 4140 | 4781 |
| 4141 | 14764 |
| 4142 | 14999 |
| 4143 | 15350 |
| 4144 | 14027 |
| 4145 | 8767 |
| 4146 | 14027 |
| 4147 | 3964 |
| 4148 | 3574 |
| 4149 | 14252 |
| 4150 | 3964 |
| 4151 | 4342 |
| 4152 | 4029 |
| 4153 | 15350 |
| 4154 | 3574 |
| 4155 | 14974 |
| 4156 | 4781 |
| 4157 | 14764 |
| 4158 | 4342 |
| 4159 | 14253 |
| 4160 | 4782 |
| 4161 | 14764 |
| 4162 | 13981 |
| 4163 | 4342 |
| 4164 | 15350 |
| 4165 | 15403 |
| 4166 | 14999 |
| 4167 | 14764 |
| 4168 | 3940 |
| 4169 | 14253 |
| 4170 | 13981 |
| 4171 | 13983 |
| 4172 | 4029 |
| 4173 | 4029 |
| 4174 | 14921 |
| 4175 | 4029 |
| 4176 | 4767 |
| 4177 | 14253 |
| 4178 | 14764 |
| 4179 | 14252 |
| 4180 | 13982 |
| 4181 | 4767 |
| 4182 | 4342 |
| 4183 | 14999 |
| 4184 | 4781 |
| 4185 | 14027 |
| 4186 | 15385 |
| 4187 | 4395 |
| 4188 | 4029 |
| 4189 | 15356 |
| 4190 | 14921 |
| 4191 | 13983 |
| 4192 | 14252 |
| 4193 | 3940 |
| 4194 | 4121 |
| 4195 | 14899 |
| 4196 | 4121 |
| 4197 | 4342 |
| 4198 | 4121 |
| 4199 | 15350 |
| 4200 | 14250 |
| 4201 | 14764 |
| 4202 | 4029 |
| 4203 | 14253 |
| 4204 | 14999 |
| 4205 | 3952 |
| 4206 | 4029 |
| 4207 | 14921 |
| 4208 | 14764 |
| 4209 | 4029 |
| 4210 | 4029 |
| 4211 | 14250 |
| 4212 | 15403 |
| 4213 | 13983 |
| 4214 | 14999 |
| 4215 | 4782 |
| 4216 | 14252 |
| 4217 | 14764 |
| 4218 | 15385 |
| 4219 | 14937 |
| 4220 | 14974 |
| 4221 | 14999 |
| 4222 | 14764 |
| 4223 | 3952 |
| 4224 | 3964 |
| 4225 | 4781 |
| 4226 | 14921 |
| 4227 | 3940 |
| 4228 | 14764 |
| 4229 | 14027 |
| 4230 | 4781 |
| 4231 | 14937 |
| 4232 | 14764 |
| 4233 | 14027 |
| 4234 | 3926 |
| 4235 | 14921 |
| 4236 | 4781 |
| 4237 | 14921 |
| 4238 | 4781 |
| 4239 | 14999 |
| 4240 | 3952 |
| 4241 | 13981 |
| 4242 | 14932 |
| 4243 | 4394 |
| 4244 | 14027 |
| 4245 | 4781 |
| 4246 | 15395 |
| 4247 | 14921 |
| 4248 | 14252 |
| 4249 | 14764 |
| 4250 | 3574 |
| 4251 | 14027 |
| 4252 | 14764 |
| 4253 | 14253 |
| 4254 | 14899 |
| 4255 | 14263 |
| 4256 | 14932 |
| 4257 | 3952 |
| 4258 | 14899 |
| 4259 | 14263 |
| 4260 | 14921 |
| 4261 | 4781 |
| 4262 | 4121 |
| 4263 | 13981 |
| 4264 | 14999 |
| 4265 | 14999 |
| 4266 | 4781 |
| 4267 | 3926 |
| 4268 | 15403 |
| 4269 | 14253 |
| 4270 | 13981 |
| 4271 | 3940 |
| 4272 | 14252 |
| 4273 | 14999 |
| 4274 | 3574 |
| 4275 | 14252 |
| 4276 | 15385 |
| 4277 | 4029 |
| 4278 | 4029 |
| 4279 | 15395 |
| 4280 | 15350 |
| 4281 | 14764 |
| 4282 | 13981 |
| 4283 | 14253 |
| 4284 | 4342 |
| 4285 | 14921 |
| 4286 | 4029 |
| 4287 | 4121 |
| 4288 | 3574 |
| 4289 | 4782 |
| 4290 | 14764 |
| 4291 | 14027 |
| 4292 | 4394 |
| 4293 | 14899 |
| 4294 | 4394 |
| 4295 | 15385 |
| 4296 | 3952 |
| 4297 | 4767 |
| 4298 | 4342 |
| 4299 | 14921 |
| 4300 | 15385 |
| 4301 | 4342 |
| 4302 | 14921 |
| 4303 | 3574 |
| 4304 | 4394 |
| 4305 | 15403 |
| 4306 | 14020 |
| 4307 | 14250 |
| 4308 | 4342 |
| 4309 | 4029 |
| 4310 | 14921 |
| 4311 | 4029 |
| 4312 | 15403 |
| 4313 | 14253 |
| 4314 | 14921 |
| 4315 | 4029 |
| 4316 | 8767 |
| 4317 | 4394 |
| 4318 | 14252 |
| 4319 | 14899 |
| 4320 | 14764 |
| 4321 | 14899 |
| 4322 | 14999 |
| 4323 | 4781 |
| 4324 | 14999 |
| 4325 | 14999 |
| 4326 | 4342 |
| 4327 | 4029 |
| 4328 | 15395 |
| 4329 | 4781 |
| 4330 | 13982 |
| 4331 | 4130 |
| 4332 | 4121 |
| 4333 | 14921 |
| 4334 | 14999 |
| 4335 | 14250 |
| 4336 | 14250 |
| 4337 | 3952 |
| 4338 | 3952 |
| 4339 | 4130 |
| 4340 | 13983 |
| 4341 | 3574 |
| 4342 | 14999 |
| 4343 | 15350 |
| 4344 | 14252 |
| 4345 | 5184 |
| 4346 | 14999 |
| 4347 | 14899 |
| 4348 | 4130 |
| 4349 | 13981 |
| 4350 | 14937 |
| 4351 | 3574 |
| 4352 | 15403 |
| 4353 | 14764 |
| 4354 | 14252 |
| 4355 | 14974 |
| 4356 | 4394 |
| 4357 | 4342 |
| 4358 | 4029 |
| 4359 | 14921 |
| 4360 | 4121 |
| 4361 | 15403 |
| 4362 | 14932 |
| 4363 | 4782 |
| 4364 | 15390 |
| 4365 | 4767 |
| 4366 | 4767 |
| 4367 | 14764 |
| 4368 | 14974 |
| 4369 | 14899 |
| 4370 | 14974 |
| 4371 | 4029 |
| 4372 | 3926 |
| 4373 | 14921 |
| 4374 | 4342 |
| 4375 | 3964 |
| 4376 | 15403 |
| 4377 | 3574 |
| 4378 | 15390 |
| 4379 | 3574 |
| 4380 | 4029 |
| 4381 | 4767 |
| 4382 | 15385 |
| 4383 | 4782 |
| 4384 | 14999 |
| 4385 | 14253 |
| 4386 | 4029 |
| 4387 | 3952 |
| 4388 | 4121 |
| 4389 | 4767 |
| 4390 | 15385 |
| 4391 | 15403 |
| 4392 | 14974 |
| 4393 | 14764 |
| 4394 | 4782 |
| 4395 | 13983 |
| 4396 | 14937 |
| 4397 | 4342 |
| 4398 | 14899 |
| 4399 | 4029 |
| 4400 | 14921 |
| 4401 | 3574 |
| 4402 | 14252 |
| 4403 | 13982 |
| 4404 | 3964 |
| 4405 | 15385 |
| 4406 | 14250 |
| 4407 | 14937 |
| 4408 | 4781 |
| 4409 | 14764 |
| 4410 | 4029 |
| 4411 | 14252 |
| 4412 | 4767 |
| 4413 | 15395 |
| 4414 | 14921 |
| 4415 | 14974 |
| 4416 | 14252 |
| 4417 | 13981 |
| 4418 | 14252 |
| 4419 | 4342 |
| 4420 | 14764 |
| 4421 | 14921 |
| 4422 | 14250 |
| 4423 | 14932 |
| 4424 | 15403 |
| 4425 | 14252 |
| 4426 | 14764 |
| 4427 | 3574 |
| 4428 | 4781 |
| 4429 | 3940 |
| 4430 | 15350 |
| 4431 | 4395 |
| 4432 | 4029 |
| 4433 | 15390 |
| 4434 | 4130 |
| 4435 | 4029 |
| 4436 | 13981 |
| 4437 | 3574 |
| 4438 | 4342 |
| 4439 | 15403 |
| 4440 | 14253 |
| 4441 | 14027 |
| 4442 | 14937 |
| 4443 | 15403 |
| 4444 | 13981 |
| 4445 | 4394 |
| 4446 | 4782 |
| 4447 | 14263 |
| 4448 | 3964 |
| 4449 | 4029 |
| 4450 | 13981 |
| 4451 | 3964 |
| 4452 | 3574 |
| 4453 | 14764 |
| 4454 | 14252 |
| 4455 | 4781 |
| 4456 | 4781 |
| 4457 | 14764 |
| 4458 | 4395 |
| 4459 | 14999 |
| 4460 | 14999 |
| 4461 | 14999 |
| 4462 | 15385 |
| 4463 | 4395 |
| 4464 | 14999 |
| 4465 | 4029 |
| 4466 | 14899 |
| 4467 | 15403 |
| 4468 | 14899 |
| 4469 | 4394 |
| 4470 | 4342 |
| 4471 | 14921 |
| 4472 | 14974 |
| 4473 | 4781 |
| 4474 | 14999 |
| 4475 | 14999 |
| 4476 | 14764 |
| 4477 | 4342 |
| 4478 | 14921 |
| 4479 | 14999 |
| 4480 | 4394 |
| 4481 | 13983 |
| 4482 | 15350 |
| 4483 | 3952 |
| 4484 | 4130 |
| 4485 | 4781 |
| 4486 | 15403 |
| 4487 | 14252 |
| 4488 | 4130 |
| 4489 | 14999 |
| 4490 | 4029 |
| 4491 | 14921 |
| 4492 | 14999 |
| 4493 | 14999 |
| 4494 | 14974 |
| 4495 | 15403 |
| 4496 | 13981 |
| 4497 | 15403 |
| 4498 | 14921 |
| 4499 | 14263 |
| 4500 | 14253 |
| 4501 | 14974 |
| 4502 | 15356 |
| 4503 | 4029 |
| 4504 | 14999 |
| 4505 | 14932 |
| 4506 | 15385 |
| 4507 | 15403 |
| 4508 | 14861 |
| 4509 | 14252 |
| 4510 | 14999 |
| 4511 | 4029 |
| 4512 | 4342 |
| 4513 | 13981 |
| 4514 | 14999 |
| 4515 | 15350 |
| 4516 | 15403 |
| 4517 | 14974 |
| 4518 | 14027 |
| 4519 | 4767 |
| 4520 | 14899 |
| 4521 | 14921 |
| 4522 | 4342 |
| 4523 | 15390 |
| 4524 | 14999 |
| 4525 | 14932 |
| 4526 | 14252 |
| 4527 | 14764 |
| 4528 | 4342 |
| 4529 | 15390 |
| 4530 | 14921 |
| 4531 | 4029 |
| 4532 | 13981 |
| 4533 | 4029 |
| 4534 | 14921 |
| 4535 | 14252 |
| 4536 | 4394 |
| 4537 | 4130 |
| 4538 | 14999 |
| 4539 | 14921 |
| 4540 | 15385 |
| 4541 | 14921 |
| 4542 | 14974 |
| 4543 | 3926 |
| 4544 | 3574 |
| 4545 | 4767 |
| 4546 | 15356 |
| 4547 | 15403 |
| 4548 | 14899 |
| 4549 | 14764 |
| 4550 | 14999 |
| 4551 | 14921 |
| 4552 | 14252 |
| 4553 | 15356 |
| 4554 | 14899 |
| 4555 | 14861 |
| 4556 | 15350 |
| 4557 | 14899 |
| 4558 | 15403 |
| 4559 | 3940 |
| 4560 | 4781 |
| 4561 | 4121 |
| 4562 | 3574 |
| 4563 | 15403 |
| 4564 | 14932 |
| 4565 | 4342 |
| 4566 | 15350 |
| 4567 | 3964 |
| 4568 | 14253 |
| 4569 | 3574 |
| 4570 | 14250 |
| 4571 | 14020 |
| 4572 | 13981 |
| 4573 | 4394 |
| 4574 | 15390 |
| 4575 | 3574 |
| 4576 | 8767 |
| 4577 | 4781 |
| 4578 | 14999 |
| 4579 | 14253 |
| 4580 | 4029 |
| 4581 | 15403 |
| 4582 | 14764 |
| 4583 | 14999 |
| 4584 | 14027 |
| 4585 | 14252 |
| 4586 | 4394 |
| 4587 | 14252 |
| 4588 | 14999 |
| 4589 | 4767 |
| 4590 | 14253 |
| 4591 | 14921 |
| 4592 | 14253 |
| 4593 | 14764 |
| 4594 | 14974 |
| 4595 | 14252 |
| 4596 | 4342 |
| 4597 | 14764 |
| 4598 | 14764 |
| 4599 | 14974 |
| 4600 | 4029 |
| 4601 | 14921 |
| 4602 | 14999 |
| 4603 | 13981 |
| 4604 | 14921 |
| 4605 | 15356 |
| 4606 | 4121 |
| 4607 | 15390 |
| 4608 | 14921 |
| 4609 | 14253 |
| 4610 | 4342 |
| 4611 | 15390 |
| 4612 | 3964 |
| 4613 | 14253 |
| 4614 | 14899 |
| 4615 | 4029 |
| 4616 | 4781 |
| 4617 | 15350 |
| 4618 | 13981 |
| 4619 | 3574 |
| 4620 | 15385 |
| 4621 | 3964 |
| 4622 | 14932 |
| 4623 | 14932 |
| 4624 | 14974 |
| 4625 | 3964 |
| 4626 | 4342 |
| 4627 | 14921 |
| 4628 | 3964 |

[0437] Although the invention has been described in conjunction with specific embodiments thereof, it is evident that many alternatives, modifications and variations will be apparent to those skilled in the art. Accordingly, it is intended to embrace all such alternatives, modifications and variations that fall within the spirit and broad scope of the appended claims.

[0438] All publications, patents and patent applications mentioned in this specification are herein incorporated in their entirety by reference into the specification, to the same extent as if each individual publication, patent or patent application was specifically and individually indicated to be incorporated herein by reference. In addition, citation or identification of any reference in this application shall not be construed as an admission that such reference is available as prior art to the present invention. To the extent that section headings are used, they should not be construed as necessarily limiting.

[0439] In addition, any priority document(s) of this application is/are hereby incorporated herein by reference in its/their entirety.

### REFERENCES

[0440] 1. Psychogios, N. et al. The human serum metabolome. PLoS ONE 6, e16957 (2011).
[0441] 2. Ridker, P. M., Stampfer, M. J. & Rifai, N. Novel risk factors for systemic atherosclerosis. JAMA 285, 2481 (2001).
[0442] 3. Baigent, C. et al. Efficacy and safety of cholesterol-lowering treatment: prospective meta-analysis of data from 90,056 participants in 14 randomised trials of statins. Lancet 366, 1267-1278 (2005).
[0443] 4. National Diabetes Statistics Report|Data & Statistics|Diabetes|CDC. at <www(dot)cdc(dot)gov/diabetes/data/statistics/statistics-report.html>
[0444] 5. Floegel, A. et al. Identification of serum metabolites associated with risk of type 2 diabetes using a targeted metabolomic approach. Diabetes 62, 639-648 (2013).
[0445] 6. Shin, S.-Y. et al. An atlas of genetic influences on human blood metabolites. Nat. Genet. 46, 543-550 (2014).
[0446] 7. Long, T. et al. Whole-genome sequencing identifies common-to-rare variants associated with human blood metabolites. Nat. Genet. 49, 568-578 (2017).
[0447] 8. Wikoff, W. R. et al. Metabolomics analysis reveals large effects of gut microflora on mammalian blood metabolites. Proc Natl Acad Sci USA 106, 3698-3703 (2009).
[0448] 9. Fischbach, M. A. Microbiome: focus on causation and mechanism. Cell 174, 785-790 (2018).
[0449] 10. Liu, R. et al. Gut microbiome and serum metabolome alterations in obesity and after weight-loss intervention. Nat. Med. 23, 859-868 (2017).
[0450] 11. Fujisaka, S. et al. Diet, genetics, and the gut microbiome drive dynamic changes in plasma metabolites. Cell Rep. 22, 3072-3086 (2018).
[0451] 12. Wilson, M. Microbial Inhabitants of Humans: Their ecology and role in health and disease. (Cambridge University Press, 2004). doi:10.1017/CB09780511735080
[0452] 13. Topping, D. L. Short-chain fatty acids produced by intestinal bacteria. Asia Pac. J. Clin. Nutr. 5, 15-19 (1996).
[0453] 14. Pedersen, H. K. et al. Human gut microbes impact host serum metabolome and insulin sensitivity. Nature 535, 376-381 (2016).
[0454] 15. Patel, K. P., Luo, F. J.-G., Plummer, N. S., Hostetter, T. H. & Meyer, T. W. The production of p-cresol sulfate and indoxyl sulfate in vegetarians versus omnivores. Clin. J. Am. Soc. Nephrol. 7, 982-988 (2012).
[0455] 16. Tang, W. H. W. et al. Intestinal microbial metabolism of phosphatidylcholine and cardiovascular risk. N. Engl. J. Med. 368, 1575-1584 (2013).
[0456] 17. Li, X. S. et al. Gut microbiota-dependent trimethylamine N-oxide in acute coronary syndromes: a prognostic marker for incident cardiovascular events beyond traditional risk factors. Eur. Heart J. 38, 814-824 (2017).
[0457] 18. Koeth, R. A. et al. Intestinal microbiota metabolism of L-carnitine, a nutrient in red meat, promotes atherosclerosis. Nat. Med. 19, 576-585 (2013).
[0458] 19. Brown, J. M. & Hazen, S. L. Metaorganismal nutrient metabolism as a basis of cardiovascular disease. Curr. Opin. Lipidol. 25, 48-53 (2014).
[0459] 20. Zhu, W. et al. Gut microbial metabolite TMAO enhances platelet hyperreactivity and thrombosis risk. Cell 165, 111-124 (2016).
[0460] 21. Floegel, A. et al. Variation of serum metabolites related to habitual diet: a targeted metabolomic approach in EPIC-Potsdam. Eur. J. Clin. Nutr. 67, 1100-1108 (2013).
[0461] 22. Thorburn, A. N., Macia, L. & Mackay, C. R. Diet, metabolites, and “western-lifestyle” inflammatory diseases. Immunity 40, 833-842 (2014).
[0462] 23. Playdon, M. C. et al. Comparing metabolite profiles of habitual diet in serum and urine. Am. J. Clin. Nutr. 104, 776-789 (2016).
[0463] 24. Xu, T. et al. Effects of smoking and smoking cessation on human serum metabolite profile: results from the KORA cohort study. BMC Med. 11, 60 (2013).
[0464] 25. Zeevi, D. et al. Personalized nutrition by prediction of glycemic responses. Cell 163, 1079-1094 (2015).
[0465] 26. Yousri, N. A. et al. Long term conservation of human metabolic phenotypes and link to heritability. Metabolomics 10, 1005-1017 (2014).
[0466] 27. Ke, G. et al. LightGBM: A Highly Efficient Gradient Boosting Decision Tree. (2017).
[0467] 28. Cirulli, E. T. et al. Profound Perturbation of the Metabolome in Obesity Is Associated with Health Risk. Cell Metab. 29, 488-500.e2 (2019).
[0468] 29. Yousri, N. A. et al. Whole-exome sequencing identifies common and rare variant metabolic QTLs in a Middle Eastern population. Nat. Commun. 9, 333 (2018).
[0469] 30. Rothschild, D. et al. Environment dominates over host genetics in shaping human gut microbiota. Nature 555, 210-215 (2018).
[0470] 31. Zhernakova, A. et al. Population-based metagenomics analysis reveals markers for gut microbiome composition and diversity. Science 352, 565-569 (2016).
[0471] 32. Falony, G. et al. Population-level analysis of gut microbiome variation. Science 352, 560-564 (2016).
[0472] 33. Pasolli, E. et al. Extensive Unexplored Human Microbiome Diversity Revealed by Over 150,000 Genomes from Metagenomes Spanning Age, Geography, and Lifestyle. Cell 176, 649-662.e20 (2019).
[0473] 34. Lundberg, S. & Lee, S.-I. A Unified Approach to Interpreting Model Predictions. arXiv (2017).
[0474] 35. Lundberg, S. M., Erion, G. G. & Lee, S.-I. Consistent Individualized Feature Attribution for Tree Ensembles. arXiv (2018).
[0475] 36. Manor, O. & Borenstein, E. Systematic characterization and analysis of the taxonomic drivers of functional shifts in the human microbiome. Cell Host Microbe 21, 254-267 (2017).
[0476] 37. Ashihara, H., Monteiro, A. M., Gillies, F. M. & Crozier, A. Biosynthesis of caffeine in leaves of coffee. Plant Physiol. 111, 747-753 (1996).
[0477] 38. Tsutsumi, Y. et al. Renal disposition of a furan dicarboxylic acid and other uremic toxins in the rat. J. Pharmacol. Exp. Ther. 303, 880-887 (2002).
[0478] 39. Prentice, K. J. et al. CMPF, a Metabolite Formed Upon Prescription Omega-3-Acid Ethyl Ester Supplementation, Prevents and Reverses Steatosis. EBioMedicine 27, 200-213 (2018).
[0479] 40. Hung, S.-C., Kuo, K.-L., Wu, C.-C. & Tang, D.-C. Indoxyl sulfate: A novel cardiovascular risk factor in chronic kidney disease. J. Am. Heart Assoc. 6, (2017).
[0480] 41. Barrios, C. et al. Gut-Microbiota-Metabolite Axis in Early Renal Function Decline. PLoS ONE 10, e0134311 (2015).
[0481] 42. Poesen, R. et al. Microbiota-Derived Phenylacetylglutamine Associates with Overall Mortality and Cardiovascular Disease in Patients with CKD. J. Am. Soc. Nephrol. 27, 3479-3487 (2016).
[0482] 43. Evenepoel, P., Meijers, B. K. I., Bammens, B. R. M. & Verbeke, K. Uremic toxins originating from colonic microbial metabolism. Kidney Int. Suppl. S12-9 (2009). doi:10.1038/ki.2009.402
[0483] 44. Dodd, D. et al. A gut bacterial pathway metabolizes aromatic amino acids into nine circulating metabolites. Nature 551, 648-652 (2017).
[0484] 45. Atkinson, W., Downer, P., Lever, M., Chambers, S. T. & George, P. M. Effects of orange juice and proline betaine on glycine betaine and homocysteine in healthy male subjects. Eur. J. Nutr. 46, 446-452 (2007).
[0485] 46. Smyth, J. M. et al. Individual differences in the diurnal cycle of cortisol. Psychoneuroendocrinology 22, 89-105 (1997).
[0486] 47. Hyttel, J. Pharmacological characterization of selective serotonin reuptake inhibitors (SSRIs). Int. Clin. Psychopharmacol. 9, 19-26 (1994).
[0487] 48. Korem, T. et al. Bread Affects Clinical Parameters and Induces Gut Microbiome-Associated Personal Glycemic Responses. Cell Metab. 25, 1243-1253.e5 (2017).
[0488] 49. Olthof, M. R., van Vliet, T., Boelsma, E. & Verhoef, P. Low dose betaine supplementation leads to immediate and long term lowering of plasma homocysteine in healthy men and women. J. Nutr. 133, 4135-4138 (2003).
[0489] 50. Craig, S. A. S. Betaine in human nutrition. Am. J. Clin. Nutr. 80, 539-549 (2004).
[0490] 51. Fardet, A. et al. Whole-grain and refined wheat flours show distinct metabolic profiles in rats as assessed by a 1H NMR-based metabonomic approach. J. Nutr. 137, 923-929 (2007).
[0491] 52. Chalmers, T. C. et al. A method for assessing the quality of a randomized control trial. Control. Clin. Trials 2, 31-49 (1981).
[0492] 53. Yang, J. et al. Common SNPs explain a large proportion of the heritability for human height. Nat. Genet. 42, 565-569 (2010).
[0493] 54. Sudlow, C. et al. UK biobank: an open access resource for identifying the causes of a wide range of complex diseases of middle and old age. PLoS Med. 12, e1001779 (2015).
[0494] 55. Segata, N. et al. Metagenomic microbial community profiling using unique clade-specific marker genes. Nat. Methods 9, 811-814 (2012).
[0495] 56. Li, J. et al. An integrated catalog of reference genes in the human gut microbiome. Nat. Biotechnol. 32, 834-841 (2014).
[0496] 57. Zeevi, D. et al. Structural variation in the gut microbiome associates with host health. Nature (2019).
[0497] 58. Bridgewater B R, E. A. High Resolution Mass Spectrometry Improves Data Quantity and Quality as Compared to Unit Mass Resolution Mass Spectrometry in High-Throughput Profiling Metabolomics. Metabolomics 04, (2014).
[0498] 59. Zierer, J. et al. The fecal metabolome as a functional readout of the gut microbiome. Nat. Genet. 50, 790-795 (2018).
[0499] 60. Marco-Sola, S., Sammeth, M., Guigó, R. & Ribeca, P. The GEM mapper: fast, accurate and versatile alignment by filtration. Nat. Methods 9, 1185-1188 (2012).
[0500] 61. Langmead, B. & Salzberg, S. L. Fast gapped-read alignment with Bowtie 2. Nat. Methods 9, 357-359 (2012).
[0501] 62. Korem, T. et al. Growth dynamics of gut microbiota in health and disease inferred from single metagenomic samples. Science 349, 1101-1106 (2015).
[0502] 63. Efron, B. & Tibshirani, R. J. An Introduction to the Bootstrap. (Chapman and Hall/CRC, 1994). doi:10.1007/978-1-4899-4541-9
[0503] 64. Fisher, R. A. Frequency Distribution of the Values of the Correlation Coefficient in Samples from an Indefinitely Large Population. Biometrika 10, 507 (1915).
[0504] 65. Wald, A. Sequential tests of statistical hypotheses. Ann. Math. Statist. 16, 117-186 (1945).
[0505] 66. GitHub—slundberg/shap: A unified approach to explain the output of any machine learning model. at <github(dot)com/slundberg/shap>
[0506] 67. Shannon, P. et al. Cytoscape: a software environment for integrated models of biomolecular interaction networks. Genome Res. 13, 2498-2504 (2003).
[0507] 68. Yang, J., Lee, S. H., Goddard, M. E. & Visscher, P. M. GCTA: a tool for genome-wide complex trait analysis. Am. J. Hum. Genet. 88, 76-82 (2011).
[0508] 69. Schweiger, R. et al. RL-SKAT: An Exact and Efficient Score Test for Heritability and Set Tests. Genetics 207, 1275-1283 (2017).

LENGTHY TABLES
The patent application contains a lengthy table section. A copy of the table is available in electronic form from the USPTO web site (https://seqdata.uspto.gov/?pageRequest=docDetail&DocID=US20220102000A1). An electronic copy of the table will also be available from the USPTO upon request and payment of the fee set forth in 37 CFR 1.19(b)(3).

The application's sequence listing, which the Patent Office published only in electronic form, follows.

SEQUENCE LISTING (4628 sequences)

SEQ ID NO: 1 - DNA, 3773 bp, Unknown
  16S sequences of unknown bacteria
gcgtggcttgcgctgtttgtgcagatgctttggcagcgcaatgcggcggctggctttctgtttgccgtgacactgccgctgtttttgctgctgggcagctgctatctgctgccggtggggctgctggccaatgtggcctatgtggcctcggcgatgtggaaacgaggaaaaagagcctgggcggtcctgctgcctgcgctttttattgggtcggaactcatcaatcaactactgggataacaggaggagaaaactatgatcgcacttgcatgtgaccacggcgcgctggacctgaaactggccgtcaagcgccatctggaggaaaagggcatcgcctgccaggattttggcaccgacaccgccgatagctgcgactatccggattttggcgcagcagcggccagggccgtcgccagcggcgcgtgtgaaaagggcatcgtcctttgcacgacgggcatcggcatcagcatcgcggccaataagatcaagggaatccgctgcgcgctgctgtcggacctgatgagcgcccggctttgccgccagcacaacgattctaatatgatggccatgggtgccggcgtcgttgggacgaagctggccctggagatcgtcgatacctggctcgccacagactttgaaggtggccgccaccagcgccgcgtcgataagctgatggcgctggagcaggaataagcgaaaatcagaaacaacgcctgcagtcttctggtagattgcgggctttgttctgcctatgcgcagaatttttcttgcagatgacagaaaaatccggtataataaaaaagtccggccggagggatccggcggggccttggcggttcgccttggcggcgccctgacccgaacgacaagggagtttttccatgaagcaaagaagaattaccgctgcgctgctctgcgcgatcctgctgctcagccagtgcaatttcaagatccaggcggcgtcccctgtgacccaacggcaggtggaggcccaactggcggcgctgacagagcagtacgaaggcgtcgcgtataccgacaacttcaacggcgcgacccagtgcaagggctttgccgatatgatctatgacgccctgttccatgtggggacgatcggcatttacccggcgggggtctattactatatggaatccgtcagcgccagcacaaaggaggttgggcgggtcgagcccggctacgcagcgctggacgcgtcggcggtgcagccgctgctggagcaggcgtgccccggagactatatccagatgcgccgccgggaccgcagctatggccatagcatgatcgtcctggaggccaatacgacgggccttacggtcctccactgcaactggcgcaacgatctgacctgcagcgtcaacgaattctcctgggaagacctcagcctgatcagcgacggcatcagcctgtatcactataaaaattaccagaccgccgggagcttcacggacgtgacgccggatgcctggtattattcctacgtaacttccatctgccaggcgggggtcatggcaggcgtctccgagacgagctttggcccggcagagccgatgacccgggccatggtggtgacggtcctgtaccgcctgagccaggatacgagcacctatcagacgacctttaccgacgtccccgcggggacctggtacacaaacgctgtgggctgggctcagacctatggcctggcggcgggctatgagaacggcatgttctgccccaacgataagatcacccgggagcagttcgcggccttcctgtaccgcttcgcggtattcgaaggccgggcccaggcaggcggcggcagcgacctggcggtgtttaacgacgtgagccaggtctccggctgggcttacccggcgctgcagtgggcggtggcgcagaagattatctccggcacgccgaacggctacctgcaccctctggccaatgccacccgcgccgaagcggcgacgatcctggcccagtatatcagcttcttccgcgtggcggaatgagcgcgtgaaaccaagagaaggagaagcctatgagcgacacattgcatttccggcgcatccggccccaggagggtgagctgtatgcgcggtttgtccatgatttttacgcgtctgacggggtggatcaccccatcccggcagaatatattcagcgggccttcgcggagatctgccgcggggacgactatttgatctgctatattctcgaagaaaacggtgatccggcggggtatgccctgctggcgaaaatgtacgcccaggaggcgggcggcatggccatttggctcgatgaattttatctcgacccggcgttccggggccggggcatcggcgcggcatttttgcagtggctccggcaggagtgggagccgcaggtggcccggttccgcctggaggtcgtgccgtcgcacgaccgggtgaaggccatgtatgcccgggcgggctttttgaagatgccgtatgaccaaatggtcctggaaacgccgctggagagagaaaattcctaaaaatccagaattttccgttgacatttgacacagggcatgatactctatacaagccgcatcgaatgggttgaagtcggcgtttgccgcaccctcagagcgagactacaaaaaaggtaggtgcaaatcatgcaggcagttattgttacaggtggtaagcagtacagcgtgaaggaaggcgatgtcgtctacatcgaaaagctgaacgcagaagctgacgcaaccgtaaccttcgatcaggtactggcagtcgtcgatggtgagaattccaagtttgggacccccgtcgtcgctggcgcagctgtggaagctaaggtcctgaagaacggcaagggcaagaagatcaaggtcttcaagtaccgccccaagaaggacagcaagtccatgcgcggccacagacagccgtacaccaaggtgcagattgaaaagatctctgtgtaaggtatgacacgggtagagtttttcagcgaaggcgataagatcacaggattttgttgccagggccacagcggctatgccgagtcaggcgcggatatcgtctgcgccgcagtttcgacagccgtgacctttgccgagacgaccatcaccgatgtgctgggcgtccgcgtaaaggtgcgcgtccaggaggacgaggcccggatcaccttgacccttcccgcagcgtatgagcaggaggaggcagtacaagccgtcctcaccggcatgatgctgacgctgatgcattggcgggagcaatatcctgattatttagaagttgttatggaggtgtaacgaatgctcaacattagcttacagttctttgcacacaaaaagggcggcggctccacgagaaacggccgtgactccgagtccaagcgtttgggcgtaaagcgtgcagatgggcagtttgttctggctggcaatatcctggttcgccagagaggcacgcatatccatcccggcaagaacgtcgggattggcagcgacgacaccctgttcgcactggtaaacggcaaggtccgttttgagcggatgggcaaggatcgcaagatgtgctctgtttacgaagaacagtaatggcatgagagaagagctgttgcagaagctgcatcagctcttttttctgatttggcaggcgcgggatccgcaggccgcggcagcgcggtcccgggccggggaggcttgaaacgatgtttgttgataaggtgaagatcagtgtgaaggccggcaacggcggcaacggcgccgtggcgttccaccgggagaaatatgtcgcggc

SEQ ID NO: 2 - DNA, 13171 bp, Unknown
  16S sequences of unknown bacteria
ttcggcgtttccgattccctcaaatatctcctcgcgtccctcgtcgacgcgcccgtcgtgtatatcgcggcggacgcggtcgccgcgcagaaagccgcggaaaatatcgcttcgctctcgggcaagcgcaccgccgtgctggcggcaaaggacgaggtgctcttataccgcaaggccctttccaaggattcccttttcaaaaggctaagcggcatttacgcgctgcaaagcggctgtcccgtcgtgacggcggaaatagacgccctcgttcagctctttcccaaacggattccctcgattctattaaaggagggagaggacgccgatttcctttctctgcccgcaaagctcgtggaaatgggctatacgcgcggttttgaagtggaaacgaagggcgccttcgcgcttcgcggcgacattctcgacatctttcccgtcaatgcggaaaatcccgtccgcatcgatttcttcggcgatacggtggaaaagatcaagccgtacgatctcgtcacgggaaaccgactggaaagttcgaaagagcttctcatcctttccgccaccgacgtctttgtggaggagggggacagggcgcgcgtggaggaggcgtttaaagacggactgaaaaactttactacgacggaggcgtatacccgcgcggtcgaaatcgcggacgagatcctgtccgatcccgcgggcgaaaaatccgcctttttgatgccgctcttaaaaaattccgtcgactttttctcgattttacccgagaacgcagtgctcgtattcgacgagggcaaaacgctctgggacaaattcaacgcgctttataaagaacacgaggagcgctttcgtcgcctgcaatcgggcggggaggcgtttcccttttccttcggtcagtatacggagagggaaagcttcctctcttccctgtccgctttccgccgcgcggcgttgcagacgttcacgggcaagccctttttcttcgagcccttaaagatattcaatctgacggcgacgcccgccgcgaaatacctcaacggctttcccgcgctcctgacggacgtgaaaaactggctgcggggagggtatcgggtgctgctttactgcggcgactctgcgcgtgcggcaaagatggaatccctcctgtccgacgagtacgtttccaccgtcaagcttccggacgacctcgcctctttcaagggcgtgtgcgttttgcccgaaaacttggacaagggctttattctgcacgagtgcaagctggcggtgataggttcgggggatctctacaccaagccgcccgatacgaagcgcatccgaaggaagcggggggatatgttctccgcgcccgaggtgggggattacgccgtgcacgaaacgcacgggatcggcaaggtcgtcggcacgaaaaaaatcgaaacgacggacggcaccaaggaatatatcgccctcgaatacaaggacggggacgtcttatacgttcccgcggaacatatggacatcctctccaagtacgtgggggacgcgcatcccgctctgagcaagatcgggggcgccgatttcgagcgggtgaaagcgcgcgtccgcgcttccctcaaaaggctcgccttcgaccttaaaaagttatatgcggagcgggcggagtccaagggcttccgctttcccgaaaacgccgctttcatgcaggaattcgaggacgcgttcccctacgaactgactcccgatcaggcgtcgagcgtggaagagatcaaggcggatatgtgttcggacaaagtcatggacagacttctttgcggggacgtgggattcggcaagacggaagtcgctttccgagccgtctacttatgcgttttgggcggcaaacaggcggcgctgatgtgccccagcaccattctctgcaatcagcatttcaacaccgcctgcgagagattctccgatttcggcgtgcgcgtcgccgcgctcaaccgcttcaattcgcccaaggaacaggaaaagatcttgcagggactgaaagacggcacgatcgatttcgtcgtaggcacccaccgcctgttgtccggcgacgtcagatttaaggatctgggacttttggtgctcgacgaggaacagcgtttcggcgtcgagcataaggagaagatcaaacatttgagaaaggacatcgactgtcttacgatgacggcgacgcccattccccgaactctgcatatgtccctttcgggaatccgtgacatctcgacgatacagacgccccccggcgagcgtctgcccgtgcagacttatgtggtggaagaaacggaaacgctcatccgcgacgcctgtatccgcgagctttcgcggggcgggcagatattcattctctataataaagtggagagtattttcaccttcgctgccaagatcaagcgcattcttcccgaagcggaaatttccgtggcgcacgggcgcatggataaaacggtcctggaaaacagcgtattcgatttttacagcggcaagagcaatgtcctcgtcaccacgacgatcatcgaaaacggcatcgaccttcccaacgccaatacgctcatcgtcgtcgacagcgacaaattgggcatttctcagctctatcagctcaaaggcagagtggggcggggcacgcggctggcgcacgcctatttcacgttcaagcccgaacgcgtgatgacgcagaacgcctccgagcgattgaaggcgatcatggaattcaccgaactcggctcgggctataagctcgccatgcgggatctcgaaatccgcggcgcgggcaacgttctgggcgcggaacagcacgggcatatggacagagtgggatacgagctgtacgcaaagctcctgaaagaggaactgacgggagaaacgcagtcggtcgcggaactcgacatccgcgccaacgcctatatttccgaaaaatatatcgaatcctcggcgggaaggctggatacgtataaacagattgcggaaatttctacagtcgccgactataaacgggtgtattcttctttggaagagatgtacggaccgctgccgcaggcggtcgtcaatcttctggtgatcgcggtgctgaaaagctacgcggcgaaattcaacgtccgcaagatcacggtggcgaaaggcgtgggagcgttggagtttccttccctcgaagctttgggggataaacggatcctcgccgcgatggataaatataaggaaaaagtgcgcctgaatatggcggaagcgcccgtcgtcgaaattttcggaaagcgggaagcggcggatttgatggcggaaatgacaaaatttttgaaatttgccttaactttcacaactttataacgaaaaacatttgcacatttgcgcggaatcggttataatataggttgttgacacatacccccaagggaaaattctgcatttttgtggcacaggcaaagtacgataaaaaatcggagcggttttatgaagaacagaaacacaatcaagaagataacggtatcggcgttgtgcgtggcgtttgcgctgagcgctgcctcctgcggcgaaggactcatcacgaccaacagccagaaggatatggagcagatcatcggcaacgtcagtattgccaatcacgaagagttcaagggcgacgggcagtacgccgattacgcgagcgccattcagagcatgaacaccaaaattttaaagcgcgatttggtggcttatttcctcaataccggctatacctatgtaaacagctacggctatacgtacgagcagacttttaagctgctgatgcagaatctcgtcagccgcaagatcatggtgcagtatgccatggcatattatttcgcttccacgcccgaagagggagaatatcggtatacggtcgaagcctataacagctatatcgaaaaagagtccgcaagccttcccgacgccgtgaaggggcattacgaggcgcatcccgaaatactcaccatgcagtatttcctcaccgagggcggcacggattccgccgattacgacaaggccgtttatacgctgaaagcgatgatcaacaacacgctcgattccgcggaggaaagcttcatcgacaaagaggacgaggacggcgatgcaagttccgatacgaggaccactcccacgggcgtcggcgaagaaacggaggactattacgacgccgattacgagatctatacgggcttcaacacgcccgacagctgcggctcctacgaaagaaaggacggctccacgcagacgacgagaaagcgcgcgtacaataccttcctttccaatctctccgcgaataatctgttgattaagggagaggacaccaccgatttcaccaagataaactactattatgtggagctggcgagccaattggagcaagccctcatcacgaaatacagcgacgatttgaacgacgaagcgaataaggagctgacgcaatcctatgtggaggggaaatacgcttccctgctcgcgtcgcagcaaaattcctattcggaagatcagagcgctttcgaaacggcgatcggcagcgtttccgatacgtctttcgtgttgtatagcccgaaggaaggcttcggattcgtctacaacattctgcttcccttctcgacgacgcagacgcagattctctccacctataccaatgacacggggcttactaagagcgaattttatcagaagcgctctcagcttttaaacaaagtcagcggaaaagatctccgcgcgccctggttctcgacggacgaggaaaagaattacgcgttcgaggtcacggcggaggacgagtattataccaatgcggacacaaaggaaaacgagaagaactatctctttttcgaggacaacctcaaaaatagcgcgggagataacgcgcgctataaggagctcggtcagtattacggtcagtatccctataacggcacggtgacgaaggacgaggacgacaagtacgtatgtacgcccaacgaagtttccatcgatgaatttttggacgaaatggaagcctatctcaattacgcaaatccctctttcgacgcgaagggcgccgagaagacgggctatgtgaaggacggaaaatataccctttcggaaaacggaaaattcgattattccgagttcctgtactatgaaggaaaagtgacgctcaaagatacaaagcataaggattatttcgtcaagggcaccgattcctacaccgcggtttccgtcatcaacgaattgatgttcgcgtacagttcggatacgggcaatctcaataaatatatgggttataccgtttctccgtataagacgagctatgtgtcggaattcgagtatgccgcgcagtacgccatccgcgcgggcgcgggcacctatgtggtatgtccttccgattacggctggcacgtcatttacgtttctttcgtctatgacgagggagaggtctacgaaaacggattcaactggaacgagagggaagaggaaggcactttctcctatctgttctacgaatccttgaagtccgattcttcttcgtcctcctcctatgcgtcgatgatacagaatcagatcctcggcaaatacaacaccgacacttgcgtcacgctttacgaaaacagatataaggatctgttgagcctcgataaataatttcgtaaaagcggaaggcaatgcataagtcgccgaaaagtgctcatactgaacataagccgttttgatacggcggttaaggaggtaataagtatgagattgcacagtggcgatatttgtcccaagaccggaacttacagagttattaacgaggacggcaagacgttgaacagcgtgttcgtaggcgagggtgaaaccatgcctcccacgcagcactcttcttgctgctatgaatttgcagactaaaatttaaaaccgcatagagaaatccgctccgttttacggtgcggatttctttcggatagaggggagcgccgaaaactttttcgggaaagcgtttgacgtcggcgcgaacgcatagggtcgattggtatttaaaaaggagcagcagaacgtttccgcgcaagtccgaatttggaataaggacttatgcggaaattttttacgaaaaattctcctgaaaagaaaaaatatggcagtcagccattgacaaagccgaatgtcgggtatataataaaaaggacagtcaggaaaattgacgaaaaagggaaaaggagaaagaaaatgctgatcgaaaacggacaaaaaatcgtatttgcgggggattcggtaacggacgacgggcgcgtccgtcccataggggagggcggctccgcggccttgggcaacggatacgtgcgcctcatcgacgcctatttcagcgtggattatcccgaacgctttattcataccgtcaatatgggaatttcggggaacacgtcgcgggatctcgcggcgagatgggaaacggacgtcaacgccttgcatcccgattgggtggtgatgtgcatcggctttaacgacgtctggcggcagttcgatctgcctaccattcccgaaagcggcgtttcgcccgaagaatatcgcgccaatctcaataaaatggcggacgcgacgaaggcgaaaatgatttggatgacgccttattatttagagccgaataaagaagacgccatgcggaagcgcatggacgaataccgcgccgtcatgaaagaagaggcggcaaaaaggggaattccctgcatcgatttgcaggaaaaattcgcgcatatcctgaaataccgctatcccgcctatatcacttgggacaggattcatccgggcgtggtgggcagcgtgatcatcgcgcgggcattcctcaaagaaatcggctttgagtacggggaatgagcggaaaaaagagaagtttacataacggaatctgttaagtgaaatttatgcgcgattatttattcgaatttgattgcttaaatccgaaaaaaatgatagaataaatagtgtgaaaaaacagtactcgggtggagctttatgacggaagaaatcatcaaatcgatcacggaggcggaggcgagagccgcaaaaataaaagagtcggcgtttgctcaggcggcggagatcgccgccaaagcggaagagcgcgcttttgaaatcgagaaatcttcggaagaggtgtgtcgggcatatcgggaaacgcagttaaaagcggcggaagcggatgcggaaaaggcatatctttccgctctgactcaaaaacgcgaagaagcgaaagaatatgccgaccgcctgctcgaaaatacagaactgcccgtaagcagaatcgtagggaggatcaccggtggcaatcgctgaaatgcaaaaattcaacctcgttgccatgtcttacgacaaggaggcagttttgaacgccctgcaaaggacgggcgcggtcgaggtgaaactgcacgcggaaacggaagatacgtccgttccccccgtcgacgccgacgaactgcgcgcatatatctcccgtttggaatccgctctctccctgttgagcggagcggtggagagttataatcaggacaataaaataaaatcgggcgtattgaaggacggattcgacgtttcctattccgagtttatggccgcgggggataaaaaggcggaaatggacggtttggccgcccgcatagaggcgctcttttccgaaaaaaacgacttgcaggcagagctgtccggagcgaagcggacgctgcttgccgcgggcgtttattccgcgctggaagtccctttctccttcttttcagatacccttcatgcgcgcgtaaagctggggacggtgcctgccgtcgtgcgcgaggatcttttaaagagctttgccgaacaggatttagcctgcgcggaagtgctcgcttcggacgccgaaaccgcgcttctttgcgtggtctttcatcgggaaatcgctgcggaaacggagggacggctctccgatttcggcttctcgccctgccctttcgaaggggaaaaaacgggcgcggaaaattacgattctctgtgtgggaaagtcaaggcgatcgaacgcggattaaaggcaaacgagtacgccatgtacgagctgaacacacaaattcgacccttaaaggtctattgcgactatctcgggtttcagcttgaaaaagaggagctttcggataaactgcgcgccacagagcgaacgtttcttttggaggcgtatgtgcccaaagaagcggaggaactcgtcaaagaggcgcttttatcggtgacgaaagcggcgtatttcgaattttccgagccgtcggaggacgaaatgccgccgacgcttatgaaaaacaacgcggtgattaagaatttcgaggcgataaccaatatgtattctcctcctaattccaaggaactcgatcctaacgtggtgatgtcatttttttacagtctatttctcggctttatcatgggcgacatcggctatgggcttgtgatgattttgggcggcggtttcatttggtataaacagcgggcgagggaaagcggcttcaagcgcttggcaggagtttttgccgtcggcggtctgtttgccgtcgtgtggggaattttattcaattcgtttttcggagtttccctgcctttccttaaaacggtgatgcccgatgcgcagagcgatatgtggacttttttgggaatcgaaatgcccagtgttttggtcatcagcctaatgctcggactgatacagctgttgctcggatacgtttgtaaagcggtgcaagagtggctgcgcggcaatttttgggacggcgtttgggacggcgtggtatgggccgtattttccctcggcgtcggattggccgccatcggactgatcgaacagaccgagcttcccgcactcgtgaagatcggcggaatcacggcgggcgtttctttgatcgtcgctatgctgacggctggcagaaaggaaaaattgatcggaaaatttaccaaaggcttcggttccgtttacggcatcatcaattacgcctcggatattttgagttattgccgtctttacgggcttatgctttcgggagccgtgattgcgcagatcgtttctcaatatgcgatcgatttcattaccggcggcaatcccgtctttctcgtgctgggcgtcgtcctcatgatcgtggggcacgcgttcaatatcgcgatgggcctcttgggcgcctatattcacgacgcaaggctgcaatacgtcgaattttatggcaagtttttcgagggcgagggggaattgttcacgccgctcggttcgcagcataaatatgtttggcttgctccgtccgggagcctataagcgattcgaaggaaaaaattgccttcgccgcattaaaatatcaagaaaaaacaaattttcggaggattcattcatgtttacaacaggttatgccattgctatggcgggcgtcgccctttgtgtgctgctgtgcggcatcggttcgagtatcggtctttataagacgggcagcgcggccgcgggggtgttaagcgaaagtcctaaaaagttcggcaaattaatggttttagtccttttgcccgccacgcaggggctttacgggtttatcgtcgctctcagtgcctctaataaactggggatggatatgaataccgcgcagggttgggccattttcggcgcagtgatgcccattgcgctcgcaggtttgattacgggtatctttcagggaaaatcgtccgtcaactgtatctatgcggtcggtaaacaggactccctcggtggtaaattgatcctttatcccgctatggtcgaattctatgccattttatgcttcgtcgtttctctgatgttggtcgcaaaattttaaggatacgatatgagtaaggaagcgatagtggaaaggatcctttccgacgcgggcgccgaggcggaagcgatcatcaaagacgcggaagaaaaggccgcggctgtcgtcgcggcggcgtcctcccgcgccgaaaaaggcaggcgggactcggaagcggaagtcaaagtaaagacggggagcattttcgaaagaaaagcggctaccgcgaggctggactgcgcgaaaattctgctttccgaaaagcgccgggtcatcgacaccatctataaagaggcgctggataaactcgtcgcgctctcggaagaagaatgtctggctttgacggataagctcttgaaggagtatgccgaaaacggcgacgaaatcttctttgccgaaaattattcctacgcgggcgcagccgcacggctgcccgtcatggcggaaaaaaatctgacgatttcctcccggcgcatcgagatagacggcgggtttcggcttcgcggcgtttccagcgataaggatttgtcctacggagcgcttctggcggcggaccgcgacgaatatcaggcggaaatggcggcggaaatattcaaaaccagatagtttcacaaataggggcgaatcgttcgccgcggggaaaagatcggtcggagataagaggcgaaaggaaggctgtttgaacggaaagaatttaagaggacgctgtcggagcgcacaaaagcgccggaagaagcgaacgccgttcagacggtaaaagtttaagcgcgctgcgttaatggcgcgaaaagttcgggcgatagaagggcgttcgcggcgaagagagttcaacgctcgaaggctgcgcgatagaagcggattgacgggcggaaagaaatgggagcaaggtatcttaacttccgaaagttgcgggtaaagagttcgggcgtggaaagttcgggaagcaaaaagttaaaacgtccgaaaagtacgggcagtcacagagcttgaacgatggaagacgtttccgacgtaaagtgcagacaaataaagtattatttgtcgtgtggagagaaactgaaacaaaccgctcctgaaattctttttccgtcgcggggcgacgggaaaaaggcggtaatattctttttctccgctttcttcgcctgtaaaagcggattgacgggcggaagcggaaacgaggcttttgaaaccttctttcgagaatgtgaaaaagccgatttcagtcgcgtaagataaaaatacgttaacgcggggcgcggtgcgttgcgccgatattcgtaaaagccgacggcactcgggcgcaaaagggagaattcgtacaattatgggcaaagacgttatctatacaaacggagttatcgcctaccgcgagaaatttctcctcaaagataagctgttaaaactgtgcgaggggacggcggaggacgctttcaaaagtttgaacgaaagcggctacggcaacggcgcggaagcggcttctctctacgattacgagcttttaacggcggcggaggagagcgctttggacgattttatccgcgaatacgcgccttcgcaggcggagaaagcctatcttctcgcgccccgcgattttcataacgcgaaagcgattctgaaagcggaatacctgggcgcggacgccgagaaaatgctcgcgcccgacggagagatccctatcgcgaacctttccgtgagccttcgcagcggggatttttcttcgctcgggaaagaactgggaaagaccgcgaaagaagcggcggagcttttgaaagaagaaggcgcctcgggcgcggagataggcggcgttttcgagcgcggtctgtataaatatcttgccgccgtgagctccaaaaacaaagttctcaaaaaacttttagccgccaaagccgatatgacgaatattttgacggcgcttcgttcctccgatcaggggtatgccgaaaaaatgtacgtggacgggggacggcttaccaagaaagagcttgccccgctctttggcgacgatcgggaaaaggcggcgcgctgcctggacgatactccttacgcggcgtttgcgaaaaagtgtttcgacgcgaaggaggcggggctgcccttgacggaggcggaacggctgcgcgattcttacgacgcggattttttcgctccgcgaaaatacgaactggaaaaaaatcaaccgtttttgtattacgttttccgccgacgcgcggaaaacgccaatgtgagaatcgtattcgtgtgcctgctggcaggtatgcgcgaacaggacatcaagaagcgcctcagggcgttttgagggagggcgcatgacgggaaaaatggcaatcgtcggggacggcgacagcatcatggtgttcaaagcggcgggcgtggctacctttcccgccgaaaacgagaaaaaggcgcgggatacgctgcggaaaatcgccaaagagtatcagatcattttcctgacggaggaattggcgcgtccgctcggcgaatttttaaagcgtttcgacgaggaaccctatcccgtggttttgagcatcccctccaaaaacggcagttcggggcacggcgaggaattgttgaaaagcgcgatggaacgggcgctcggcgtggatattctgttccataaagattaaaaaagatcggtattttttctttccttcccgtaagtcgggaactgagattgttaagattcgcgcgaacgtactttgaatagagggaacgcgcgaaaaagcggaaggcgcgtggaaagcgaaaagttcttaacggtgggaaagattggaatgcaaagcgagcggaaaaatcgaaaaatccgaaaaaataaaaagttcgggaaaatggggacgcgcggaaagacgggagaaaagcggtttttgcattcgggaagataagaaaaacgttttagaagataagaaaaaacttttctgcaaaagagccgaaaagcggctgcccgctacttgggtagggacgaaagaaacgggagccgagagagttttttcgggcggaaggacggttatcgattcgacaatatgcttatgccttcttttgcggaaagtattttcgcaaaagaagggcgggcggacacaataagtgaggattgcatacatggcaggtaagacagttaaaatttcgggacctttgatcatagccgagaatatggcggattcgaaaatgtacgacgtcgtccgcgtttccgacaagggactgatcggggaagtgatcgagcttcggggagataaggcttccattcaggtctatgaggaaacttccggattgggtccgggcgaggacgtttattccacgggcgagccgctttccgcggagcttgcgcccgggcttatcacgggtattttcgacggtattcagcgccctttgaccgcgctctatttcaaatacggcgaccgtatttcgagaggcgtttccgtcaa

SEQ ID NO: 3 - DNA, 4942 bp, Unknown
  16S sequences of unknown bacteria
ctgggctgtcgcaaaagcgacagcccacatttatttgacttcggtctttccaatataaggttcgatatccatcccggtttcaccgtactgaatcctgatatcgtccagcctgacgaccacctcatcgcccgcgctcagagctatatcgctgtctgtcgggaaatcatacacacacaggtcgcttccgaccgtgtatacgggcgtcagagcgttcttggcacttatagtctcgccgttcacttcatactcgtagtcacggcgcagacaggttctgacgtcggtcagggcgctcacccatttcaaacctccggtgtcctcggtgacgcagttgtagctcagccctttttcgcttctcgtcacggatttcagccgtacttttattccgcggttatcgtacaggacaaggtcgagctcctttgtctcgccgatctccggtatgcttatcttcacgtccggaatgtccgcggaacggaagctcaaagcgtatatgatgcttttgagatacagagttccgatatttttcccatgcgtcatgatgttcgccttgacaaggtcatttgagaccttgcctccgacgaccgtcgcgcttccgccgtagctgccgacaacgccgtccatgtcagccgccatgaaaagatgcgcctgaacaccgatattgtcatcaagaagtcccttcgcgaacgggtcatatatctcagccgcccagagatcatctttgtcagtcacctgtatgaggtctatctgacgcctgccgtactttatcctgccgctcttgttcgccgccctggcgtcagtcagctccactgtcacctcatctcccgccgaacggagaatcacagaggttcccgcttcgacgtcaccgaacatatacgtgacatacccggaggttccgcctccccagttcgggtcgtcgtagacctttccgtttatctccgccgtcagatccccgagcgccgccggaggtctgccctctgttctctcatcctcggttatctcaacctcgttctcgcgccagagccagacggtcagggtgtttccctcgtccgactcggtcagcatgacggcttcaaccgccgtgtccgcaagctttacgctttctttcgccgtcagcatcttcacgctgccgtcgacgattccgtagccgggtgcgaaataacgtataccgagcgccgccgcccctatcgtgagaagcaccgccagagccgccgcgagcgggacgaatttcattctgatacgcctcattttcctgctctcctttccggtttcagtcagcgccccggatatcagcgcgccgtctatgtatccgagcgcctcatcaagcctgtttccgcttctcttatccgtcaatgtaacccctctctttcagataagccctgagcttcgcgcggagcctgtgaagccgcacgttcagggaatttgtggtgatcccgagctttccggcgatcatctccggagtctcagccatcacatagcgcaggacgaacattctccggtcgcgctctgacagcgtcgtcagaaaatcgcttatcgcccgcccgagctcctttgcggtgatccgatccgatatctcagagtcgtcagccgcggctgtcagctcgtcaagcgggagtgttccgcggcgctttttcgcgttctcgtagttcagacgatttatcgcgagccgtctcgttatcatcgccgcccatgccgccacactgtccggacaggcgggcgggattgactcccagagctttctcagaacatcatagcgtatctcctcggcgtcccggggatctcccgtgatgttcagcgcgacacgcgttatcatcccgccaagctgacagtcaatctcactgagcacgctctcatcccgcgcgagcagtctgtcagtcatctctttgtcagtcataggatctcctttcgcttttttgagtactcacctatcaagacaggaaacaaagcggaaaattacataaagccggaaaaaaggctgtcacgaaatcacgtggcagccttatgctgttcagaaattactttctctctttggtgttgatctcaacaagcgccttcgaaaggaactcatcgaacttcatagctccgaggtcggtgccgctgcggtgacgcaccgcgacagtgccgtcgtttgtctccttctcgccgatgacgagcatatacggggtcttctcgagctgtgccgatctgatcttgtagccgatcttctcgttgcgctcgtcgaggaacacgcggatacccgccgcctcgagcttcgactttatctcctcggcgtaaggatactgctcctcgccgatcgggagaacggcgacctgcgtgggcgacagccacatcgggaacgcgcccgcgtacttctcgatcatgtaggcgagagttctctcaaagcatccgagagaagttctgtggatgatatacggcgtcttcttctgaccgtccgcgtcgacgtactccatgccgaactgctttgcgagaagcaggtcgatctggatcgtgacgagcgtatcttccttgccgtaaacgtttctgtactgaacatcaagcttcggtccgtagaacgccgcctcgtcgatacctatcgagtaatcgacatcaaggtcgtcgaggatcttcgccatgagcgactgagcctcatcccactgctccggagtaccctcgtacttgttcttcgggtttgccggatcccactgcgagaatctgaacgtgcagtcctcgagaagtccgacagtgccgaggaagtacttcatgagctcaaggcatcccttgaactcttcctctagctgctcaggacggagaatgatatgtccctcagagatagtgaactgtctgacgcggataagaccgtgcatctcgccgctgtcctcgtttctgaacagcgtagaggtctcgccgagcctcatcggcagatcgcggtaggaacgctgacggtttaagaacacctgatactggaacgggcaggtcataggacgcatagcgaagcactccttcgtctcgtccttcgggtcgccgatgacaaacataccgtcaaggtagtgatcccagtgaccggagatcttataaagctcgcgcttagccatcagaggggtcttcgtgagcagatagccgtgagcctgctcatagtcctcgacccatctctgaagcagctgaacgacgcgcgcgcccttcggcagaagaaccggaagtccctgaccgatgacgtcgaccgtcgtgaagaactcgaggtcgcggccgagcttgttgtggtcgcgcttcttcgcctcttccatcatggcgagatgctccttcagcatatccttcgccgggaaggcgataccgtaaattctctggagctgcttgtttgcctgatcgcccttccagtaagcgccggtgcactggagcagctttatcgccttgacggcgccggtggaatgaaggtgcggaccggcgcagagatcggtgaactcaccctgacggtagaacgagatctcctcgccctcgggaagctcctcgatgagctgcaccttatacggctcgtttctctccttcatgaaagcgacagcctcgtcgcgctggagagtgaagcgctcgatgagcagattctccttgacgatcttctgcatctcggactcgatcttcgcgaggacgtccggcgtgaacgggacgtcgctgtcgatgtcatagtagaacccggtctcgatagccggaccgatcgtgagcttcgcctccgggtaaagtctcttgaccgcctgggcgaggatatgcgaagcggtgtgccagaacacgcgcttgccctcggtgtcggagaaagtgaggagcttgacctcggcgtcagcgtcgatcacagtcgacagctcgtgaaccttctcgttgatacgagcggcgatgaccgaacggtcgatgagctcggacgccttcgcagcctcatagacgctgatcggcgaatccgactcgaaaatcttgtcggttccttcaaatttgattgtgaacataagaaataacttcctttcccgcctccggagcgacaaaaagccccgaaggcataatataattaccttcggggtgagaatattcccacggttccacccgatcttttaactctttcgaggaagcgtacacttccgatccgtataacgccggaatacggcgcgccatttcctgcgcacggcaacagtcaaaaactgacgaacggcggtaatatgatctgccttcacataaagcccgctttcagctccgccatcagcggcgcggactctctctgatacgatcccggcaaaccggatccgttctgccttttatattattatacacccgtccggacattttgtcaaggggtgccgcgaatttttttgtgctttcgcgcagaaacacagacagctctcaggctccgaccggcggattctgcgactcaagcagtatctcgagccgttcgtcaaggcgtgccttgttgctgtcgttcagtctgcgatacaggctcacgagttcgctttcccgcttacaggcgtactcgcgctcttcgttcttcccgcgcggcgccgggtcggatgtcagaccgatcaggaaatccgaggtcgtcccgagcgcaatggccgtccttccgataagctccgcgcgcggctcgcacaggttcttctcatacttatacatggtcatcttcgtgacgccgatacggtccgcgagctcattctgccgcatatctaggcactcgcgcagatagatgatccgctctcccatagtatccattcactttacctcgcaaaacaaagtataaaggacacactgattcaaaattgtttccgcagaaaaaaatccataaatccgggaactttcttctgtggaaaaacgaattattcagcgtttccattatattatacaattattttcgaggtttttgtatatagtagcaaaatttattataatctattgacagtagctgaattagatactataatatatacaggaccgttgaaaaaacata

SEQ ID NO: 4 - DNA, 4701 bp, Unknown
  16S sequences of unknown bacteria
cggatccctcgtctcctccagcgcatacgcatcctctataaaatgatatgcccgccaatattccccgaagctgtcgacaaaatacggctctcccgtcttcgcccggacaaagtccagcgtctcacgatgcggatcgcctccctgctcccggatctgatccttcagatactccgtcacgtggagaatattatccatgagggataccggatccgtaaagaccgcccggttcatatgctgcagggaataccggctcaccacgccgtcctgccggaacgtcatgatatacgtgtcattgatatgtccgtttccccacggcttacactccacgaactccccttccactgcaaatcctctggcagcctcctgcatgcccgtgtgtaacgtatcctgattcatctgtaaatcctctctttcctcattgtccgtgatccctgaaaatacccatccggtcaaatcctgaaagagccgcagatgcgcggcatgctgtcattttcacctgatcacattatcattattttatttcaacatagtctactcgccgcattcccgaacaagatacatcctatatttattccaccgtcacgctctttgcaagattcctcggcttatccacatccagaccttttgcaacagacacatagtatcccaacaactgcagcgggagcaccgcaagactgccaacaaagtgttcatccgccttcggcacataaacggtaaagtttacctgatcctcgatctcatagtttccataggtcgtcacccccatcaggtaagctccacggctcttgcactcctgcatattgctgaccgtcttttcgtacagctcgccctgtgtcagcacaccgataaccagcgtgccctgctcgatcaggctgatggttccgtgtttcagttcacctgcagcgtatgcttccgagtggatatagctgatttccttcagcttcagactaccctccaggcaaactgcgtaatcaatgccacgccccacaaagaacacatcatgtgcattagcatatttcgcagcaaaccattggatgcgctctttgtcttccagaaccttccgcatcttttccgggagcatcagtaactcagagatatagtagccatattgcccgtccgtgagcttgcctctgacctttgcaaattgaaccgccaggcagtacatagctgcaagctgtgcactgtatgcctttgtcgttgcaacagagatttccggaccggcaagcgtgtagaacaccttatctgcttcacgggcaatactgctgcccaccacattgacgattgccatcgtgacgatgcccttgtcttttgccatacgtaatgctgccaatgtatctgctgtctcgccagactgactgacaacgatcacgagcgcattccgaataagcggcatcctgcgataacggaactcagatgcaagttctacacgcaccgggatatctgccatatcctccagtacatactgtgcagccataccaacatgccatgcagaaccacaggcaacgatatagatctgctcaaagttcttaatttcatcctcagtaatctccacgccagaaagattgatgacaccgtctttcatcacggagttaagtgtgtcctgaacagctttcggctgctcatggatctccttcatcatgaaatgctcaaaaccgcccttttccgctgcctctgcatcccactgaatttccgttgtctgcttctcgatctcgtcaccatcgagattataaaaatgcgcttcaccaggagtcagctttgcaaactcaaggttgccgatataataaacattgcgggtatatttcaggattgccggaacatccgaagccacataggtctcaccgtctgcaataccaatgatcatcggactgtccttgcgcgccacccagatttcgcccggatagtcacggaacatcagctcaagagcataggagccacggacacgaaccatcgtctttgcaatggcatcgacaggacccagattatactttttataatagtagtccaccagtttgatgaccacttcggtgtctgtctggctgtagaacgtatatccgtgcttcagcagcttttccttcagctcggtatagttttcaatgataccgttatgcacaccaacaacttctgattcaactgcaccagaaccggagcgagtacagttaccggaaacatgcggatgcgcattcgtctggctcggctcaccatgcgtagcccagcgggtgtgtccgataccacaagtacccttcagcgcattgccattatccgtcttctcaatcaggttggacagacgaccttttgccttcacgacctgtgccagattttccccatcccggacagccagtccggccgaatcatatcctctatattccagtttagacagaccatccagcaggatcggtgctgcctgtcggcttcctgtaaaaccaacgattccgcacataattttatccctcccgttatttacttctcttatcttctatatttttcttcttaataaaatggacataagcatccccttacccatcacttagtgctcccttgttttgtttataaactctttggaaatgtttattttcgtttcactaccgcattttttcctcgaaatgctataccaattttgatgaccggattgacgcctgcattccgcaactctgtatcatactttttctcatcgatttgttgaagcgcacgatccgccaaagctgccagatccacatgttcatttttggtgtgcttaaattcaaagaggaagccgggagttcccggtactaaaggagtcagatgaatatcaaagcgcccaagtcctgattcacgatttgaacgtacctgataacgatttccgagaaccgcacacaagcccagcatcataccatggtagaatccctcattggctccatccataccggaaatgctctgcagcataaaatcttccagcaaagactgcagcctttgcgcatctcccgagaaaatggcctggctgacagaaacagaaacactgttccggttcgtacggttcaaaacttctttttcatagacaaacgcaatttctttatttggaattgccacatcgcacataaagtttccgtcattttgcggataaacagctgcaatttttaaataccctgcaacaagtaaaaaactatagatgctgtaaggattcttctgtacttccggatagattacactggtatccacataggttgtgattttctctccgcagagcagtttataaagcccctcgataatctccggcgtggctgtcgcaatgatctccccaataatttcattgttcccggtagactgccagaatgcctttggaaaacaatcatccgaaatataattaatcaccgaccatggattaaaaatttcggtattgccaaatcgatacccatcataccattcacaaatttcccgaaatttttctttcttcccataatagcacagcatattcttcacttcttcggttgtgaaaccaaaatactcgctgtagctatcttccagaattgaattcgttttcaaattgttcatgccactgaaaatgctttccttggccacacgcaaaatacccgtaagaaaaccaaaggccagatgcgaattgtccttcagaccgccagaaaagaaattacgcataaagtttacaatttccgggtaaaaattgcagttgtgtccctgttggatcggcgtatcatactcatcaataatgatgatacattcttttccgtaatgcttatgcagcagcagcgacaaaagctgaagccccatctgacagtccacctcatctgcaccgtcacctgcaagccgatggtactgctctttctcataagaactcaaaacagaactcgtttccagctcactgtgtcgtataaattcaagcgaaatcagcctgcggattttctgaaaggtttcttcccaggtcagacatttcacgtccttaaatgtcagaaagatgaccggatactgaccctgatgccgggtataagcagctccacactgccagatcttcttatccttaaagtagactgcagtgtcctctttcgttttttcaaaaaaaacgcgaagcatatccatattcagggttttaccaaatcgccgcggacgggtaaagagagataccatcggcttcgtatccagaaaatcacgaatcagtaacgtcttatctacataataatagttcgtcgttgccatcctaaaatcagagataccaatcggcaacggctttttcttttcctcaaaatccggtaaaactgcgttttcaggaatcatccagacgcgtccctttttcgatgcaccagaaatctccccccgcttacacatctgctggattcttcgaaccgtaatgcccattgtctttgctgcatctgcgcaggataaatagttcattatccacctccgaattagttctactcctatcataacccggcaagcgaaattttgcaatccgtatttcgtttttatttcgttcaaaacgaaatacggcaaaaatctctctttcgactcgaatctcccgcgttgacacaatctatatcatctgcggaaggacggatatgcgcaaatccatcccaattatgcttccctgcatccgctcagcctcttataaatatttctctacgatcttctccatctgatcccacttcgcttccatgtccgccaccagcttcagctgcgtccgcgcacggtccagattgtgctccggataagcgatct

SEQ ID NO: 5 - DNA, 5456 bp, Unknown
  16S sequences of unknown bacteria
accacggaaagcgcatcatcgccgcccgtgctgctgtgggaaaaggacaccgtcacagcgccgtttttctcatcctcaaacgaaatatctgtgacatgtatcgcgccgtagccgttgtcttccgtgatgtcccccatgggcagcgcaactcgccgccaggttttcccgccgtccgccgtgcggaacagatctggagccgtctcataaagttcaaaacggaaggatacaaaacccactcgctcactgacaaaacagaattcttccgctacacgggcatattgctcatccagatcgccatagatgggcgtatagatcgtgccataatcgtatacggtcggtttcggcccctcttcgccgtaaaagagataatgccgctcgtaacccatagccggtgcgctcgaaacgtgctgtacagcgtcctctccccgccaatttgggacatggcccaggcatacccggcgtctgcctctgaaatctcataccacgcctccgcctgttcgccctcctctgcgccgttccagagcacatgggcgcaaaaccctgtttcgttttcgacaaatgtgatagaattgcctgcatggctctcacccaaaagctgatacgccacaatctcggtgccgtccgccctgcccggacattccttccattgcacattatccagataccgggccagcgttttccctccaatggccatatggacgccatcgctgattccatactgtacaaactccgtttcgtcggccacccgcgccagtttctggtaaacttctttgtccggctttgccgcttcccctccaccgctgcgcccggtacaggccacaaggcaggtcagcaacacacacagcgccagcatcgcagcagcggtccgtttcaccgcgccccgtcgggcgatcagggtcaaacgtctacgcagcgctttccccccgccgcccatgggcgaagccgtgcataacacgctgtaacgccgcgccgggacacacagaaacgagagcagcatttcgccgtagaccgcccgctcttccgtcgtggcatctttcagcacccgcgcatcgcaggcgcgttcgcagtcttcacagctcgccttcgctccgatccacaccagaggattgaaccagtgcaccgcgcagcacacgagccgcagcagggcgaaaaaacggtccttgcggcaatagtgcgccagctcatggcgcagggccagcgcaaaataggtttcgttttccagtgccccgtcattcaccagaatcaccggccgcagcaggccgcacaggcagggagaggataaattctcgcacagatacacctgcagcggacacgcttccacctccacgcgcaccgccccggccatagctctgcgccggaacgcacggtttttccacagcgcatacagcagcactgccgccatacccagcagccacaccagcattagaatggccgccagattgaacactaccagcccggtcatcggcgcactgctcccgcttcccgcaacaggtacagtcagcccgggccccacagccgtcatcggaatatccaacggcgtctgcaccacggccgtctgcatgactgccgcggccatggcctgcgcctccatctcttttggaatgaaattcaaaaatgaaaaggcactcccaatgctgccgggaatcagcagccgcgccgccggcagcagccacaacgcgtacaacacccccggcgccatacgccgggcaaagacagcccgcagcgccaaaacggctccgatcagcaccgcgccctgaaggctcatcacaagcagaggctgcagcagctccgccccctccagcgcccatgataaaaacttcacttctcctcccgccctttcctcagcagcgcaatcaattcttccatatcgttttcatccagcgccgcagaatgcaccagcgactgagccagcagcgccacgtctccgccgtacacccgtctaaaaatgtccctggtttccttccgcacagcggtttcccgccgcagcaaggagcggtacactttcacagggccgccctccgcgcttgcaatggcgccctttttctccatccgcttcaaaaaggccgccactgcgggtttgctccattgatgcgccgccacgccgtcgcagatctcccgaaacgtggcctctccccgcttccagatttcctgcataatgatccactcactgtccgataaggtcacacggtcttgctctctcatgccgttttttctccttcctctgcgccgttttgtatcagtgcccgcgcactccaggcggcatgcagagcgccggaccccgccgcgccatcgctcagctgggcaagcgcccgtgccgcagcggcgtcttctgcggaaattttataacttgtgaggctgtccgccgttccagcggcgttggagcgaaacacatcggcgcggtagctcccagttgtcgtttccacaatggtcagcgtaccaaaatccccgccgccagtggcacttacgccaaaataggccagcaacgtcccatcgctttttcccgcctccggcagggcggcccaatggcgcgtacgcagatagtttgccagcgttttcccatggattgaagcagagcctcccgcctgcgtcaaaaccgtttcctgccctgccgccaagcggccaaagccccggtaggcttcggcgccgcttctgcctgtgacagccacaaggcaggccaggataacacactgccaatgccgcagcggtggcgcatttcatagcaggccgctttgccaccagagaaaaacgcgccttcaacgcttttgccccgccgcccatgggcaacgccaggcacagcaggccgcccttggccggccgtaccggctttgcggcccggacctccacgcgttgaacatgcggcgcatagaccacgccgttctccctttcgatccgttgtactgcgcctttttgttccagccgagtcaaacaaaccgacgccaagcgttcgccgacatctgccgccgcagccagatccgccgctgtaccgcttccccgaacccacagcgcttccaaaatacgctgttccgccgccgagcattcaatccgtcgttccatacccccgcctccctattaactatttgtctaataaaagtatagtccatgccctgccgcctgtcaaggacaaaccgaaaccaaacagttcataaaaagtgacaaaaaccccgctgcggcttttccgcagcggggtcgtctccagactggcttcaaatgttggccgcctgataaatgttgtaaatgtcgtctccgtccagcatctggaacgtaccgatggtacgcgcgccatggaaggtgcagcggtcggtcaggtcgcgcagtacctcttcgctctgcacgccgatctcggcggcttcgctgaagcaggtcggcacgccaatggatttgaagtaatccactgtggcctgaatgcccgccagggcgatctcctcgtcgctgccttccgtgatgttccaaacgtttttggcaaaacggacaaaccgctcaatccggttctgatacacatagcgcgcccactgaccccaaacggcggaaagagacgcgccgtgggcaatgtcaaacatggccgacagctcgtggcccagctgatgcggcgcaaaatcgccttggccgcccaggcctgtcagcccgttgtgggacacgctgccgcaccacatgacctcgctcatggcatcgtaatcatgggtgtctttcacggccttggcgccgttggcaatcaccgtacgcagaagcgcctcggcaatggcatcggtcagctcattgtccaggggattgaaatagcggtccatggtgtgcatcataatatccgttacaccgcaggccacctggtacaccggcagcgtaaaggtcagttccggatccataatggcgaatttggggaaattgaaagcaatattgtccagaccccgcttgctgccggtggccttattggtcagcactgaggaggcgctggtttcgctgccggcggcggaaatggtcaggataacgcccacaggcatggatttctgcactttctcctcgccagaccaaaacttccaaatgtccacatccgggttggctgcgccgtgggcaatccctttggccgtgtcaatggcgctgccgccgcccaccgccagaatgaaatccgcctggctctcgatggcgcgtttcacaccttcgcgggcatattccacagtcggattgggctgcacgccgccgaattccgcatagccgatacctgcagcatcgagctgctctttcacacgctggagcaagccgctgcgttccacgctgccgccgccgtataccagaaggaccttgctgccgccgtactttttcacataagccgccgtctcatcctcccggcccttgccaaacaccacctctgtaggagaccagtagtcaaacttgtgcatcatcgcaaaaactcctttccgatctgctttttcccatattgaaacgaaagggcttgcaaaccctttcgtctttggttacactgattatacaatctaaagtttacttgaggtcaagggaattttcaaacttttttcaaattattttttagcatcgtctgtaaggaggactgctcatcatggaaacctataccatcggccaagcggccgcacgcaccggacgcaccgtttctgccctgcgctattacgacaaggaggggcttcttccctttgtagagcgcagcgccggaggccagcggctgtttaaagaggaagatttcgcttatatttccatgattgactgtctgaaaaacaccggcgtccccattcgggacatcaagcaatacattgactggtgcatggaaggagacgcaactctccagcagcgccatgacttgtttgtacgccagcaggagcgggtacagcagcagatcgaggcgctccaggccgacctggaaaaaatccaatataagatctggtactatgagcgcgctctggagcggggcaccgaagccggcccccccggtagctgcgatcggctgaaagcggaatacgcccgcctgcacgcagccggtcttgcctgaacaggaaacgggcagcccgctgccgcaggctgcccgtttgcatgttttggtgctttgcgctgtatgtcttgtatcgtaaaggctgcggagcagtggctcaacgcagccgcatgtcggctgagaggtcccaaacaggtacaaaaaaaccacacggtcaaaacgtgtggatacaagcaaggcaccgcggtttaccgctgactgatctctctgtcgtctttgccgaaaatcatatcgtcgacgtcgagaccgatgaacttgtgatccatcatattgttatccctccttttcttttggggtatgtatatagtgtagtcctatttcctttgcttgtacagaggaaaagtgaccgaagatcctgccttctcctctttttattttggcattgtatacatattatactgtctcttatacacatctgacgctgccgacgagcgatctagtgtagatc

SEQ ID NO: 6 - DNA, 6221 bp, Unknown
  16S sequences of unknown bacteria
tcttttacctgatgagccgcggcatgagcgaggaggaggcccgcacgatgatcgtcaacggctttgccgacccggtcagcaaggagctcccgctcgagtacgccgtcgagatgaacaacctcatcaagctcgaaatggaaggggcgattggttaaatggaagcacgcactctcaacaacgtgagcgcaatgcccgctccgacctggcattggctccacatgaacgacgcgacggtcgaggtccccgaagggctcgacgccgcgagcgactttgccatcgacgctgccgagggcacggcaggcgcgtttgacgccgcgatggccgcggcccagaaggcctgggatgccgagcacgagggctacgagtaccagcgcaactacaccgacgagcaggccgagaagctcggtggcacgtcgctttcggcataccagcaaggcgtcgacgaggtcgaggcctccaaggacctcgcccgcatgttcgacatgggcatgggcggggacgccacggcattcctgcgcgaggtagccggcaccgcacgcgtcatcgaggccaagcgaggcgagcacgcaagcgcatccgtccgcatcgcggggctcgacgggcacgccaacgtcgccgcgctcgacatcgtcgccgcggcagacagcgagctcgacgtttgcatcacggtcgactcccccaccccgggcaccggccttaccggcagcacgatccgcgtgttcgcgggcgacaacgccaaggtgaccataacgcgcgtccagacgctcgacgattcctggatcgacctcgacgacatgggcctgttcctgggcaaccaggcagacgtgcagatcaaccagaccgtcttgggcgccggcaagacctacaccggactcgcgggcgacctgcgcggcaccgccgcaaacgccaacgtcgtgacccgttacctcggccacggcgaccagaagatcgacttcaactacaccttgcgccaccacggccgcaagaccacgtgcgacctctacgccaacggcgtgctcgcgggcaccagcaccaagacgctgcgcgggacgatcgacctcatccgcggcgcgaagggtgccgagggcaaagagaccgacaacgtgctgctcgtcgacgagggcgtccacaacaagaccgtcccgaccatcctgtgcaacgaagacgatgtcatgggcaaccacggtgccaccatcggccacatccgcaaggagcagatgttctacatggcaagccgcgggctttctcagaagcaggctgaggccatgttcgtgtccgcctccctcgaggatgcctacatcgaggcgcccaacgatgcgactcgtgaggcagtcgtgcgtctgggcaacaagctcgtcgatggttttggcgagctcgtagaagacaaggaggaggaactcgcatgagcatcgacatcgcagccaacccgtacaagaaggacttcccgcttctcgtaaagcaccccgacctcgccttcctcgacagcgccgcaacagcccagcgccccgaggtcgtgctcgcggccgagcgcgagttctacgagaccatgaacgcgaacccgctgcgcggcctctacgagctctccatccgcgcgaccgagtcgatcggaaacgcgcgcaagcacatcgccgcgttcatcggcgccggcgaggagaactaccgcgacatcgtgttcacgcgcaacacgagcgagtcgctcaacctgctcgcctactccttcgcgcccaccgtgctcgaggagggcgacgaggtctgcatcacgatcatggagcaccacagcaacatgatcccctggcagcaggcctgcaagcgcgctggggcaaagctcgtctacctgtactgcgacgagaacgggcagatttccgaggaggagatgcaaaagaagattggccccaagaccaagatcgtctccgccgtgcacgtctcgaacgtcctcggcgtcgagaacccggtcaagcgcctggcagagctcgtccatgcacagggcggctacatgatcgtcgacggcgcgcagtccgtgccgcacatcaaggtggacgtgaaggacctcgattgcgacttcttcgcgttttccggtcacaagatcttcgggccgatggggatcggcgtgctgtggggcaggcacgagctcctcgacgcaatgccgccgtttctgacgggcggcgagatgatcgagtccgtctccgagcaggatgccgtctggtccgaggttcccgagaagttcgaggcgggcacgcaggacgccgcgggcatctacgccaccgacgccgcactcacctacgtcgagcagatcggtctcgacaagatggaggagcgcgaggccgccctcatggcctaccttgccaagcgcatggaggagctcccctacatcgaggtcgtcggccccaaggacccggcaaaacgctatggcgcattcagctttaacgtgaaaggcgtccacccgcacgatgtttctggtatcttgagcggagagaatgtagccattcgcgcgggccatcactgcgcacagccgctgctcctgttcatggggatgcatacttgttgccgtgcttccgtcgccttctacaacgacaagcacgatatagacagcttgatcgacgcgcttgacgttttggggggaatgttcaatgtcaaatagcacgattaccagcatctactctgctgccctgatggaccacaacgcccatccggactacaagtacgagctggaagacgcgacgtacagccatgacggcatcaacgcgagctgcggcgacgagatgacgctctacctcaaggtcaacaacgacaccaacgtcatcgaagaggcatcgttcacggggcacggctgcgcgatcagccaggcttcggcagacatgatggcagggctgctcgaaggcgagtccatcgaggaggcgaagcgcctctcggggctgttcatcggcatgatccagggcaacgagctgtccgacgaggacaaggaagacctggacgaggctgccgagctacagtccatctcgcgcatgcccgcacgcgtcaaatgcgccgagctcgcctggcgcacgctcaacggcatcctcgccgagcgcgacaaggagctcgccgccaaataacggcaacgcacatatcgcacgacaagaagaccccgggaagcgcatgcttctcggggtctttgctgtggagcttaagggcagctgcctacttggcgtcgacgctcacgagggagtagaagtcggcgcccgtcgcctgcgcgacgacctcgcgcggcttgaacccggcaagctcgagcaggaaacccagaccgacgagctccgcacccgcctgaccaatgagcttgaccatcgcgaccgccgttccgcccgtcgcgatcagatcgtcgacgataagcaccttgtcctcggggacaatcgcatccttgtggatctcgaggaagttcttgccgtactcaagctcgtattcctggcaccaggcctcgcgcgggagcttgcccggcttgcgggcagaaacgacccccgcgccgagcttgtaggcgaccggggcgcccaccatgaagccgcgggcctcggcgccgacgaccttggtgacgccgcgccccgcaaagtggtcggcgatatcgtccaccacgcgctggaagccctgcgcattgccgatgagcggcgtgatgtcgcggaagagcacgcctggctccggataattggggatcttggcaatcaggctatcgtaatcgaaggaactcaccgggcaatcctctctcgcacttgtttcaggatgtgttttcacaagcacccatgatagcgcgaacggcagcatggtcgagtcgggatgcgaggtgaagcccgccattttgcgctgccggactgataagccacacgtcgccggcgagtgctgcgcattcacgaataaccgccgcttccgcattcccctgcggctctagtcggtgatgtccgaatctagggcgaccgagaacgagtagccgggatactgcttttccatcgtgctcttgatatgctcgagcaccgcatgtcgatcgggcgcatcgaagctgatgaccaaatcgaagctcgcgtacttggcgtcctcgtcgacgtagaagccgtgcacctcgatgatgttatcgtcgtcttgcgccaggtcgtacaggtacttgcgcatctgggcagccgcgttgtcgcccgtgttcaccgagtagatgcccaccgtgtggagcacgacgttgtgctcttggaagacggccttggagatcgcgcgggtcaggcggtcgatctcgctcgcggtcatggtatcgtcgacctcgacgtgcacgctgccccacagcttgtcggggccatagtcctcgagcagcaggtcgtaggcgcccttcactccctcgacggagctcacggtctttttgatggccgtcgtcagatcggggtcgatgcgctcgccgatgatcttgctcagaacctcgcgcagcatgtcgatgcccgccttgatgatgacgagcgagataatcacgccaagccatgcctcgagactcacgcccgtgaagatgaagataaacgccgcgagcagcgtcgccgccgagatgatcgagtccatgagggcgtcggtgcccgatgccacgagcgagcccgagttgagcttctgaccattgcgcttcgtgtagagtccgagcacgatcttggtcacgaccgcgaccgccacaatgacgagcgtcacggcgtcgtagcttgcctcttcggggttgatgatgcgtccgaccgactcctgcagcgaggtaacacctgcccacaagacgatgacggcgacgatgatggtggtcaggtactcgacacgaccgtagccgtaggggtgcttgcgatcgggtcgcttgcccgcgagcttggtgcccacgatggtgatgagcgacgaggccgcatcggagatgttgttgacggcgtcgagcacgatcgcgatcgagttcgagagcaagccgaccgccgccttgaatgccgagagcagcacgttgacgacgatgccgacgatgcccgtcttgatgatgcccttgtcgcgctcgtccatgcccagctcgagaatgcgcccgtccgccttgatctgctcggatttttcccctgccatggtagtgaaccctcgattctcctcccgcgcgtctacagctgcgccttgattgccttttcgacctcgtccatatctgccgtgggctcgaagcgcgcgacgagctccccagcgcggttgacgaggaacttggtgaagttccagccgatgttgaccggctcgccgtattgcttgttgttcttcttcgcaaactgctcgagcgcctttgccttgacgccgcggccaaagccctcgaagggcttctcggcggcaagcgcggtgaacagcgggtcggcgtccgggccgttcacgtcgatttttttgtactgcggaaactccgtgccgaacttcatcgtgcagaactgcgcgatctcctcgtcgctgcccggtgcctggtggccaaactggttgcaggggaagtcgaggatctcgaagccctggtcacggtaggcggcgtagatgcgctcgaggtcctcgtactgcggggtgaagccgcagcccgtagccgtgttgacgatgaggaggaccttgccctcgaactgcgtgagggagacctcggatccatcctgtgcggtgaccgtataatcgaagaagctcatgatgcacgccctttccagacgtcgccggatatatgattgtgtacgattctaaatcgaccgaagttactccaagttaacgagtgtgctacgataatctgcctgaccatgactaacacagctcccgaaaacatctacctcgactacgctgcggcaacgccagtcgacacacgcgtgctcgacgcgatgctcccctacttttccgacgtgttctacaacccgtcggcaccctacgcactcgcccgccgcgcgcgtaccgcgttcgaggacgcccgcgcggcactcgcccattgcatcggggcacgccccatgagcatcacgctcactgcaggcgccaccgaggcgaacaacctcgcgtttgccagcgtggacggcacggtgctcacagatgccatcgagcacgagagcaccctttcctgcgcgaaggcgcgcgaacatgtcctcgtcgacgtgacgcgcgagggattcgtcacaccctctgccgtcgccgctgcgctcactcccgacgtcgagctcgtgagcgtggcacttgccaacggcgagataggaactgtccagaacctgcgcgagatt

SEQ ID NO: 7 - DNA, 9690 bp, Unknown
  16S sequences of unknown bacteria
ctgttccgcaacctcaatcgtcgtctttggcactgccgtgccaaatcctcgtttcggttgacggctgtcagtcgctaactgccttcggcagttgcatccactggatgcccgctccttctcgccgccctaaaaccccggcaggcaccgcagggaaggcgcaaggcgggttgcccttgggcaacccggtctgcctttggcagactgaacttttcaaatagaatttgaaaagttcaccgtcgcccagtgggcacaaccgccgtaggcggttagcgacccgcaggtgtgtcacgaaacgagcgggggctacggcagtagtccctgcgacgattgagtggcagcagtgcctcctgcacctccacttttttgacacactgaccgccgctcctgaatttcttcagaagcggcggttttttcattttcttttggaaagacttccccttacccctgcgtcacatccgcaaaggtgtaagaaatcatcttccccaatttctccggggatacctccacctgatagccgattttcccggcgctgaaaataatcgtgtcccaaagctgcgccgtttcgtccaccaccgtaggaaacggcttcttcataccgatgggcgaacagccgccgtgaatgtagccggtcaagggcagaagttccttgctcttgatcatctcgatcttcttctcgtggacggcggaggccgcctttttcaaattcagttcttctcccacgggaatgacaaatacataatatttccccgaggctgcctgcgtcaccagcgttttgaagacccgttcttcttcctgccccagctgacgggccacctccacgccgctgagggctccgtccggcgcggcgtattcgtaggaaccgtagggaatcttggctgcgtccaaaagacgcattacattggttttttccatggtcagaccgttccttctgtgttattcggcgggggcgtccgtgggcagcgtcgatgtgggcgcgccgcataccagacaggggcttaacgaattggtgtacgaggcaagctcactgtacgggaaagagtccgtcagcggacgatattcctccttgatgctgctgcagttggggtccatgtggtagtaatggccgccgttcgcgttgtaatacagtagcgtacttccgggaggggcggggctgaccgtagtgcggggagcctcggtctgcgtcacgttgtccttggagttgaccaccacgtcctcggtctgctgctcgtcattgctggccagagaattgggatccacgtaccactggttgccctctttgaccatcagtacattgaagcggtaggtcttgggatccttgccgttgtgcttgtcgatggtggcggtcatgatgatgctgcggctggtgtcatcatccgtgccgcccacttcctcgatggtgtagctcaggggagtacggttattcaacaccgtctggaaaagctgagccgcggcgttttcctgctgggcggcccagctgggctgcacaaggctggccatagcttcggtctgattgcccgcccagttgttcatgaaggtttccagacgctgctggacttccggcttgctcaccggggtgggttcggggctgggcgtaggagtgatctccgccgccgcaggaaccgcgttttcatcgggggcaagggtgctctgggcgctggcgggcactgcactgccggcagccgtctgacgcagatcccgtccgccctgcatggacagggacagagcgatgatgctcagcgccacgaataccacggacagcacaacccgagccgtggaagagtacatctgccggtaccagactacgcccagcccggccacgctcaggccgatgaacaggtagcgcaggatgttcagactgctggaaacaaaaatgcagggcacaaacagaagcggaagcagcccaaacaggaaaatgccgaacagcaggttaaaatccagcggcttgcgctgcttcggggcatggccgccctgctgggcgctgccgggcaggggaacgccgccctgcatgggaatattctggggcgttcccggcatggaaccggcttgaggagcggcgctttgctgcatcatggccggatttaccggggcgtaattcatgcttccctgattcagaaagggcacgcccgactgcatatagcccacgttcgtcatgggattcatgggctgcaggggcgtttggggcgcatatcccatcggccccggcgctgcgggctgcacattgggcgcggccgccgtctgggggggcacaaagccctgggagcgaacgccaaacccgctgctctgcaaagggttgaccgtattgcccagcggcggaaaatttccgctgccctgctggggcatcatggggaaagccgtcatccacggatttgcccccggaatggctcccggtgtcatgccgcccatgggatagccgcccgcaaatggctgctgatacggcgcggccgcatagggaacgctccccgcctgcatgggattgaccggctgtaccggcgctgcgggctgctgcaccggcgcggtaaaaaaatcggcggctggcgcagcggtagactgctgggtcgcccgggcaaaatcggggcccataacgctctttggttgaaacagaggctttttgcccagcggcgagcgtttctgcatcccgtaggtgggcgtggatgaatatttcatgcgatttccgttcatattccatctcctgatgacagcggtatgtttccttcagcaataggataacccatccggggcaaagcgagtcacgccgaaaaaaagttcagacgaacccaagcctattatagcacatattgcatttttgtaaacaaaaagacgcatttttgcctcatttgggagtcctttccaacaaaagaaaacaaaaaagcgaacagccggtcatcttgactgttcgccttatgcgacgagaaggccatggaggtcaaagccgtttattccatcacaatcgccttccgtttgccgttttttcctacgggatattcccgaagccgaatgacaaaatccagattaacgacggtttcctttccgtccttttcaataacggcggcattgtccgctatttctttcaaaatcccgtccaccgttcccgaagagatcgtgctggcgatcacatccttgccaagaaaccgctttgcaagctcctgcatttcgttatctccgtttcttcttttgattctcgtttccagatatttcgtcgattcctttcggttcagaaaaagaatcagaaaaatcagcaggatcggaaaagaactcatccaccaagtctgcataccgttcctctttcccctgtctttactttgccaaaaaatccgtgattagtgcgcaggcttcctccaccggctgctgatccatctggagccagtgaatagccccgtcccggcggaaccaggtcatctgccgcttggcaaactgcttgatggcgatggccagcaggcggttcagttcctcctcgctgggaatcacgccggtcagatattgagtgatgagcttgtattccagccccagcttcagcagaaattcctcgctgacgccgccttccatcaggccgcgcacttcctgaatcatgccctcctgaaagcggcgggtcatgcgctcgtcgatccggcggcccagcacgtcccggggccaggtcacgcccagccggaggcagtcgtaccggggctgtttggtggaggggccgttgtccccgtcatggagcttttccagcacccgcatgacccggttgcggttgttgggctccacatcgctggcgggaagcttctgcatcagcagggcgtacagctccggcgtggtcagcttttccagctcccggcgatagctcaggtcgggcattgtgccggaaagctgatacccgtccgccaccgcgttgacgtacagtcccgtgccgcccaccagaaaggggacttttccccgggccaggatatcgtcgatggcctcataggccagccgctggaaatccgccatggagaaaaattcgcccggctctactacatcgatcaggtgatggggcacgccctgcatttcctccggggtgatcttgccgctgcccagattcatcccgcggtagacctgccgggaatcggcggaaacgatctcgccgccgaagcgcttggccacctccacgcccagtgcgctcttgcctgaggcgttggtacccgcgatgacgatcagcttgccctttgttttcgggggccgctgataggcgatgcgctccgtcccgtcctgcatccatacgatgccgcagcggcggaagccattgcgctcaaaggcccgctgcatgggcagattgtccgcgtgagtgtcgccccggagattgtcgcagcgcgtcagcgcacactgggcgatgaagtccaccatgcctttccgttcgccggaggacgccacccggtgcagggtctgataaggcagatcgttcagccacgccccgtcgatgcggcggtagttggggtcttccccctccagcagcatgaaggcggcgtacagatggccgttttcctcgcatacatagccccgccgcagggcgatatcctcctgaacgatctccggggtggggtagacgttgcgccactgggtgggattgccgtgggcggccatgaaggcctgcgccccatggtaaatttccatcacccgctccagatcggcttcggtggtcagacgtacttgcatcaaagggaaagctccttttcggttctccttgaaaacgcgccttacagcgcgattccgtacaggcggcaggtgttttccgtcgccgtctgtgcgatttcttcggggggcttattccgcagctcggccagctttccggccacatactgcacgtaggtcggttcgttgcgccggccccgcatgggcacgggggccagataggggctgtcggtttcgatcagaaaacggtcgtcgggcacgaatcgggccacctcctgcagacgggcggcgtttttgaacgtgaccggcccggcaaaggaaagataaaaacccatgttcagatattcccgggcggtctccacgctgccggagaagcagtgcagcaccccggcgggcagctcgcttcgatgggcccgaagcaggtccagcatgtcgccgtgcgcgtcccggatatggaaagccaccggcacgttctgctgtttggcaaaggccatctgccgcagaagcacttccttctgcttttcccggggcgagttttcatagtagtaatccagcccgatttcgcccacgccgacgatctgggggtcttgcagccaccgggcgaaatcgtccagctgcgcctcccgaaaaccgtcggcctcctgcggatgcacgcccaccatgccgtagatgggggcgtgctcgccggtcagcgccgcgatacggcggctggaatccaaatcgcttcccgcacagatgcagcggttcacgcccgccgctgccatgcgggaaagcacctgctccacttcgccctgaaagcgctcgtcttccagatggcaatgggaatcaagcaaattcatcatatcgttcagcggatgtacgcgccgtcctccatgccgggttccacggtgcagagcttgagcaccttgtcctccgcgtcggaggcgcacaggatcatgccttcgctcttgatgcccttgagcttggcgggcttcaggttgctgaccagcaccacctgacggccctcgatggcctcgggcgtgtagaacctggcaatgccgctgaccacggtgcgcaggggctcgccttcgcccagcttcacgctcagcttcagcagcttgtcgctgccctccaccttttcggcggtcagaatgcgggccacccggagctgcaccttggcgaaatcatcgatggagatgatgccctcgggcagtttttcctctttcttttcttcttttttggcggtcttggcaggcttcttttcctcagccttgggcgcttccgccttgggggtgggcacgatgtccgccaattccttcttcacgtcgatacgggggaacaaagcctcgcccttctgcaccttggtgcccgcaggcagcaggccgaagcgggaagcggactcccagccggtcagttcgccctcggcaatgcccagctgctcgtagatgcgggcaggagtgcggggcatggtgggcgcgatcaggatggccacgatgcggatgcactcgcacagcacatacaggacggttttcagccgttccttgccatcgtcggtctttaccagcacccaaggcgcgttcacatcgatatagcggttgcactcgcccaccagctgccagatatcctgcagcgccagcgagaactgcagctcgtccatatgctgccgggccttgtcgggcgtgccctcggccagcgcgatcagggccttgtctacgtcgttccactggccgtgctggggaatttcgccatcaaagtacttctccaccatggccacggtgcggctgaccagattgcccagatcgttggccagatcggcgttgatgcggttcagcagggcttcgtagctgaactggccgtcgctgccgaagggcatctctctcatgaggaagtagcggatggcgtcgctgccgtagcggttgcacagcaccacggggtccaccacgttgcccagagacttggacatcttctggccgtccagcaccagccagccatggccgaacacctgcttgggcaggggcaatcccagcgcgtgcaggatgatgggccagatgatggtgtggaagcgaatgatctccttgcccaccagatgcaggtcggcgggccagaacttccggtacagctcgtcgtgatcggtggtgtagcccagcgcggtgatgtagttggtcagcgcgtccagccatacgtacacggtatgcttggggtcgaagtccaccgggatgccccactggatggaggtacggctgacgcacagatcctgcaggccgggcttgaggaaattgttgatcatttcatttttgcgggaggcgggctggatgaaatccggatgctcctcgatgtaccggatcagccagtcctgatacttgctcagcttgaagaaataggcttcctcgcaggtcttttccacagggcggccgcagtcagggcagttgccgtccttcagctgcagttcggtgaagaagctctcgcagggggtgcagtaccagccctcgtagctgcccttgtagatgtcgccctgctcgtaaagctggcggaagatcttctgcacggccttcacatgacgctcgtcggaggtgcggatgaaatcgttgtagtccacgtccatcaatttccacagatccttgatgcccgccacgatctcgtccacgtaggcctgaggggtcacgcctttggcggcggccttgcgctcgatcttctggccgtgctcgtccgtgccggtcaggaaataggtgtcatagccctccagcttcttgaagcgggcggcggtgtcggcggcaacgctgcagtaggcgtggccgatgtgcaggttgtcgctggggtagtaaataggcgtggtgatgtagtacttcttctggttttccatgaggctttctctccttctggccgttcttccttcggcattttttccaaacagaccggcgatgtttttgaaagtttccggcaatgaaaaagcccgtccctctgcgttttcactgcaaaaggggcgagcggaattctcgcggtaccaccctgatttgtcacttacggcttttggccttcggcggataacggcgcctgccgtcccgccctacctgtcgaacgggatcgctcgcgggccatgttcggtcagcccttcgcgccgcatttcaccagccgcggctctcttgtggcgaagaggaaagacgtactctcccggtcattgcgaggaatatcctttattataacggtttttgccgggctgtcaatgggaaaacgcggtttttcgggccgttcagccgccggaaagcagccgtcccgccagccagaccccggccagcattcccacaagggaacagacagccgcatagcccgcccgtttgtccttcgccccgctgaaatacacgcacagggtataaaagatcgtctcgctggagcccatgacgatgcaggccgtcatgcccacggcgctgtccgggccgaagcgctccagcagggtttccagcatgcccagagaggccgaaccgctgaggggccgcaccagcaccagcggcgcgacctcggcaggcaggcccagcagcttaagggccggagcacagacatggcacaaaagccccagcaggcccgattcccgcatcagggcaatggcgcagagcatcccggccagattgggcagcacccgcaccgccacctccatgccctgccgggctcctcgcgcaaagacttccagcacgtccagccgtttccagccggcggccagcagcaggccaaagatcagcaccggcagcagcagatcggaaagcgtcttcatttccgtccctcccggcgcccgctcaggcgataacacaaaagccccagtcccgcacccaccagcgtggaaaaggccgtgcaggccagggtaggcagcaggatggcgttggggtcggcggaacccgccgccacccgaagggtcagcaccgtggtgggaaacagctgcagccccgtggcgttcaggatcagcagcatatacagcgcgtgacgtaccctcggattgtgttcctgctccccgtccatctgccggacggcttcgatcccggtaggcgtggcggcgttgcccagccccagcagattggccgtcagattcagcgttaccgcctgacgggcttcttcgcctttcagggtgggcatcacaagccgcagaaagggccgcagcagccgggccattttctccggcaggcgcagctccttcatgatctccatcagcccgcagaaaaacaggtagcccgccatcagccgcaggctcaggctcacggcggaggaagccccgtccagcgcggcgggcaaaagcgaccccgcccgccccgtcaggcagccgtacaaaagcgacgcggccatcatccccagccagatccacgacaacagcaaaatgattcccccttccgcggcttgtacagcctatgcggaaggggacgggatgatgtgcggccggagggcttcagatccaccactccggcatgagccggtccagcgtgaccacgcggcccgttttccagtccagcagaatttcgattttctgatagccgtctggcatgagccgcgccatcatttcccggcaagcgccgcagggcgcgcccgtcctgccgtcgggcatcagcgccagcacccgggcgatcttctgctcgccgcaggtcagcatgtggaaaactgcgttccgttccgcgcagatacccagcgtacaggccgtatcaacgcatacgccggtataaattttccctgactccgatagaatagccgccgcgaccccgcccgcttccacgtattcggataccctgcggccgctctgtacggccttggccgcatcatacatttctttccaaatcgcatccatcgttttttccctttgttgtgatcaatttaccttcatttcaagcccctctgcctatctaagccagttttccttggataggggtttgaggaaggcgcttccttttccaaaaggaaggcctcagtgtgtcaaaaaagtggaggcgcaggaggcgctgctgccactcaatcgtcgcagggactactgccgtagtccctgctcgtttcgtgtcacacctgcgggtcgctaaccgcctacggcggttgtgccca

SEQ ID NO: 8 - DNA, 7132 bp, Unknown
  16S sequences of unknown bacteria
tctgacagagccgccctcattgcctgcgacggttttatcacgctcggactgtgactggacgggagtaccattattctctttgtgggttatggcgaaatcggaagcaatccgatattttcagtcggtaatgaatgagatcaccccctttcatcgctcgctgcttcttaacaggtcttggcgtaccgctgcacacgcttatgctcatcacaatcacaaagaggaagtatttggcgaatggatattcggttgtcaaggatcactcccgttttcgccacacaaagcaaaacaggtggaaggaatttaatccctctcacctgtttgctcacttaaaagcggtttcgtataggctaaaattaaaatttttcaaaaagtttttttaacttctttagtgcaatgtcaacgcttcctttaaccgccattttggtgcatccctccaacttggcaatctgctcataggacaactctccgaaaaagtacaacagcagcctgcgtctttgtgtttcgggcagttttgatattgccttatgtagcagttcgtattcgatgcaccttgaaacggtttcctcaagactttcttccttataaaaaactcggtcattcaaggagttttctgtcaactcggagtgttcaatgtgcctgctcacccgattaagataggaaatatcctcaagctcaaaacggttaaacaggtcatacagcactttctctatttcaatattttgcataacaccccgcccatctttaaaagagaggtaatatctgccctctacaatcatcagcgtataagggttatgcttgtccttttttcggttaggatgtttttcattcattctttgttcctccaatcaatctgaatttttgaaatttcagattgatcggcggtgaacgacaccctacgccacaaacaggcttacgacttaattcaacaaaaaacgacaaaagaaaaaccgcaaaggctgtcagacctttacggttataagaaatatcaattctattatatagatatttaatatctactcttggagcataatttccccaaatggagataagaatttttttaacaaattatcctcatctctatcgaacggtatgtaaataactgctgcttaaaatcagcagcacagtgttatcagaccaacacataagaaatccctccaaacttgaaacaggtctggagggataaaatagccatctgagcatgacaaaattgcccaccaaaacaccgttttttttatttggcggacttgtcaaattctatattcatgtaaaaaaagagccgatgacttatgaggttatctcacaagttcatcggctctgcgtctatgcgtctggctctttgatgacggttatatgtaatttctttgcatttattaaagtttctttcttacatttcggacagtaaagaggataattctttaaaacagtatcttctctaactctatcacgggttttgttgccacaaatcgggcaaataatccattctgaaatcataaattatccatctccatttatcatgttttatttaatctttctattttatatttactatcttgacaaattcatatcgtacacttatctggaattactattattctctaaacttttttcaagaataaagaaaatatcgtacctttttcatcggatgccaccttgatatacccgttctgcttattcacaatatcacgggtaagatataaaccgattcccacaccgtcaactcctgctgactgctttccacggtaaaatctgccgaagatttttgcctgttcttcttcaggaatgccaattccgttatcggatacatccaatcgcaaatacgatggatattcggtgattttcaagtccacaactcctccgcttggtgtatatttcacagcattgtcaagtacattggtaacagcttctgccgtccagttaaaatcaagcagggcttcaaaggtctgcccacaatcaaaggtaatcgtaatatttttatcccttgctttggcataaaccgtttttaccgcttgcataacaatatcatttaaactgctttgttcaggttttaatcggataatgccactttccaaacgggacattttaatcaaactgtttgtcaaaaaagtcagcttttcaagggacatctgcaaggtggcaatatattcccttctctcctcatcggataaccctgtatcacctaataactgtgcaaaggtgtttgccgctgctacgggcgttttaatttgatgcgaaatatcggagattaaagttttaatctgttctttctcctgtgtcagcatttgattctgtgcctttaaaatattgcggagttttagaagttgatgctgcagccgtgcggtcagggtatcctcagcttctgaaaagaccgtccgttcctgctgttctaccaatgcttcaatgagcagcgtaatctcctctaacagattatcattatagcggttgtgcagaaagtccagcaggaacaacagacccccaaaaaatacaaatgcaaaagagataaaaagcgtacggaaaaggatgtcctccataaaaaagaacacaccaacagataccaccgccgtagcagtacctataattaaaatcagttttctataaatcacaaaatgcttcatcgtcattctccaaaagagtagcccatgccaaaaactgttacaatgtattcctgcttttcatcattcagtttctgccttagccgcttaatattcacacgcacggtattatcatcaacaaagtttccatctatatcccaaagctgttccaaaagcattgcctttgtaacaacccttcccctgttttccattagataaaggagcaatttgtattctgttgaggtcaaatgtatttcctgtcccttcatcaaaacaacacacttttctttatctaactctaaatctctgtatttcatacgaaattttcctatgccggttctttttagaactgccaatacttttttccgtaaaacttcgatagaaaaaggctttgatatataatcatcacaacccacgccaaacccttccaacatatcttcttccgtatcattagcagttagaaataatacgggtgtttccgatgtttcacgaattttttcacaaaattccaaaccattgccgtcaggcaggttaatatcaagcagaaacaaatcatacttttgtttttggtattgcttcaatgcttccaaatacccatagactgctgtgaccatatgctcgtctttttttagggcgatagaaatacccttgctcagaattttgtcatcttcaagtagaaaaatatttgccatagccgcaaaacgcaccaccttcctcaatatacaaaattgcaggaacagacgcagcaatgctgcgtccgtcccacaacctcatttaactatcaaaattgtgcagtctttcaatgaccgtttcatcagaagttgccttgtaaacaatggcaggaacgcttaagcaaattacaaagattgctgcgatcaaaccgatgacaagtgcaacagggtatttaaatactgcatagtttgccatatgcggaactgcatctgccaccaacattaggaacgcattaccaaaagtcataatcagcagagtagaaatcagagcataaataccgccttctaaggtcaatatcttcctgatctgctttttcgttgttccgatactttccataatggcaaattcatttttccttgccaccacacccgtcaacataacatttacaaagttaatcaagccgatgacaatgagcagaattgcagcaccgtttcccagcaagctcaaagagtagttcatctggttatatagttctttctgattcacggaagatttcagctgccactccgatgtggtcaaggtactgttgatcgcctgtaattcgctgtcaattcgctctaaatcgttgaaattcttaatgtcaacgccgattgcggaaattattggttcttttgtcaggcgttccatacccgcttcgctgacaaagataacatctggcaccatatttatttctttgcgtctgccaataccttctgaaagagtattatcataatcgtcatagtaaaaagctccgccaattttgaaatcagttgccttgccgtctgtactgtcggcagttagtgtcaatgtttcacccactaaagcagtattaggagcgttatattcggtatcttttcctgcaatcgctgtttcgccacgcttaaatgcttccatgtcaataggcgtatcaggatgctctgcattgtattcttccagtaccctgtcgtctggaagcgttgtaatatagcagccatagtcaccagattcagcgtaccctttcagtgtttctatcgtctgttcataggactgcccctttgctttatatttgctgtcctcatatttgattttcataaagccttctaaatcgttttcattaaagtcaatacctgcccagactgttttttgaacatctatatttttaataccgtcaagctgcttgatttgttctacaaagtgttcgtcaaactgcggtacttctttattgagctgttcatactgctcaaactgaatatcagtgtattcaaagttatagtccatatattccttaataaagttctcagccgacatactgcttataaccccatttacgcctaaaatcatagtaattcccataaacaaggacataaacacaagggcagcacgctttttgtcacggaatacattatgaaatgccatcacatgcagcttgccaccattggtggaatttctgctttttgttttcttcggtgcaaaattctgaaacttcaatgcttctattggcgaaatttttgcagccgcttttgcaggagcattgcaggcaatccaaacggttactgctgaaaagattacggacaaaatatagatagatggatggaaaaacacttcggcatccatcatcgacttgccctgttcaaaaccctcgttcaacacaaatggaacaattccaaaggaaacagcggtggctaacaaaataccaatcgggataccaatgcaagcaaacttaactgcctgattttttaccagtgatttaatctgtttttgcgttgttccaagcgttttcatcaaaccgtaaaaacgggtatcatttgaaatggatatatacaaaacattgtaaataaggagatacccgctgccaataataaagaataccaataggattaccattgcaatcactgaaccgcttgatgatttcatggaaaccgcaccgccgaaagattgattttcgttaagctccacatctttttgaatacgataaaaatcatcaggcattttattcaacgacaaagaaagaacgccgtcctctgccattgtatagcctgcatttttgcaatacgcttcggaaacaaagcccattcccgtgcctgtataggaatgaaaccatccgcttaaagtgaaatttttttcctgctgaccgtttttatcataataggacagagggatttccatattcagcttcggctctttcattccaagctgtgaaagagcatcctttgacagcataatttcattttcatttgagggatatttcccttctatatctttgattgtttctttatagtgtttatcccattcagtagtgtcgtaatacgaaagtgcgatagaaagatcacgcccctcatcgttcttctcggcaaccgagccgaccatatactgcgtaccgacggttttaacatattccaaattcttaatctgctgttcctgcttttctgtcggcatcgcaagggaagcattagcggtcgtgcctgcggtacgcacctgcattaacttcatattttccatatagttaatgcccaaactaaacacggtagtaatcataaaggtagtaagaacgattgcaaacaccgcaaacaggttacgaatacggtttgctttcatcattcccttttctactcgcttaactgcttttttatttcggttagcgtgcatatctgacacctcccgaaacaaccttgccatcctcaatgcggattgtgcggtctgccatttgagcgatttcctcattgtgcgtgatcataatggtggtttggtggaactgacggctaatcgactgcatcagcaaaataacatccatacttgtttttgagtccaaatttccagtcggctcatcggcaaggataatggcaggctttgtcgcaagggcacgggcaatcgcaaccctctgctgctgaccacctgaaagattattcggcatattcttaagcttttgttccaagccaagagtatggataatctcttttacaaatcttgtatcggtcttgccaccatcgatctcaatagggtacacaatgttctcatacacattaagaacaggaagcagattataattctgaaaaacaaagccaatgtttcgacgcctaaaaatcgtcagttcctcgtctttcattttcaacagttcttttcctcggatagtaacactaccagaagtaggacgatctaacccaccaatcatgttgagtagtgtagatttaccgctgcccgatgtaccgataacagcaacaaattcgccttcctctacggaaatggataccccatccaaagcatggacttcgttttctccgcttccgtatatctttcgtaaatcttttgtttcaagtattgccatattaaaacctccaaatttctgtttttattttgtaagttcagtatagcaaccacctcttacaatctcattacaatccaaactaaaaaataacagcatttcttttgttcataccatgcacttttacgaattgatttctttttttaatgaagcaatccactcctctattgcctctgccaatgtgtattgttgccgtaaaactgccatacccgtaacaggaatatcttctttactctttttcaaagcaatattttcttccagatattttttcaatacctccatactgctctcaatattatccagacattcttgctgtctttctctgggcatactgtccagatttacaatgacagcattaaaatccaaaaaaatgtttatcggcttacaggatatttcaagcatcaatttttcaaactgctgtttccctttttcagttaaagaatacactgatttttctggcattttaccctctttttctatatgacttgaaatatatcctttttcctccaactggataacctttttataaatagac

SEQ ID NO: 9 - DNA, 2050 bp, Unknown
  16S sequences of unknown bacteria
ctctgttctgcgacaatgcttcccccctgagaatcaaagtttactgtaaattgtgcaggtactacatttacattaaaaatgtaatctttatctgttgttgcattattgttaataggatgtccaccaaaacttataataggaaccaaggatttataataataaccggattgaggaacaccgtttactacaagcttaccaagcacttgaacacaataataatttgttcccccggtacgtgtatcagcttctgttctcataggaatttcgctgactgttgtgggtacattttgagtagattcacgatagaaataatcttcagtgccggttgctttgcttcgttcccctaccgttccgttttgaatatcaaaccaataatattcaaactctacataggtatctgtactttcattggtattttcgtttttcattaatggatgagtaacctggacaccaatagtaccaaaacgttgtacattataaggactcgattgtgatattggttgaccattcatagaatattctacatttggttcagatacaaaatcatttttccatgtaacggttaaagtatctgccggagaagtaacactaatttgagagtcggccgtcagttctttgccatccagctcccaacctccgtaatatcctgctgccggagtgggtacaccagtcggttttggcagttcataatgttcgtctaagctccaaacaccgtttttctttacatactgaactgtattattataaagtttttgttcggtagctatgcttaatccgttatatacaaaattaagtgttacaccataagacaagttagcatagcttgccattgcattttttttcgtttcatctgcattttggtaagtgctgaaatttggaaacagtaccgttggtctattactttcccatgtggaattagagaaagcatctttatcggcaccttcaaaactacttgcatcttccaacacaaatatatttttactgcattgtgaattggaaaaagcggaagcttttatcgtagtcactgatgcaggaatacttactactaaaccatcatttttcatcttttgataaataggcgaactgccgctgaacgaaaatgcatatttaccaatcgtggtgagactttgcggaagttccaaaaaattttcatctccaacagcgtctctcataccaataaaggctaaattagaacagttaccaaatactgccatattcgaatccaaactgccaattgaggttaacgtacttggcaagataacacctgtaatagcagtaccattaaaggtatttccacctatctccgtaatttttgtatttcttaagtcaattacgcctccaagtttttttgcatcataaaaaacttgcttgttaatcttggtcaaattggtagcagcagaaaagtctactgctactaatttatccacaatgtttgctatttttacacttgaacctcctgcagtcggagttcctgatgcataaatattgggactgaacacacttgcgtatatttcagttgttttctcaggtattttaatggcaacaaattgtactcccgcatctgttacatttgttttgtaccattcggaatttacaccctttaaaacagtgctgccatttccatcccaaagaagtccttcttccggaatcaccagtggattatccgctgaagttcctgctgtattggccatagcattcactgtggatgttatatcgtgattatctgttagttttggagaaatattttctgtagtatctagtgtttcatctaaatctgtactttcttcaatatgggtattttcctgtgcaaacacagtattacacaacatacttgatgtactggctgttccaattaatactgtcaaacccattgctaataattttttagctttcatttcttctttacctcctaacttataaaacaagtttttcattgttttggaaaaatttagatacgtattttcctcctctctgtccacataatggaaaacaaattagactttaagtagactttttatttcgagcatgataaaataacaaaaggcttaaa

SEQ ID NO: 10 - DNA, 32759 bp, Unknown
  16S sequences of unknown bacteria
acaaggcgtccatttctttcaacggagcctgggcgcagaatatcggagaagacgaaatgttcatcgattttctgggcgacaagggcggggcgcggctcacctacggcgggcatttcgcgctctataccgcggatgaaaacaatacgctgcaaaagacggagttttcttataacattcccgaccatttccgctgcgaggacgaggcgtttttaaaagcgacgcgcacgggcgagcataccaagacgtatatcggcgagattctggaatcggcaaaacttctcgacgcgctgtatcggtcggcggagaaaaaacgcgaactggaactgtaaattatgaagaaaaaactgagagtcgccatcatcggctgcggccgcatattgcccatgcacgccgtgcccgccacggttctggaacagtcggaactcgtcgccgtgtgcgatatccgcgccgagcgcgcaaaagccgcggcggaaaagtacggctgcaaggcatatacggactataaagatcttttgaaaaaggaaaaattagacgccgtgcacgtgtgcataccgcactatctgcacccgatcgtttccgaatacgcgctctcgtgcggggtgaacgtgctgagcgaaaaacccatggcgatcgactacgaatcggcggaaaaatgcgtgcgcacggcggaaaggttcgggctcaactacggcgtgattttgcaatgccgctacaataagtccgcccaactcgtcaaacgcgcgctgctcggcggcaggctggggaaaattatttccgcgcgttccacgctcacctggacgcgccccgacagttattatgccgaatccgactggaagggcacctgggacaaggagggcggcggcgtcgtcatcgaccaggccattcactccatggacctcgtcaattggttcatcggcgatacgcccgtcaaggtggatgtttccatcgccaaccgcgggcacgagatcgtgaaggtggaggacagcgccgaggggctgatcacctatcggaacggcgtgcgctacggcttttactgcatgaacaactacggctgcgacgagcccatcgaaatacggctcttgtgcgaaaagggcaaagccgtgctcacgtatgacgacgcgtgcatttcctacgacgacggcaccaacgaaacggtggtcgaacaaggctccgacatcgtgtacgagggcggcaaggattattggggattccagcacatcaaacagatctcccagttttacaacgccgtgctcggactggaacctttggagatcagcgggcgcgaggcgctgaaaatccaaaaacttatctgcgccgtgtacgagagcggcaaatcgggcagacccgtatatctgaatgaggagaaaaaatgatcaagatcggttttatcgataattttttgagcgaatggcacgcgaacaactatcccgacatgatccgtgccaacgggcgtgcgcgcgcgctcggcatggacgtgtgctatgcgtatgcgaaagaggaggtttctccctacgacggcgtgacgacggacgaatggtgccgcgcgcacggcgtgcggcgcgtcggttccgtcgaggaactcgtggacagatccgactgcattgcggtgctctcgcccgacaatcccgaactgcacctcgcgctttccgaatacgctttgaaaagtggcaaacccacctatatcgacaagacgttcgcgcccgataaggcgacggccgaaaaactcttcgcgctcgcgaaagagcacggcacgcccgtgtattccacctcgtcgctgcgctttgccgacgaaatgaaattttaccgcgagagcgaagtcggcgcaaagagttgcatggtgtgcggctgttaccgtttcgatatctacgcaatacacattttcgaacttatgtgcaccatcatgaagacgggcgcaaagcgcatgatggccgtgcagacggggcgcaaccgcaatatcgtcgtcgattacggcggcgggcgttcggcgagttttttacagatgcacaccgacgatcccatcggcgttcccttcatcacttccgcgcagatgcccgacggtagcgcgcattattacaccatcgcggacgggtatcagacgcgctttgtggagcacctcgtggaatttttcgccacgcgcgtaccgcaggtggattgcggcgaaaccatcgatctgatggggatgctcgaaacggcggaaaaggcgctcgaaaaacctttcgtctggttcgatatctgatgaataccatctttgacgaacgcgcgaagtggatctccgacggcagccgtttcgttgcggagagcgacgccgtcggctcgcccgcgctctacctttcacaccgcgtccgtctgaaaaaaacagagaccgcgcgcgtgacgatgtgcgggctggggctgttcgaactctcgatcaacgggcgaaaggtgtccgaccgcgtattggagcccgcctttacgcagtacgacaagcgtgcgctctatacggttttcgaagttgcggaatatcttctcgaaggggagaacgattttctcgtcgtgctgggggacggctggtacaaccagaccacgcgcgatacctggggattttaccgcgcggcgtggcgcgactgcccgaaaatgatatttcagttggaaacggacggggaatttgtttattcggacgggaattggctcgtcgggcacggtcccgtcgtttccaatgcgctgcgcgcgggcgaaacgtacgatgcgcgcatatccgtacagaccgaccgccccgcgcagatcgtggcgccgccaggcggcgtcctgtcgccgcagacactgccgcccatccgggaatgcgagcggctttttcccgtttccgtcacggaaggcgaggggtatacgctctacgatttcggcaaaaatatcgcgggctactgctcgggttctttttcgggagagcgcggcgcgcgggcggaactcgtctattccgaccgcctgacggacgggcggtgcgacaacgcgagcaacggcatgtacattttcaatcccgaagtgaaataccagacggacaccgtcatcgtcggcgataaggaaactttctttaaacccaaattcgtctatcacggattccgctacgtcgaagtgcgcggcgatgcgcgcgtgcgcgggctcacggcgcatttcgtgcataccgatctgaaaaggacgggcgatttccgctgttcggacgaacggctgaacgatttgcattcgatgagcctcaacgccatcctgagcaactatcacggctttcccaccgattgcccgcaccgcgagaaaaacggctggacgggcgacgcccaactgacggaagaaacgtgcgtatatcatttcgatatgcgcgaggcgtataaaaaatggctgtcggattttgccgacaaccagcgcgggagcggacagatcagcgcgatcattccctcttgcggctggggctacaactggggcagcggtcccgcgtgggatttcgctctctttcagttgacgcgcgcgctcgatttttattacgaagagcacgatttcgcgcgggagatgtttcccgtgctcgaaaagtacctgcgctatgcgaaaacgtacgaaaaggacgggctggtctgttacggcttaggcgactggaattatccgaaaaacgtttccttcgccgtctgcccgaccgaactgacggattcgtgttactatctcgaaatgctgcgaaccgccgccgaacttgcgcccgaaaacgcggaaacgtatgcggcgcaggcggaaaagacggcgcgcgcgatcgcggaaaaatacgcgcatgaaacgagtctgacggggcttgcggcgctcacttcttcggggattatcgacaaggggcaagagatcgccgcatatctggaacaaaacgattgcgcgccgcactgcgggattctgggcatgcggtttttagtgctttcgctgttgaaaatgaagcggagcgatttatcctatcggctgctgacgcgcgccgaatatccctcgttcgggtattgggccgcgcacgggcagacggcgctgtgcgaggatttcgaactgacgaattcgctcaatcatcccatgtacagttgcatcaccgaactgatgacgaagggcttttgcggcgttttattggggcgggggcgtaagagcgcccgcatcgaaccgcagatcccggcgccgatttcgtggttttcctgctcttttgcgggcttttccgtgcaataccgaaaggaagagggggaaactttcgagattttcgtcccagagggacgaaaggcggtcttcgtgcgggaggggaccgaaacgccgctgcattgcggaaacaacaaacttgtattttaaaagagagccgctcgatcgagcggctctcttttcgtatcgttgcccctcggttgcaaaaagcgggggtgcgcgtgctgacttttgtcgattttttgtatcgggcgggtgaaaattcggtctatttatcatgaacattgcagttgtgcttgcaagttgtttgatttttgcggcaaattatgctatacttggatacgaatactaaaatgaaaaacgagaggatattggcatggaaggcggcaacgaacaaaaaattctgttctcggcggtacagccgagcggcgcggtgaccatcggaaattatatcggcgccattaaaaactgggtggcgttacaggacgaataccgctgtttttacgcggtcgccgatctgcacgccatcaccgtcagacaggagccttccgcccttcgccgcaacacgctcgaacttctggcgctgtttatcgcctgcggcgtcgatcccgaaaaatgcgtgctcttcgtgcagtcgcacgtgcccgcccattgcgaacttacctggacgctcaacaccatcgcctatcccggcgaactttcgcgcatgacgcagttcaaggacaagagcgcgcggcacgccgaaaacgtgaatatggggctgatggactatcccgttttaatggcggcggatattcttttgtatcagtccgcgctcgtgcccgtcggcgccgaccagaaacagcatctggaactttcgcgcgatctggcgctccgtttcaataaccgctacgggcagacctttaccgtccccgagccgtacatcctcaaagagaacggcgcgaagatcatgagccttgcggagcctgcgaaaaaaatgtccaagtcggacgacaacgtcaacgcgttcgtcaccatgaccgacgataaggataccgtcattcgcaaattcaagcgcgccgtcaccgacagcggcagcgagatccgctttgccgaggaaaaaccgggcgtttcaaatcttcttaccatttattccgtcttttcgggaaagagcgtcaaagaggcggaagcggagttttcgggcaaaggctacggtgatttcaaactcgcggtgggcgaaaccgttgcggacgcgctcgcgcccatacagaaaaagcgcgccgaacttctggcggataaggcgtatctcgaatccgtcatgaaatcgggcgcgggatcggcgtttaaagccgcgcgcagaacgctttccaaagtatacagaaaaatcggcttttacgcgggagaataaattatgttcggttacattcagcccgatatgccctatctgtacggcaaggacgcgacgctgtataaagcgatgtactgcgggctgtgcaagagcatcggcgcttcctgcgggcagcgcgcgcggtttgctctgtcgttcgacatgacctttttatccgcgctcctgcacaatatcatgaataccgacgtgcatatcgaaaaggcgcactgcgtgcttcatccgatcgtaaagcgccccgtcgcgggggacgatgcgatcacgcgcgcggtcgcttgcctcaataccgccttcacgtactataaactgtccgacgacgttgcggacgaacataaaggaaagatcaaacgcgcctttttcgcaaagggctttcgaaagtccaaaaacgaacatcccgagatcgcgcggattattcaaaggcgcatggaagaactctggaaattggaaaaggagaacgcggacagcctcgatcgcgccgccgatccgttcggcatgatgatcgccgacctttccgattacgttttaaaagagttcgccaccgaatatacgcggcggttgtgctattccatcggcaaatgggtgtacctcatcgacgcgctcgacgattacgagaaggatatcaaaaagaaaaattacaatccttttttcgcggcgttcggcgaggggagcaagtgcgaaatgctcgccgcccacggcgaagaggtgaatttcgtgtttcaaagcgtatttgcggaaaacgcggagtgtttgcggaatatcagattccatttcaaccacgatctgacggacaatatcattcttcgcggcattcccgcgacgaccaaacgcattctggcgggcaaatgcgcctgcaaaacaaaaagcgaattgaagaaagtgcgcgcatagaaaccgctctttttcgataagataaaataaacggcgaaaagccaagggaacgacgatgaacaaacaatattacgaacttttgggactggacgaaagcgcaacggacgaatccgtcaccgctcggtacgaagaactcaaaaagaaatattccgaagatcggtttttggagggcgaagcgggcaacgaagccgcgagaatgctcaacaggatcgacgttgcgtatcatgagatcatgtccgagcgcggcgagcgccgcacgcgcgaggatgcgggcagcgcgtacgccaaagtagacgaactcatccgcgcgggcaatctttcggaggcgcaggccgctctggacgaattcaacgagcgtcccgcagagtggcactatctgcaatcggtcatcttctataagaaaaactggatgaacgagagcaaaaagcagttggagatcgccattcagatggacggcgaaaacaccaagtacaggactgcctacaataaactgaaagaaaagatcgaattcgataaaaaacaggcggatcccgccaagaccgcgccgccgcagggcgccgcgggaacgggcggatacgacgaaacgcagcaacagatgggcggcggcttctgcgagcagtgcgccacctgctgcgcgtgcaacatgctgctcaactgctgtatgaacgcctgctgcggctgcagataaagtcttccccgaacggtttaccgttcggggtttcgtaccgtgtgcggggaaaagcattgcccgcggagtgtaagtttatgaaaaatcattctttccgcatcgcgctttccgcggtggcgtgcgcgctcgccgtcgtcatgctgacgctgggcatgtacgtgccttttatgacgatcacggcatacgtgttcgcgggcctcgcgatcatgctgccgctcgccaaagattttcggttcagcgcttttttgtgctatatcgccacctgccttctggcgcttttgttcggcggcgtggggaatttctggaaactgttcgcgttcgtcgtctttttcgggcttcatcccatcgtcaattccctgcaaataaaatttaagatcaacaaatggatcgccctcgttgtcaagacgatctggttcgacgtgagcgtctggctcgtctggaagttcgcgggactgttcgtcgtgcagtacgactggatcaacgactacattattctgatcatcgcgaccgcgggttcggcgctgttcgtcttttatgatttcgtgatgttccgctgtcagcgcctcgtcaactattacgtaggcagaatcgcgcggcagtaaaaatgcctattttatagtggagagaagaaatatgctggataagaatatggagttcacgggttttgtcgaggccctcggctccaacggcgaggggatcgtcaggagcgaaggcacgacctttttcgcgccttatacgctgacgggcgaaaaagtgaaactgaaagccctcaaagtcaaaaataagatcggttacgcaaaagttctggaagtttatacgcccgcggacgagcgcgtgcgccccgtttgcaagaactttatgcgctgcggcggctgtcagttacagcacgtgaaatatacttcgcaactcaaactcaaacagaaaaccgtccgcgacgcgcttgtaaagatcgcgggcatcgatacggaagttcttcccacgatcaagagcgacgagcctttcgcctatcgcaataaattgcagatccccgtaggcgtcggcgcggacgggcagaacgtcatcggttttttcgccgagcggagccaccgcatcgtgccgctcaaaacctgtcccatccaccccgaatgggcggaaacggtcatcgccgtgttctatacatatatggaaaagtgcgggctgtgcggctacgacgatgcaacggggcgcggcgatatccgcagcatcgtggtgcgcgacgtggcgggcaatctgatcgtcaccgtggtggcgacgcacagagatctgaaaggcatcggagaactgatccgccttttatcggaaaaactttcgagtttttcactctatctcaatctcaacgacgcggataccaacgtggtgttcggcgaagaatttattctcctgcacggcgcggggcggtataccgcaacggaatgcggcatcaagtacgaagtgggggcgaatacctttatacaggtgaattcgggcgtttgccgcaaactgtacgatcgcaccgtcaaggctgcagcggagagcggctgcacggcggcgatagactgttacagcggcggcggcctgatgaccgccatgctcgccaagacgctcgggaaagcgtacggcatcgaaatcgtgcgcgaggctgtggactgcgccgacggtttgaaatcgctcaataaattgcaggataaaatgagcaaccgctgcggaaaggtggaggatatactgccctccgttctggaagaagtcgacgcagatcaatgttttttggtcgtcgacccgccccgcaagggagtggaccgcgcgacgctgcgcgcgatcttaaaatcgggcgtcaaaaaaatggcgatgatctcctgcgaccccgccaccatggcgcgcgacgcgggtattctgacgggcgccttgaccgaaatcgacggcgaactcagaaaaaatccggactatcggaaaaacggcggcggtcactttaaaatccaatgcgtacaacctttcgatatgttcccgcagaccaagcacgtcgaaacgcttgttcttttgagcagataaatggactggttcaatatttacggtctgatattcgtcgcgacgctgctcgttcccaatatcgtttacggggcgttgcatcgggatgttcagccgccgaaatgcggaaaagtgctggaaatttgcgaacagatcggaagatacggcgcgatggcgtgcatggtcttcaacataccgtacgttgttttcggattttggtttgcaggcggttttgcggcgtatctctttgcgggcggggcgctgctcttcctgtatattctgctgtttgcgcttttttggcggaaatcgcatcttgcaaaggcgctcgcgctctcggttttgccgacgctgttatttcttgcgtgcggggttttgcttcttcatattccgctcatcgtctttgcggcgatattcggatatgcgcatatcaccatcagttgtaaaaatgtaaaatatatataaagaggagcgcggcatttgaccgcgctcctctttatttcaaatgatctgtgagatttcgttgaaagtattttttatagagacggcttacgtagtttgggtcggaatagccgagaagttccgccgctttacagagcggcattttttctttttccatgagagaacggatcttttccaatttgacgcggtttacgaatttctgaaacgggatgccctccgtatttttgaataccgcgcaaaaatattcgggtgaaatgccgagaaattgcgcggtttcgcgttccttgacgggtttatacaaattttcgaacacgtactctttcgcgcgctccacatagcgcagattgccgtaagcggcgccgcgtccgccccgcaccgcgcaagcgtggatctctcccaaaatctgcaaaaacagccccgacagaatgcacttgctctcgccgtagagcgtatacgtgcggatgatctcgtcgatcagcgcgcggatcttgcccgtcttcgccgcctcggtgacaagaggcaggcaaagcgctccgttttcgtccttttccgcgtccgcgaacccgacgaaaaagcagacggtacggtgcttgtgggggctgtcgcccgtcacgcgcaggggcgcgcgagagaggttgcaaagtacgtcgtttctgcgcgcagtgctttccgtgttttcccgtgaaagcgtgagggtaccctccgcgatatacgtgacttcgatgcagtttgtttttgcgggaaggtcgtttcggtaaatcgtatcgccgtactcgtgcgcgaacgcgatctcgggcagacttaaaattctgatcgtttccatggggacagtataataaattatcttaattttgtcaagagaacataaaattgtttattgcaatcgcggggcgtgcggcgtatactgtcggcagaggtgaaaattatgtcgacacaggcattgaaagaggaaatgcgtcaacgccccgcgggcgtttttgcgaattattactataaatatctcgggtacagggaagatctctgcgcgcccgccgtcaaggcgcgcgcaaacgccgtgtatacgctcttttcccgtgcgggtgcgtacgtctaccgcaacgatctgatcgcgggcagtatccgcccgttatggtgcgaaaaaagtgaagcggaacttcgttacgcccgttcgatcgcggacagtttcggcgagcgcacgttctggcacaacgcagatcatttttctcccgattacgggagcgtcgtttgcgacggcatcgcgggcatgctccgaaagattgaaatttcgaaagcggtgcacgcggacgacgcggcaaaatcttcctacctcgcggcgatgcaaaaaacgctcgaaggttttaaaaatctcttgctttcctacgccgtggaagcggaaacgctgcaaggctgcgagggctatttcggcgatcggctgaaacgcattgcgggcaactgccgtaaactcgcatacgacgcgcccgaaacgtttgaagaggcgttgcaactcgtatggatgtgccacgtcggttttctgatggaggggcgcgcggcgatggcgctgggcagaatggaccaatatctgttccctttttatgaacgcgacataaagcgcggcgcgctcacgcgcgggcaggctgtggaacttctggaaaacgtgttcatgaagatctacgaatcgcgcgcctataaggacggcgacgacgtggtgaacatctgcatcggcggcacggatcttgcgggcaaatgcgaagtgaacgatttgagttactgcattttggaggccgtgaagaactgcaacgtgcccggtccgaatctttccgcgcgcgtttcttctcaaacgcccgacgattttctggacgcctgtcttcgggtgatcgggacggggttgggatatcccgcgctgatgaacgacgaggtgaatattgcggcgctccgcagatacggctatgaagaggcggacgcctatgattattccatggtcggctgcatcgaaaatttcatcacgggcagacagccgccgtggagcgacgggcggttcgatacgccgcgctttttcgaatacctgttcaacgagggacgcgggatcgttcacccgtcgatgggagtgaacacggggcccgtgcgggaaatttcgtgtatggaagattttttaaggaaattccgcgagcaactggaatacggcgcgcaggaatattacgcctttttcaacaacgaaaactgccgctattcgcccgcgcggtacccgcagccctttctgtcctgtttctgccgtgactgcattgcgcgggcgcaggacattctggaagggggcagcaaatacccgtccgtgcacggcgcggcgctcatgggcgtgggaacggtgtgcgattcgctcgccgcggtggaaaaggtggtttttacggacggggcggctacgcttgaagaactgcgcgatgcactcgccgcgaatttcgaaggatacgaagatctgcggaaaaaacttctcgccgcgccaaaatacggcaataacgacgatttcgcggacaaatacgcaatatggttcgtcgatacgctctttgcgatcttttcgaaattccgcacgcgcgacggcggcgcgttttatatcgcgatggcggcgaacgtcagcaacattgcggcggggaaaatcattgcggcgacgcccgacgggcgcagggcgggcgaaccgctttccgacgccgcgtccccgacttacgggcgcgacgtgcggggcgcgacggcgactttgaacagcgtttccaaacccgactatacgaaagtcgcctgcggcacggtcctcaaccagaagttttcgccgtccatgttcgagggggaaaaacgcaaaaaactgtccgcccttctcagggtgtattttcaaaagggcgggcaggagatgcaggtgaacgcgacctcgcgcgaggttctcaaagacgcgatggcgcaccccgaaaactatccgcaactcgtggtgcgcgtttcaggcttttccgcgctgttcgtcacgctcgacagggacgtgcaggaagatattctgcgccgcacgcagcaggggtgaaagatgcggctgaacatatcggatatccagcatttctgcacgggcgacggcgaagggatccgcacaaccgtgtttttcaaggggtgcaacctttgctgcccctggtgccataaccccgaaacggtttcttccgcgccgcagatcctgcgttatgccgaccgcgagatcgcctgcggccgcaacgtatccgttgccgcgcttgttgcggaaatcggcgaggacggggagtattatcgggcgagcggcgggggggccacgctgagcggcggcgaaccgctgttgcaggcggagggggcggcgtttcttgcaaagagccttcgcagcgaggggacggaggttttgatcgacacggcggggtgcgttcccttttccgcgttcgaaaaggttatgccctatgcaaacgggtttttgtttgacgtcaaggcgtgcacggaggaagattacgcgcgtatcggcggtgaatttttcctcgtccgtgacaatttcggaaaactgacgaaagcgggtgcaaacgtgcgcgcacgagtgccgctcataccgaatttcaacgacggcaaggagtactgcgaaaaaatgtgcgcttttcttcgttcgctgggcgcggaaaaggtcgatttgctgccctttcaccgcatgggcagcgccaagtatgcggcgctcggaaaaacttatgcgtaccgcgaaacgccgcctatgtctttgcagcgggcggaagagatcgcggcgatctataaaaaatattttcaggtaaaaatcgaaaggtaaaggagaaaaatcatgaaagcgaaagcggctgtatttatgggggcgaacgtgcccttcgaggtgagggagttcgagataaccgatacgcccgcaggctacggcagatcggaactgatcgcgagcggcatctgcggcacggacgtgcatttccacaacggcaaactttccgtggcggcgccgacgatcatcgggcacgaattcgtgggcaggctcatcgatctgaacgaggaggaaggcaagcggtacggtctgaaaaagggagatcgcgtcatcgcggacattgccgtgccctgcggggagtgccttctgtgcaaaagcggggacgacgcgaactgcgtccgtatgcgcgtgaccaacggcggcagcatcgaaacgccgccctacctgttcggaggttatacgcgcgtgaactacacgccgctttccaacctcatccggatccccgagcaactggacgcggaaatggtctgcatattcgcctgcccggggccgaccgccatgcacgcgttcgcgctcgcggggcgcgcaggcgtggatcttgcggatatccgtacggcggtcgtgcaggggctggggcccgtgggcacctatgcggtgatgtatctcaaagcgatgggcgtaaagcaggtgttcgcgatcacggcgggcacgaacgcgcggcgggaagaacttgcgaaaagcctcggcgcttcggaagtgttcaatctgtcgcgtacgggcgcggcgcagatcaacgaaagcatcgtgaaagcgagcggcggtctgggcgcggatctcgcgttcgaggcgtcgggcgcgcccgcggcggtgccgcagggcatggaacttctcagaaaccgcggcgtctatctcgtgccggggcagtattccaacagcggcagcgtcgccattgcgccccaactcatcactttcaaagcgctgcatatcatcggttcttcgcagtattcggtgagcgacgtgcgggattatctctcctttttgctcgcgcatcccgaactgcacgcaaagatccgcgaactcggaaaccgctatcctctggaagaggtcaacaaagcctttctcgacgcaaagtcgggaaacaacattaaaactttattggtttgataaaaaaatcccccgacgtgcggtcgggggattttttttcgttttggcggcatagaatcgccccggatttcgcacaatacgggtatggatcggaatcgttccgatcgccgatgcctatttaaaattggaataattttccaaaaaggtattgacaaaatcggtttagctatttataatttaattgctaaaccgatttagcaaaataaacggtaaggcaaaaattcttttttggagggaaaattttatgaaaaagatgaaatggctcgcgctcctggcggttctcgttctggggctgtccgtattcgccgcgtgcggcggttcggcggatacctgtaaggtaacgtatttcgacgcggacgccaaaacagtgctcaaagagataaaagtggacaagggtgaaaaggcggaaaactggacgcccgaaaaagagggctggacctttttgggctggtacgcgacgcccagcctcaaacgtcctttcccgttcgacgatcccgtcaacgcggacacttcgttgttttccagttggaaatcggctgtgtttcaggaagatacgcgcgaatggctgatcgcggggcagtcctcgtataagggtgcgctgctcaatacgagcgcctggggtaaagtagagggcgcggaacgcgaaaaattcatgttcgagcgcgtggaagaggggaaaaacgagttcgaacttaccctcgatctgtatgtgggcgaccagttccagatcgcggacgtggacgtggacaacgcgtatacctggacgcatcagcgcggctacggatttttaaagaccgagggcacggaagaattcgtgaaaaatgcgggaaatatcttcaccgaagatctgaccaaagcgaatatcgagatgatcaaagagggcaactatacgctgacgctcaccaccgatatgagcaattccacgctcgactctctggaaatcaagcgaaacggcgatccgaacgccaatctcgaaaaatcgtatgcgcccagtatttccggctcggtcacgggcggcaacgccattcccgacaaggaaaatttcggcgatttcggatttaccgaaacggcggaaggcagcaaggtctttgaaatgaccatcagcctgaacaagggcgatttcttctccgttctgccttacgaaaattcgtgggacgacgtgctgcgcacgtccgcagtcgacgcggctttgagcgacgccgtctacgataccaaagaattggcgaatatcaccatgctggaatccgcgaaatataagatcaccgcgaaattcgaggaaaaggacggcaaagacgcgggcagcgtcatcatcaaaaaagtcggcgcgttcgagcgcaccgcgggcgacaacgaggtcaaattcaccgacggcaaacccaccgtatacgtccgtcagggcgcgcgcgttcccaatccgggcgaccctgcgggacagacgggcaaaattttcatcggatggtataccgaccttacgaacaacgtgcctatgaattttaacgccgctctggataagacggggcaaacgatcacctgcgcgcccaagtttatgtccgataccgacaaagatacgcgtaccgtgtatatcaagggcgacgtttcggggtgggcgaacaaggacgagttcaaaatgaaaaacgacggcaagcacacctataccttcgatctgacggtggaaaatacggcgcagttcgtattcaccttcttcgagggggcgaacgatacgggagccgccgccaacggcacgtgggtggattatgaaaattccaccgaccaggcgtcgggcgaggggaatatctccatcgcttcgaaaggcacgtaccgcattacgctcgattccttccacaaaacggtgaccatcgtcaaactgtaaagggcgaaaaaatcggacggcttttgtgaaagagccgtccgaaattcaaacgaaaaatctgtgttcgggatgcggttcgcgatccgtcgcgagccgcacgcactcgacgatcttttgaatcttcggccgatccgcacgcgcggggcaataggcattcgcgcccgcggtttcgttgagcagcgcggcgagcgagggttcgtccgtcacgacgtattgccctttgaacgcggtaagttcgcagagattcgatataaagcgaacgtccgaaaaactgctttcgatcgccgcgcgcagatattcgtcgcgcggcggctgcgagacaaagaggaagggtgccccgaaatacgcggccgcgtcgcgcgcgagcgcggcgtagtcgttggaaatttcgaaaaaaagcgcgtcgccgatggtgcagttcacggaaacgacgggcacgaaattgagtccgcccaactgcgaaaattcctctttggaaacgccgtaggtgacgatcgcctccacggtatccagccttgcgggcgaacagagatgaaaaacgcggacggactgcgcggaaaacgcctcggaaagccgcctgtaaaaatcgagaaacacgatccgccccagatcggtgagatcttgcgggcagtacgcggcgacgagtttgtcgggctgcgcaccgcgcagaaatttcgcgtaggtattcggcttgaaattcagcatattgatgacctgccagaccttctgtttggtgtcttcgctgatacgctgatcctcgcggtgatttaagatgaatgatacggtcgatttgctcacgcccgcggcgtcggcaacgtcctgcatcgttattttcttatccatgtataaattatagaatgtttcaggctttttgtcaatcaatgaacggagagaactatgttagagcaagccctgtaccacaaaccggaaaccgaatattgttatccgatttcggaaaatacgatcgcgatgcgcctgcgcgcttccaagacggacgtattgcaggtcgacgtcgtttacggcggtaaatacgatttttacgaaaagcggcagcgcgcgcgcatgaggctgtcgtacaccgatcggctgtacaactattttaccgcggaactgacgctgtcggacgtccgcctcgtgtacgtgttcgagttgaaagagggggacaggatctgttatttttccgaggacggactgacggaaaaatacgattatcacttcaatttctacaacgcattccagtttgcgtatatcaacgccgccgacgttcacagacaggtggagtggatgaaaaacgcgcgtttttatcagatcttcatcgaccgtttcgcgcgcgggaatttcgataaggacgacagatatatcaatttggagtggggtaccgttcccggaccgaaaagttacgcggggggcgatctgcggggcgttacggaaaatctcggctatatcgcggggctcggcgcgaacgcaatttatctcacgccttttttcaggtcggtgagcaatcataaatacgatatcgaggattattttaccgtggacggcatgttcggcgacgaagaggatatccgaaaactcgtgacgagcgcccacgaaagggggatgcgcgtggtgatggacgcggtgttcaaccacgtcagcgcgcggtgcagacagtttgccgacgtcgcggaaaagggaaaaaattctccctatttcgattggttcatcatacacggcgacaagatcgaccgcgaaaaagtcaattacgagtgtttcgcctcgtgcgattatatgccgaaatggaacacctccaacgaggcggtgcaggaatacctcatcggcgtggggctgtactggctgcaaaagtacgatatcgacggctggcggctggacgtttccgacgaggtttcgcacgctttctggcggaaattccgcgacgcggtgaaaaaaatcaagcccgaatgcgcgatcatcggcgaaaactggcacgacgccaacgcctatctgaaaggcgaccagtacgactccatcatgaattacgccttcaccaaggcgtgcctcgactttttcgtgctcaaaagcgccgacgcgaaagcgtttgccgaaaaactcaacgcgcttctgatgcgcaacacggatacggtcaactgcatgatgctcaatcttctggacagccacgacacgcaccgctttctgaccgaggcgggcggcgacgtcagaaaactggaaagcgcgctcgccgttttatatcttttcgtgggcgttccctgtatttattacggcacggagatcggcatggaggggggatacgatccagactgccgccgcaccatggattgggaaaaggcgagaaagggcagcagcctgacgcaactcgtccgcgcgctcgcgggcctcaaagagcgcagaaaatgtttgcaccgaaacgagttccgcgcctatgcggaaggtgaagcattcgtcatggagcgcggcgaactgcggctcgtcgtcaatggcggcgaaacccctctgcctttgcggaaaaatatctgcaccaacgcggagggacggctgcgatcgtttgaatttatgatcgaagaaatctgactttgcagattatatcgcaaacaaaacgcccccgatttgcgcgtaaagcgcttgggcgggaaaggtgaatgaccgccgttttataataaggtagcatcttaaaaaggcggtcagaggaaaacgcgggcgcagagccgcaaatttatttgcggcgaacgtcggggttttcctaaaactcacggaaatttgttcgtttctttcgaacaaatttcgtgaacaaacaaaaaaggaggaaattatgacgaaaaccctgacggcagtcgtcgcgcacattctcgtcgtggttgcgctcttaacgacgttcggcattttgggacttgcgcggaacgaatcggaaggcgcggataaattcacgggcgaactcgaacgcaacgtgaaactgcgcgttctcgaaaacgacaccgcgaaagaaatgggatatctcgacgaacttttggacgcgttcaacaaaaaatacgcctcctacggcatcaaggcagaggacgccaacatggatcagtatatcgatctggaaaaggacggtccgtacggttacggtcccgatatcttatatcaagcgaacgacgctctgatgaagtatactgacggcaagcatatccagccccttcccgtggaagcactcgactgctacgacgaagtgtccgaacaggcgtggtcggcgtacgccgcctcgtatgcgggcgaagattatattttcggcgtccccgtcaatattcagggcccccttctctattaccgcaaggatcttttgcccgccgactggcagactgcgtgggataaggatcgaaacggcgtgcccgatatggtggaatactggacggacttatacgcgtattccaaacagatcaagagcgagagcggcggcaaaaaattcggctatatgaaatcgctgttcgacccgtattttgcgatgggttatctcttttcctacggcggttatatcttcggcgacgagggaagggataccaaggacatcgggctgtccgcgaacgaatcgtacaagggcgcttccgtcatccgtcaactcgcctcgtccatgaacgaggactgtatcgacgacaccatcacggtgaacgcgtacagcatgatcggaaacggcacctatttcgccaccatgaccacgcccgacgtgtacaccatgttcatcagcgaactcacgcgcgaatatatgcgcagggataaactcgaccgcgccgaggcggaaaagaaagcgaaggaaaatctgatcgtggcggacattcccaaacttcccgagagcggggatctggaggacaggaacgggaaaaccatcgacagcgtgatgatgggcggtatcaacggctacgcggtcagcgcgtacaccaaagcgcccaacgccgcgctcgcgttcgtggatttcgcgacgagttacgagatgatcatgaaacggaatcaactgttgggcatcgcgcccgcccgtgcggacgtcgcagagagcgtgggcgggctttcggagaccgtcaacaaaaatctcgtggcggggcgcatcgaagtgatgcccagcgtgcgcgccatcgcgcaggtctggacgcccgcgcagacgttcttttccgatttggcgaaagatcccttccgcccgaaaaaagaccagaaatacacggtggcggacgcgctcaaaaccgctttgaaaaaagtggacgaccagatttacgcggcgatccacacgctcgcgtaaagggggagatctcatggcaatggaaaatatcaaacatcggttcgcggcaaaaacgcaaggcttttcccgcgttctgaaagacggaaacaaaaaggtcgccgcctcgatgggcctcatgggactggggcagatcctgtacggccagtgggcgaaggggctcttgtatatgctcgcggaagtcggctttatcgtatacgtgatcctgcgcggcgcggcggaccttttcggattctttaccttgggctccgtcatgtccaacccgtggctgggcatcgaaggggataattcgacggtcatgctcatcatgggcgtgctcgcctttatagtcattattttatacgctacgctctatatctccaacgtgcgcgacgtgttcgcgacacaaaaacgggtggaggagggcaaagcgcccaagacgttccgcgaagaatttgccgaactgttcgataaaaagttctatcgcaccgttttatttttgcccgtgatcggcgtgtgcattttcaacgtgctgcccatcgtgttcatgattctggtcgcgttcacaaattacggcggcgacgtggtgccgcccgcgctggtcgattgggtgtggtttcagaactttgccaaaatattgacgctgggacagttcgcgcccacatttttcaagatcttgaaaaatgtgggcgcgaactgtgtgggcggtgctttccacgctcatcaactatttcggcggtctgctgctcgcgcttttgctcaataaaaagtgcgtgcgcggcaaagtgttctggcgcgcgttccccatactcgcgtacgccattccgggatttatcacgcttttggggttcaagttcatgttctcctacggcggacccatcaacttttatatcaccgaggcgggcaagaccgcggtcggctttctcgatctggacgccaaatggacggcgcgcatgatcggcctcggggtcaacgcctggatcagcgtaccctcgtccatgctgctggcggcgggcattttgtccaacgccaatcaggaccagtacgaggcggcgcgcatcgacggcgccaacgcggtgcagcagttctggtatctgacgctcccgttcgtggtgttcgccaccacgcccgtgcttatcacgcagtttattggaaatttcaataacttcggaattttctatttcctgcgcggcggcttgtatatcgacggttattttctcgccagcgacaccgaccttctcatcaactggctgtataatctgtccatcgacaacaattactattccatcggcgcggcgatcagcctcatcatctttatcatcacgtccgccatatcgctcgccgtctatgtattttcgccttcgtacaggcaggaggaaacgtaccgatgagtaaaaagagtataaaattgggaagaacggtcgataccgtcgtcacctatatcattctgatcgttgtggcatttatctttttctttccgtgcctatggctgatcctggcgtccttttccgaatcgggctccatctactcctttcaggggttctttccctcggcattcagtttcagaagtttcatcacgctgtttacggataccgccatgtacgattatcccaactggttcaaaaacaccctgttcatcgccgtgatggcttgcatattaggcacgtttctgaccattctgacagcctattgtatgtcgcggttcaaattcaagagccgccgctcgctcatgaagaccaccctcgttttgggaatgtttccctcctttatgggcatgacggcggtgtaccttctgatgacgcagttcaattttatcaataattcctggggactgattctcatctattcggcgggcgcgcccatgggttacatggtgcagaagggctttttcgataccattcccgcctccatcgacgaggcggcgcgcatcgacggcgcgaccaatttcaccgttttcagaaagatcattctgcccctttccatgcccatcatcgtgtacaccgcgctcacttccttcacctggccgtggagcgatttcatccttcccaaacttttgttaaagaccaaagacacctggacggtcgcggtcgggctgatgagcctgggcgatacggaattttcgcgctttgcggcggggtccattttcatcgcggtgcccatcgtggtgctgtacttcgtgctggtaagatatatgatcaacggaatggccgcgggcgcggtaaaggagtaatatggacaaaaacttatttttaaacgatttgaaattgctggaaacggaaaacaagagcgccgtacaactgtataacgaaatttccgcgctcgccatgcacaggttgcaggcgagcgccaaaaaggggaaatgcgcgcactatctctccatcgaatttctgatcgggcgcgtgttctacaacaatcttttagaactgggcgttctggaagaaacggcgaaaatcctgaaaaagaagggcgtcgatatttccgtgttcgaggagatcgaggacgccgcgctcggcaacggcgggctcgggcggcttgccgcctgctatctcgattcgggcgcggcggtcggcgtgcccttatacggctacggtatacgttataagttcgggcttttccgccagaaattcgaaaacggcttccagatcgaaatgcccgacgactggcagcgcttcggcgatccgtggagcgtgcgccgcgaacacgagcggcaggtcgtgcattttgcggatatggacgtcgaggcggtgccctacgatatgccgatcgcgggcaagcgcgtgaacgtacttcgcctctatcaggcggaggggagcgaaagcgcggaaaagatcagcggcgttctctatcccgcggacgataccgaggagggaaaacttctgcgcatccgccaggaatactttctttccgccgcggccgtcggcgatatcgtaaaagagcacgaaaggctgcacggcgaccttgcgtcctttgcgcaatatagcgccgtacaactcaacgatacgcatcccgtgttcgccattcccgaactcatccgcgtgctggtaaaaaagggcgtttcttacgtgggcgcggtgaagatcgccaaagagacgttcgattacaccaaccacaccattctgcccgaggcgttggaatgctgggacgcgcggctcgtgcggaaaattctgcccgatatcgcggggatcttgcgggcgctttcggacacgcaggcgcggctgcacaaaaaacgcggttatacgcgtgcagaaatcgagcagaccgcgatctatcagcctaagaatcagaccttttccatggcgaacgccgcggtgttcgtcgccgataaagtcaacggcgtggcggatatccattcggagatcatcaagcgcaaactgttcgccgcggagtatcggcatatgcccgaaaaattcacgaacgtcaccaacggcgtggcgcagcggcggtggctgatgctggcgaatcccgaactttgcgcgctcatagaccgccgcatcggcaaagaatggcggcaggatttcgaaaaactgtccgagttcgggcattttatctgcgagcaaaagaccatatccgaatttatcgccgtcaagcgcgaaaagaaaaatcaactgttttcccatatcgcgaaacaagaaaagacgcagatgaacggcgaacgcatggtgtacgcgcaggtcaagcgcctgcatgaatacaagcgccaactgatgactgcgttcgcgctcgtgcggctgtatcgggatctgaaagaaaacaaactgcccgatttcacgccttcgctgttcctgttcggcgcgaagagcgcgccgggttatgcgcgcgccaagggcatcatcaaatatatcaacgaaattatcgcaaagatcgacgccgacgacgccgtgcgcgggcggctcgcaggcgtattcgtcaccgaatacaacgtttcctacgcggaaaagatcgtcgccgcggcggacgtttcgctgcaggtttccacggcggggctggaagcctcgggcacgggcaacatgaaattcatgatgaacggcgcggtcacgctgggcacgatggacggcgcgaatatcgaaatcgtcgaaaaagcgggcgaaaagaacaattatattttcggcgcgcgcgtggaggagatcgagaggctgcgcgcgggcggctacgatcccgccgcgtatctcaaagaccatcccgaatgggcaaagattgccgaaacgctcgtggacggcacctattccgacggcggcacgggcattttccgcgaattgtacgattcgctgcttgtcggcgcgagttggcacaagcccgaccattatttcattttccgcgatatcgaagaatattatcaggcgatcctgcgcgccaacgccgattacgcgcaacgcgagcgttttgccgaaaaacaattgaaaaacgtcgccaattcggcatatttttcctccgaccgctcggttctggaatatgccgataagatctggcatatacaaaaagatgaacgataacaaagatttgggaatcctgttgcacgtatcttccctgcctggtccttacggcatcggtacgatgggtaaagaggcgtacgcctttgtcgattttctgagcgggcttcatctggggtggtggcaggtcctgccgctcgtgcagacgggtttcggggattctccctatcagtcggcgtacagcggttcgggcaatccgtatctcattgatttaaaaatgctgcaagaggaagggctcttgcaaaagcgcgaactcgcctgctgccgctctttgaaaaacgcggtcgattacggatgtttgttccgcgagaaatatgcaatcctgcgccgcgctttttcgcggttcgatcgcagcgcgcccgatttttgcgccttgaaagcggacaacggatttcggggttacgcgcttttcatggcgctcaaagaggcgcacggcggcgcctctttcgatacatgggagcgcagatataaatatgcgcataggaacacgcttgcgaaattctggcgggaaaatcaggacgagatcgatttctggctgtttgcgcagtgcgaatttttgcggcagtggacggcactgaaagcgtacgcgaacgaaaaaggagtcaggatcatcggcgatcttccgctgtacgtggcgtacgacagcgccgacgtgtggctgcatccggatcttttcaaactgaacgccgacagaagtcccgaaaaggtcgcgggcgttccgcccgactatttttcggcgacgggccaactatggggcaatcccgtatattgctggaaggcgcacgcgcgggacggctacgcctggtggatctcccgcatgaaacaggcgttcgggctgtacgatgcggtgcggctcgatcatttccgcgggttcgaccgctatttcgagattgacgcggcggaaaaaaccgcgcagaacggaaaatggcggcaggggccgggtaaagcgctgttcgatgcgatcggatcggcgcttggcccgctcgatctcatcgcggaagatctgggcgagatggacgagggggtgctgcgccttctggaagaaacgggttttccgcgcatgaaagtcatagaatttgcattcgacggcaatccggataatccgcatctgccaaaaaatatcggaaaaaactgtgtgtgctatacgggcacgcacgacaacgacacgctgtacggttacgtgaaaagcctgcgagggaaaaatctgcgcgtgttccgcgaaagcctggaaaccgctttgcgcgagcaatctctctcgtttcctctcgccgataaaaaaagcatggcggaagccatgctgctgcttgcgttaaagagccgcgccgcgcgcaagatcatacccgcgcaggatctgctgcttctggacggcaaagcgcgcatgaacacgcccgcgacgctgggcgaaaactggaaattccgtttgaaaaaaacgctttcggtccacgatctcgcggcgtcgttcttgacggaatttcgtggatgaggtaaaatataattatgaaaaagaaaattttaataggcatctacgccgccgtacagttgaccgtgatcgttttgatcccgctgggcttgattttccgtcaaccaatatatttttatatcgccagtcctcttgctttcgttgcgatcgtatttatcatcgtttatttgaaaaaaacgagcgagccgaagaaatgatcttagaaagaatcgggttcgggtatgggaacgcatttgccctcggccatgcgtttgcggtaaaacagaaaagttttaacaaagtcgtcgcggtagcgttccaaagacttttcgcttacgttcagttcttcgctcttttgtttttcagacaaggaaaaggtttctgttttcagataaagaaaggagaatattttgctcttgtcgtcatgatttagatggtcgtgcgttttccaatacagcaaacagcgcgatatcacgttgcgcgttgcggcaaaaagcggattgtcgggaaataggatcgcctgccgcatgagattttcgatatcttttgtcgtttccataaaaatcctttttttacgaacagtataaaggattttacagattggatatcgtcagattttgacgatttgtatattttggattatgttataattcgttctgttcgaaaatctaacgaggcgtggggtggattatgcaagggtacgtgtttgtacagagtgaagaggaatatgaaacgggcgaacagccgcagcaaggcagttgcatacgaattgatcttgagggcttgcgttttttatgcgaaaagctgaaggattacatcgaagattatcccaattatcactttcgtctgaaaacgtcgggcggacaaaatctttatctttgtctgcggatcaaacaaaactgaaaagcgaaaggcgcgtaatctcgcgcctttcgctttttgaatctttatcggaatattttattcagtacacgagcgctatgtcgttcgcgcggcaaaaatccgcgaatgcggcggacggggcttcgtctgtcacgatgacgtcgaaatcggcgaggcggcagatcttaaaggcgcacacgttgccgattttcgtatggtcggcgagcaaaatattcgtgcccgcgtgcggcatcaccgtgtttttgatgatgcattggttcatggtcgcctcggtcacgccgtcctcggtcacgccgccgcacgagcagaccgtcgcgtcgaaattataattttccagttgccgcacggtcatcgcgccttccaccgagttggagttgtagtggagaaacccgccgggcaaaaacacgtccacgttttcctttcccgaaaggaacgtgaccgcctgtatgcccgtggatatgaccgtcttgtgctgttcgtgaaagtgtttggcgagcacgctcaccgtcgaactggaatcgaggaaaagggtgcggaaaggctttaaaaggggcagcgcgagccgtgcgatcttctgcttttccgcctccatttcgttcatgcgtatggcgatggacggctcgtcgttgctgttttcgaagagcaccacgcccccgtgagatctcctcacgagcccgagtttttccatttccgcgatgtcgcggcgcaccgtcgcctcgctcacgtacatcgcgcgggcgagcgccgccgtcttttccgacttgtgcgcttttaaatattcgatgattttttcctgtctttcaagtataagcatgtttttgtccgtttgtgtttatttatgcatgatattgtatcataaatcttttgattttgcaattgaaatgactgtatgtgattgaatatgattgaatatgattgaaaattgactgaattgccgcgaaattgtcaacaatgcggttttcctcaaaaaaaataaaaaaaagcgcaaatagaagtgacaaaatgcaaaaaaatatgtataatttaagacaccgagcgtaactgatttcggttacgcgaaaaaacagttttataacgtgaattttcacgttcaggagggatccatgagtacgatttttgaacaggcaaaggctaaatacgcaaaatccggcgtagacgtcgaaagcgcgctcgaaaaactcaaaaccattcccgtcagcatccattgctggcagggtgacgacgtcgtgggattcgacggggcgggcgctttgggcgacggtttgcagatcacgggcaactatcccggcagggcgagaaatttcgaagaactcaaagaggacatcaaaaaggcgttttctttgattcccggcaaaaagcgtttgaatcttcacgccagttacgcgatcctcggcgcggacaagggcaaggtggacagggacgaatataccgccaaatatttcgaaccgtgggtggcgttcgccaaggagatcgggctggacggcatcgatttcaaccccacgttcttctcccataaaaacatgaaaaacgggctttctctctcctcgcccgacgaagagatccgcaagttctggatccgtcacggacaggcgtgcctgaagatcaccgaatacctcgcaaacgagatgggtacgccctctctgatgaacatctggatccccgacggattcaaggacgttcccgccgacaggctgacgcccagactgcgtctgaaaaactctctggacgagatcctctccgtgccctacgacaagaacaaagtcgtggtcgcggtcgagagcaaggtgttcgccgtaggcatagaaagttataccgtcggcagcaacgaattctatcagaactacgccgccagccgcggcatctgctgcctcttggacaacggacattatcatccgctcgaatacgtcagcgataaaattcccagtctgctcgctttctacgacaaggtggcgctgcacgtcacgagaggcgtgcgttgggacagcgaccacgtcgttctgttcgaggacgaactcaaagagatcgccaaagagatcatccgcaacgacgctgcggaaaaagtgctcatcggactggatttcttcgatgcgtccatcaaccgcatctccgcctggacggtaggcgcgcgcaatatgcagaaggcgcttttgtgggcgcttctgatgccgcacgctgagctgaaaacattgcaggacgaggcgaacttcaccaaactgatggtcgaggcggaagaattgaagacgcttcctttcggcgcggtatgggaagaatatctcaaacgctgcaacgtggcgggcgaggactggttcggcgaagtcgaagcatacgaaaagaaaatattgaacgcaagagtataacccgaaacatagtgcgatacgaaaaacctctccttcggggaggtttttcccgcaagtaagacaggataacaggatatgttgaaaagagacgacagattgagagactatgttcttcccgtgcgcatcgtggcgagcgagaagacgaacaacgcgaaaacgcttttgaacgccgatttgacacagatcggcctgcgggaaatggacgttgccaccgtgcacagcggcgggtacgtgatcctggatttcggcagggaattgcagggcggcgtgcgcatcctcaccagcggcaccgcgggcgaggcgctcgtacgcatacgcctcggagaatcggtgagcgagtgctgcgcggaactgggcgaaaagggcgcgtgcaacgatcacagcctgcgcgatctgaccattcccatgtgccaactttccgatatgcagttctgcatgagcggattccgtttcgcacgcatcgacgtgctgggcgtgggaagcatctgcgggttcaaggcgatctgcgcggtatacgtgcatacgtcttccgtgcgccgcggttctttccgctgttcggacgaactcgtcaaccgcattttcgatacggcggcgtacacggtggaattgtgcatgcagacgtatatctgggacggcatcaagcgcgaccgtctcgtgtgggtgggcgacctgcaccccgaaacgcgcgccatcgcggcgctttacgggaacgacgacatcattccccgctctctcgatttcgaaaaggcgcagagccctttgcccgcgtggatgaacgattttccccagtactccatgtggtggatcatcatattgaacgactatttcatgtcgtgcggcaaccgcgcgtatctcgaggcgcagaaagattatttcgaagggctgttgaaacaactcgacaaatgcgtctttgaaaacggcgatttcgatttcgggttcaatttcgtcgattggcccacgcacgagcagcccgacgagcccgagggcgtgcgttcgctttgcaaactttgcgcactcaaagcggaaaatctctgtcacgttctgggactggacgattcggtcgccaagggcatctacaataaactttccagaaagagcgacgaaatcatcgacaaaaagcagatcgcggcgctcaaatatctttcgcataccgcgctcaccgcacacgaaaaggcggtgctgtgcgagggcggggcgcacgggttctccacgttcatgagttcgtacatcctctccgcactcaccgacaatgcggggctttgcgaggcgctctccgccatgcgcacctactacggcggtatgctggaaatgggagcgactaccttttgggaagatttcgatatcgactggatggaaaacaccgcgccgctcacgcgccttcccgaagagggcgaacgcgacattcacggcgatttcggcaaatactgctacgtgggcttccgtcacagtttctgtcacggctggtccgcgggcgtcgtgccgtttattttcgataaagtgctgggcgtggaatcgttggcggaaggcggcaaaaaactgcgcgtccgtcccgatttaggcgatctgacctttatcgagggcgtggtccccaccgcgtacggcgacgtgaagatccgctgcgacaaaaagggcgccaacgtcgaagtgaagatcgacgctcccccgcaagtggaaatcatccgataaacgaaaaggacgcagccaaggctgcgtcctttgtttaattcagtattttatgcgccatgtgtacgcccatgaccgaagccatcatcagtccgcgcgtccaaccgctcgaatcgcccagacagtggaggttctttacgttggtgttcagatcgtcgtccattttcactttattgctgtaaaatttcagttcgggggaatacagcagcgtttcgcccgaggcgaaccccggcacgaccttatcgacggcggcgataaagttgatgatattgatcatcgcgcggtagggcatcgccgaggtgatgtcgcccgcaaccgcgtcgggcagggtggggatcacgttgccgcgcatcagttcgtcctgccaggtacgctttccgtccagaatgtcgccgtagcgctgcaccatgatctttccgtcgcccagcatgttcgtgagttcgcccactttctgcgcgtaggcgatgggctggttgaagggttcgcagaaattgtgcgagcacaggatcgcgaggttggtgttcgcggatttcttttctttataggaatgcccgttgaccaccgccagatgattgtcgtaattttcctggctgacgaacccgcccggattctggcaaaaggtgcgcactttattcttgaatgggtggggatagccgatgagtttgctttcgtataatacgttgttgacgttttccatcacctcattgcgcacttccacgcgcacgccgatatccaccgtgccaggctggtgggcgatgttgtgctcggcgcacagtttttccagccaatccgcgccgcgccgtcccgtcgccacgatcactttttccgccgaaactgcgcgttcgcccgtcttatccttcaagaccgcgcccgtgcacacgccgttttcgatgaccacgttcacgcattcgcacccgaacagcacgtccacgccgtaatcttccagttttttttcgatggcaaaataaattttctgcgccttttccgtaccgaggtggcggatggggcagtcgacgagtttcagccccgccgcgatggcgcgcttgcgaatttgggcgacctcgtcctttttctccacgccttccacgtgcgtatcggcgccgaattccagatagatccgatcggtataatcgatgagcgcctgcgccttcgccgcgcccacgaggtcgggaaaatcgccgcccacttcgcaactcaaagagagttttccgtcggaaaacgcgcccgcgcc

SEQ ID NO: 11 - DNA, 7917 bp, Unknown
  16S sequences of unknown bacteria
gatggggaaagggatgagtatcggtgcggtcatcgccctgattatcggcggcgcgggaatggcgattcccgaaatgtcaatgctcgccagcatcttcaagaaacgacttgtagcaatgatcgtagccacgattttcctcacggcggtaataggtggttatctgtttaatatcttattgtaaatcaaacaaaaaaaatggaaaagaaagaagaaaagaaaggtttttgggcatcgctattctcgccgaagccgagttgttcttgctcgtgtggcagcacagtcattgaggaagtgaaacaagaggcacagcctgttaccgatgaaaagcaggacgaaaaaactgcaataaaaaacgatacccattcctgtggatgcaataaatgatccgttagtttgtgaaaggatcattagacttgttgaccggtctttgggaaaagaagtagattctactcaacagatacggaagtcaatacgatacagaggacgaagccggataccggctccgtcctcttatttttatgtttattatatgaattacaatgtctaacttagaatttcatgtgaagtcatttctattaatattactgaatatcacatgcttaataaatattcttcacataacttattcctttacataaaacgtattatgcaaagcttctcataattcctttgaacccgaacaattttaaaacgataagcagaatggaatcacaggaattcaaatctttttacaaaaccgtcaaaggaaacgaaggcgcaaaatgcaagtaccctacccggctggacttatatggccggggatgctcgcataattgctcctattgctatgcgcgttcgctgctggacttccggggcatgtgaaatgccgatgctccggccgtcgcttcgatggaaagggttgcaaaaaccgtccggcgtatcgctccgggttctgttgtccggctcggcgggatgaccgactgttttcagcctgccgaaagcaaatttcgcgcgacctaccgcacgatccgggaactcaaccaacaaggcgtggaatacctgatcgttacgaaatccccgctattggcgacggacgaatacctcgccgtcatggatcgacaactggctcatattcaaatttcgattagctgcacgtccgacgcgctggcccggacttacgaacgggccagtccgccgtcggcgcggattcgggccgttgaaaaactgcaacaagcaggattcgacgtttcgctgcggctctctccgttcatcccgcaattcgtcgatccgcccctgctcggtacggttcgctgcgacaaagtgttggttgaattcctgcgggtaaacggatggatcaggcggtggttcgatgtcgatttatcggaatatacattgcatcaaagcggatacttgcatttatcgctgggacagaaaatcgaatatctgtcgaaactgccccgtttcgggcagctttccgtctgcgaggatgtgaccgaacattatcattactgagcgcaaacagtcaatccgaatccgaacgattgctgcaatctgaggcaagggtaaaataagacagaaaaaggaagctaatcgttttctttttctgtcttaatttcacttacatataacttaaatacttttttataataatcctctgatttctttaaaaggaagtaatattcaacaaaagttgtttcaataccattacaaaattttttattcccgtatttattatgccggtacatatataattgcaaatccaaggatatgaaaatctgaggtgatatgaattgattaagaatattgacaaattcaacatcgagatattgcatctgctttaatattttgttcagatattcctcttttcgatttctgtaatagtccaaatattcgagccaattaatataatgagtgccattaaaatccataatggtagatggagcaagtggatttgtagaagaacacattatttcaatttgctcttgtgtcatttttttcggatcaatatttagtcctgctttttttaccatatcggcaaaaatacttttaccgtcatttataatcatattaaataggccccctatatatccataaagtaaagatttttctttctgcctattataatgcactacgaaaaaatagaatacgaatgaagatacataagctattgaaagggcataccagaaatttcctatcgctacaaaaaaactgttgggagccggaatgtttttaagccacatatccattacaaatatgaacagaatcgcaatagccagaatgatcgacaaatcttttcttaaagtgcacacgtataatttgaaccaatgtttcataattgtttattttagcaacaaaccgctgatttttaaaatataattatcatcatcgaattacatacgggcgaacggaactccaaattggaatatcaatattcggattatgaaatttcttttttaacatcatttcaagagacattctggagtatccgaaatcggcacatggtccaattataatacagtctattgtttccaatggaatatttatttcggcataagggacgattaaaccacctttttctctgaaattgtaatctacacattgtttgatgatacgccactctttttcatccgcatatgtttcatctttgaaaatgcttcttttttctaagattgatgggtttattaaataattttgatggtttaatttttcgtattcgtcctgaatctcttgttcattaaattgttttatcagtgttcttttatcaaaatattgtatttgttttattttaaattctgaacggtttcgtctaaccgtttgatgaataaacatttaacggagtatctgaaaagtaatggtaacgactaggaaaccgtgcgattttcagcgttttgcggtgttttactatcaaataactctttcaggtgcaaagatacgacaaatctttgatatagtatccaatacaaacagtattcgccattttttgcctttcgatatatacctatttgcttatgccgttattttttgcagatttggataaaaaaggaaaggcaaaattcaggaagcattgaaattctttactttagttagtgcaaaaatcgaataatttattgtaactttgcagcggattcggtgtgcatataataccatcccaattaagataagtcgcaacatatatagtggttttcaatatgattatgaacaattgtacaatattaacaggtaaaaacaccgttaatattgcatatcataaaccttggtaatttttccacattcaaatctaattaattcgatttgaatgtcattgtctttgtaatccggcatgctatttcaggcttgtcgagagattttttgtgctataaaatcaagaaacattcaaaagataaaaggaaaaattcaaatggaaaaaatcagaaattggaaacaagatttctatacaatatgggcggggcaagctgtgtccctgataacaagtggggttcttcaaatggccatcatctggcatctgacaaatacaacagggtctgcgatggtgttgtcaatggcgaccttggttgggtttctacctcaagcggttttaggttctgcaatcggagtacttgttgaccgctggaaccggaaaatggtcatgattggtgcagatgtcatcatagcttgtgctggactggtacttaccgtaatttccctgtcagcggaactacctgtatggatagtaatgctcatcctcttcattagaagcgttggcactgcattccattcccctgcgttaagtgcggtaacacctcttttagtgcctgaagaacagttagtcaaatgtgccggctacacccagtccatccaatcggcaagtttcatcctaagtccggcaattgccgcttttctctatgcaaaatgggggttgaattctgcggttgcccttgacgtattcggagcaataattgcctgtatcactgttgcaatggttcacatcccaaaacaaccgattgaagcgctgcagcaagaaaactttttcaccgaactgcgcattggctataacgcaatacgacaaaataaagctcttttcacattgctttggataggagcaatcaatatgttcatttatatgccaatcaatgcgctatttccgctgatgagtatgaattatttcgagggaagtaccttgcatgcttccgtggtggaaattgtttttgcagttggtatgttgttgggcggacttctattgggcgcatggggaggtttcaaaaagcgcatggcaaatatcatcggctctatctttcttatgggagtgtcattgactgtttccggcttgctaccaaccaatggttttatgatatttgcgatatgttgtacgttgatgggcttttctgccccattctataatggagtacagaccgcgctatttcaagaacagatacaacccgagtatttagggcgtgttttcggacttcttggcagcatcatgtcgtttgccatgccgcttgggttggtagtgtcgggtgcatttgcagaccaaatcggggtaaaccgttggtttttgttctcaggtatggctattctgcttctcgctataatagccttatgtcttccacaacttagaaaggtcgacaatcaaaaacaaaaatcatgatttatgaaacgtaactaaatctaaacagcaataagcctctgatagggaaatacgattatcggaggcttattgcaatctgttttaactacttatgtaattcctctacttttcctttgtggttgaattggctgtcgtatgctctgccgtagcctgtcgaactgttccctgaaccattcgcctatgggctggcggttgattacgagtgtcagtttagacttgtccgcagggtctttcaccacttgaaagcctgctctttctgtcgtaaaactccgattatgttcctccgaataaagtttgccctcgtatatcaaaggcttaccataagtcaatgtcgtggtctgcctttcattgaacccgacaaggcggcacaggctctctattctcataatttcctttgccataggaaaccatgcacacagcttttcgataatgcgtttcaaacctgatacttcatctttgtgtctgacacttttttccgccatctccttacggtgattctgctgtatttccaacaactggcggttgtgctcggtttgcatcgtgtgtatgcggttttgcagtatctcaatggtttcctcatgggtggcaacttcccgatacagggcggtgttctccctttccaaagtcttgaccttgttgctcccgaaaagagaaccgacactttcagctatgttggtcgctgcggtggtggctgcacctttcagtttctcggtctgtacctctttcttggcttgtctgagttcctgttcggtttcggttttctgctcctgtaaccgcttgttttctgcatcaagggcagcgttctttttctgtatgtcccgataatactgtgtcgtggtggtgtgccgtgcttcggaacctcgcacacctcgctgtaatccgtatttagccataacccttgcataattgtcgtggtacgcaatcaaggtctgacggttgaacaggtcatcggcacacaaacggacggtatttgctttcttgtgatacttccgtttgccgtcttcctgctctttcttggctttgcgcctttcacctgtcacgatgggaacaatggctgcatggatatgcggtgtcttctcgtccatgtgaagatgggcggcaaccacgttctccctgccgaatgtggcttgcagccattggatgctgtcgctgcaccattcgtcaagtcttccgttttcctgtatgtccatcatgtcctcatgtgttcccgacagaaccactcggactacacggacttggtcatgtgtaatcttccgcttgatgcctgccgtgttcagcctgtgggcaatcgcttcatccctgccatgaacgccatcggggtattctataagtaccctgttcagatgcgttcttgtcgggtctgcgtttttaggtatgattcttctctctatatggtcggattgtacggtgtccgatgaaccttttgctttctttatgtccaatgaaaaatatcccatgtagtttgatttttacggttattgttatgagtgtattctctgcctgtggcattggctctcagggtttccaaagggatttccctttggctcgatagggagtttttagcattaccgtgtaatgcgtgaagaaaacgccctattgagctatggtatttctgtctaaatacccttgggaaagcgaacctgttcccctctatattttcagccctttctttttcggtggctgcatcatccgccttgcggattgtacttgcttctcctcctttatcggctctgtcgattgggacaagagttttttgcacaggtactcgttcaagtcattataccctgcatagtgaaccgacatatcctgcaagcggtcacccaacatccgttgcaggttggcgtatgcgttccgtcctgctgtgtcattgtcaaggaaacagccgattcgggtataggttgccaatatgctttccgctttcgagaggttggaaacggagttgagaatgacgtaatcctgtgcattcaatcgtgggtgttgcggattgttctttactcggatggtcaggaacgagagataatccatgaagccctcgaaaagataacagacggttcgtggctctttttgctgtcggatatgggtgatgtccttcggggcgacacatcccttgaagtatctattacgcacttcataccctcttgccatattcgggaagccgatggcgaaatagggtttgtcggcattctcaaaccgcagttccttacactcccttttggcgagttcaatgtctatccccctttcttgcagataggcaatgagcgcaggtgatgacagctcgccaactcttaatacccgataagtgcggttgtcggattgctgcttgccaaaagaaaacgatgcagggcggatgtatggtgtccgttcctctatgcgcttcaacaggcaggttacatcttccgtatggtagagttccgctgccaatgcgatgatgttaccgcccttgccaagtccaaaatcgtaccatttgttgagttctgtgtttaccttgaaagatgcgtccgtttcctctctcagcggtgatttgtaccaaaagctgctgccctgttgcttgacgggcgtgtaacccaaactttgcagatagtctgcgattctgatttgtttaacttcttgtatgttcatgatattctatagatttgatgatgattgtaaaaacgttgatttgttgaatggcttatataacacatttatttacagaaagatatttgctcaacatcttctcaacaaaccactcgccaaaagagaaatcaacaatcgggtgctgttcctctctcaacttctcttttcgattgttgagattttgttgagagtgtatattgtttattgtcagcatagttatatccttattcatcaattcaacaaaaaaaagaatgatattacagggattcaagttgttccctcgtgacagaatagaaacgaccgacccgttttacaggctcataccgacactcccgattgtagttgaattggtaggtggtataggtcagtccgttgggtgcaggcgtaagtttccaacactcctgcaacacctttcggacttggtgcttctccacttttacctgcgagtgtaccagcaacagaagaatgtcgttgtagcagaacgagaatgtgtccgtgccgacactatccatgatgtcaagtatcagctcgtgcatctctatctccagtcggttacggttgctgcggattatcttctgcaaggcttcggtatgcaacagcgatggagcaaaccacatacggctttccttttcggtggatagtgttctgtgttgcaggaaatgaagaaaggcgggtatctccgctttcagcttttgcag

SEQ ID NO: 12 - DNA, 12420 bp, Unknown
  16S sequences of unknown bacteria
tcgcgccgccgaaatcaatgccgacattattttcaaggccacgaatgttgacggtgtttacgacaaggaccccaacaaattcgacgacgcaaagatgtatgagagtctttcctatcttgatattctcgaaaaaaatctcaatgttatggatatgacggccgccgccatgtgcagagacaataaaacccccgtgcttgttttcaatctcagcgacccggagaatatctaccgcgccgccatgggtgaaaacatcggtacggtggttcactgataaacatttaataaattgatatttacggaggaaaaagttatggacgatattatgaaggtaaccgaagaaaaaatgcagaaatccatcaaggcggaggaaaacgaattcgccggaattcgcgccggacgcgccaatgccgccgtacttgacaagataacggtggattattacggagttcccaccgccataaaccaaatggccggaatttccacccccgaggcaagaatgcttgccattcaaccctatgacgtttccatgttcaaggagatcgaaaaggccattcagacctccgatctcggcataaatccgtcgaacgacggcaaaattatccgtcttgttttcccgcccctcaacgaggaacgcagaaaagagctcgttaaggaagtgagcaaaatcggcgaggagtgcaaggttgccatccgctcggtgcgccgcgacgccattgaaaaatacaaggccttaaagaaaaactcggaaatcaccgaggacgaccttaagtccgccgaagaggacattcagaagctgaccgataaatattgcaagctggccgacgaagccgccgccaaaaagagcaaggaaatcgcagagatataaaatgcataaaaaaacttttgatgttttgccccgtcacattgccgtcattatggacggcaacgggcggtgggcgaaaaaacgccatcttcccagaacggcgggacattcggtgggggcaaagacctttaaaagcatttgcctttacgcaaacgaaatcggcgtggagtatatgaccttttatgccttttccaccgaaaattggcgccgtcccaaggaagaggtcgacgctctcatgaagctgttcaccgaatatctttccgactcggtgaactttaaggacaagaacataaggcttaaatttatcggcgatcgctcggtgctttcgggcgagcttcaaaagctcatgagcgacgccgaggaaaattcaaaggactgcaccggactgaccgtcaatctcgccataaactacggcggaagggacgaaattgtccatgcggcgagggaaatcgcaaagcaggtgaaaaacggcggcttatcccccgaggacataaccgccgacacggttgaaaacaacctttatacggcgggtgatcctcccgtggatctcgtcatacgtcccggcggggaatatagggtgtcgaattttctcatttggcagcttgcctattccgagctttggttttcaaatgttctttggccgaattttaagcctaaacatctcgacgaagccatagagagtttcgctcggagaaatcgcagattcggcggcgtttaaacgccgcttttttgaaggggagttttgtttggcaaagagaattgtaagcgccgttgtcggaattgctctttttgcgggagtggttgcggcaagtctttacttaagatacgctttttcggtttttgtggctcttctcgactgcattgcggtttgggaggtcttttcggccgttaaaatgacaaagcgcagacccatgcttttcgcagccatgcttgtgggggcggcaatgccctttttaagcgcctttcaaagctatatttttgtggtgtgttttgcatacatagtattcaattttgcctatatgatatttcatcatgaaacggtcaaaatggagcagatcatgcttgcgggtgggctttcgattatcctttcggcctccttttcttccctttgccgattgttcgacatgggtcttgacgggcgctacggcatgaatgaggccgacgggattttcctgcttgtgctgtcctgcgccgtggcgtggcttgccgacaccggagcctactttaccggcgtctttttcggaaagcataagctttgtccgaaaatcagccccaaaaagacggtggagggctttgtcggcggcattgttttcgacgtgctgctgtcgctgcttctttcatacggctaccaggctctctttgcgggggaaggacgggtcaattttccccttgtggcgatcatcgcgttttttgccgcatttgcgggaacgctgggcgatttgaccgcctcggtgcttaaaagagaatgcggtattaaggactacggaaagataatgcccggccacggcggcgttctcgaccgctttgacagcgtttttctcaccgcgccgctgacctatctttttgtggaagctttcggggcatatttccccgtgataatcagataataaccaaaggttgatataaattttgaaaacaataactattttgggctccaccggctccataggaactcaggctctcgaggtcatcgacggtctcgattaccgcgtgcttgcccttgccgcgggaaaaaacacggcaagagccgaggagcagataagaaaatataagccgaaatacgccgccatggccgacgaggccgccgcaaaggagcttgcgctgaaaacggcggataccgacgttaaaattctgtcgggctctgcgggcataaaggaaatttccgcgctttcggccgacattgtgcttaacgcaattgtgggtgtggcgggtcttataccgaccctcaccgccatcgaggcgggctccgacatcgcccttgcaaacaaggagacccttgtgaccggcggcgatctcgtcaaaaaaagagcggccgaaaagggtgttaaaatctatcccgtcgacagcgaacattcggcgatttttcaatgtctccaggcgtcaagcagggaagacctcaataaaattatcataaccgcgtcgggcggtccttttctcggcaaaaagcttcatcagcttaaaaaggtgtcgaaggaaaaggcgctgcgccaccccaactggagcatgggtgcaaaaataaccatagactccgctacactgatgaacaagggtctcgaggttatcgaggcggttcatctttttgaccttcctcaaagtaaggtcgacgtggttgttcatcctcaaagcatcattcattcccttgtggaatggaaggacggggccgtgctcgctcagctgggcgttcccgatatgaaaattcccattcagtacgcgctgacctttcctaaaagggtcaattttgtgtccgagccgctggatctcacaaaggtttctcaaatgacatttttgcctcccgacagggagaccttcggatgtcttgcgacctgcgagcaggcgataaacatgggcggtctctacccggcggccgtcaacggcgcaaatgaagaggcagtcaagctgtttttaaacgacaaaatagattttctcgacattgccgagctttcaaggcaaatgcttcgggaaagctttgaaaaaacatatacttcggccgccgaaattttcgaggccgacagaaaggcgagaaaactcgtccgagaaatgataaaatgatttaaggcggtgaatttatgaccgaaatgatattttccgtgggctcatttttgctttcggcgtggaacgcggtgtggccgattgctgtggcaattctgcttttcggccttgttgtcgttgtgcacgaattcggtcattttttctttgccaagctttttaaggttcgcgtaaacgagttttcggtgggattcggccctgcgattttcaaaaagaaaaagggcgaaactcagtattcggttcgcgcaattcccttcgggggatattgctccatggagggtgaggacgaggacagcgccgacgaaaacgccttcggaaacaaaagtgtcataaagcgtataataatcgttgccgcgggcgctttcaacaatcttgtgctcgggctgctttttgtgggcataatgctcggaattcaggggcgtttctacaccaccaccgtcagaggcttttatgaaggcgcttcaagctatcaaagcggacttcgcacgggcgacaaaatcctttcggttgacgggcggcgggtttactgttcctccgacctatcctatatgcttatgagcagcgaagacgacacccttgaaatgaccgtcgagcgggaagggcagaccctttctctcgacagcgtgaaattcgacacaagagagcttgagggcaaaagctatatttcgctggattttgccgtcacctccgataaaatgtcgataacccggccgttcacctttgttgccgacgcctttaaggaaacggtgtcggtgggcagagtggtgtggataagccttgccgatctcgtgggtggaaaatacggtctcaacgaaatcagcggccccgtcggagtggtttcggcggtgggcgaaacggtcagcaacgcggcgtcgtcgagcaagccgcttatggctctcgactcgattttttatctgcttgccattatcacgataaacctcggaataatgaaccttttgcctcttccggctctcgacggagggagactggtgttccttatcatagaggcaatcagaagaaagcccgttcccgcaaaatacgagggatttgttcacgccgccggctttgccgtgcttatgatattcattgtttttattacgggacacgacattttaaagctgttccgcggaggctaacatgacttttgaaagaagaaagacaagaaaaatcaaggtgggcaacacctttatcggcggagattcgacggtaaagatccagtcgatgctcaatattcccgccgaaaatatcgagggaaacgcaacacaggccaaggctcttgaaagcgcaggatgcgaaatcatacgcacggcgctcccgagcatggaaaacatcggccttatcgaggcgcttaaaaaggccgtccaaattccagttgtggccgacattcattttgactaccgtctcgctcttgcggcggtggacgccggcgccgacaaaatccgcataaatcccggaaacatcggcgacagagaccgtatcaaggcggtcgccgacaaatgcaaaatcgcaggcgtacccataagaatcggggttaattccggctcggtggaaaaggagctgcttgcgaaattcggcggccccacacccgaggctcttgccgaaagcgcaatgaaaaacgcgcgtctgctcgaacagtttgattttaacgacattgtcatttccataaaatcctccgatgtgagaaatacatacgccgccaatttgcgggtggccgaaatgtgcgattatccccttcatctcggagtgaccgaggcgggaaccgagctttccagcgccgtaaaatcatcggctgccttgggggcgctgctgcttcgcggagttggggataccgtcagagtttccataaccggcgacccgaaaagggaaattgtctgtgcaaaggcgctgcttaaaagtctcggccttaaaaacgacggggtgacgcttgtgtcatgccccacctgcggccgaacaaaaatcgaccttgtctcccttgcaaacgccgtcgagcagcggcttgaaaactgcggaaaaaccgtcaaggtcgcggtcatgggctgtgtggtaaacggtcccggcgaggcaaaggaggccgacatcggcgttgccggaggagacggctgcggggttattttccgaaagggagaaattataaaaaaggtgccggaggagcagctgctttccgagcttatgagcgaaattgataaattataagaaagagaatcagtaatgtctacacttgaatcgtgttttcaaaatctaatcgacccgcggacattttgcgaagatctgcttgaggcggaggttcaaaaaatagaggccgacagggcaaagagaaccgtaaaggcttttttaaggctcggggcctatgtgccgttttccgatgttcaaaaggcctgtctttcgctgtcaaaagctctttcggcggaggtgttcttcgatatttcggttgacgacgagcccgacgagcaaagcgttcgcgacattgcccttttggtccgctcggagaatcccatgctcggaggtgtttttgacgacgcggttttttcggttgacgacgttgtaacggtcaccctttgccacggcggaatggaccttataaaggcctgcaaggccggtgaaaaaatagaaaattacataagcaaatttttcaaaaccgaaatttcggtaagatttgacggaaaaaccgagctttcggagggcgaaaaaaaggaaaaaatcaaagaggttcaaaaaaatatcgaaccgccgaagaaaaaggaagaaaagcagtttacgggcaccccgtctgacggacttcccgtttatcttgagtcggcatctcccgtgctcggaggcaccataagctcaaagccaataaagctttgcgacgtctcgccagatcagggcaactgtaccgtttggggcaaggtgtttttgacagattcccacgagacaagggacggccgctcggttttttataacatttccataaccgataagaccggttcatacaccataaaggcgcgggttcagaaggactcggccgagcacaaagtctatgaggaaaagctgaaaaagggtgcctgcctgcttgttaacggaacggtgaactacgacacctatgcgcgggaaaatatcataactccgagggcgatttctctgcttaaggaggtgcctctcgacgacggctgcgacaaaaagagggtggagcttcatcttcataccaatatgtcccaaatggacggtatgacccccgtgtcaaagcttattaaaaaggcttatgcgcttgggcataccgccattgccataaccgatcacggcgtggttcattccttccccgaggcggctcagacccgttccgacattgtgaaaggcggcggggacatcaaggtgatttacggcgtcgaggcctatatgatccatgatgaccaacacccgagcattattgcaaataagaaaaatatccgccgttaccattttataattttggttaaaaatcagacgggacttaaaaatctctacaagctgatttccatttctcacatagataattatcatgtccgtccgcttatgacgatgagcaatttaaagcagtatcgcgaggggctgatatacggaacggcctgcgaacagggcgagcttttcgacgccgtcgtcgacaaaaaaagcgacgaggaaattgccgaaattgcgaaattctatgattatctggaaattcagccggtgggaaacaaccgtttcatgctccgcaaggataccctcatgaacataaagaacgccgaacgcagagaacgacttcttgaaaaatataaggaccttaacaccgacgaggatcttcaaaatctcaaccgcaaggtcgtggaaatgggagaaaagctgggtatgccggtctgcgccacctgcgacgtgcattttatggacaaggaggacgcgattttccgcgccgttttaatggcggggcagaagtttgacgatgccgacaatcagcctcctctttactaccgcacgactgccgaaatgctttccgagtttgaatatctcggaagcgaaaaggccgaagaggtggtcatcacaaaccccaataaaatcgccgacatgatcgacgtggtcgagccgcttccgtcgggaagctttcccccttcgatcgaaggctccgagcagctgcttcaggacattacctggaagagggctcatgagatttacggcgaaaatctgcccgaaatcgtcgaaagccgccttaaaagagagcttgattcaatcatcggaaacggcttttcggttatgtacatttcggcgcaaaagctggttaaattctccgaggacaacggttatctcgtcggctcgagaggttcggtcggctcctcctttgccgccacgatggcgggaatttccgaggttaaccctctcgctccccactatgtttgcccgaaatgcaagcacagcgagtttataaccgacggctcctatggttcgggctttgatttgccgccgaaaaattgtcccgagtgcggaaccgacatgagacgcgacggacacgacattccctttgagaccttcctcggatttaagggcgacaaggttcccgatattgaccttaacttcgccggagaggttcagtcgaaggtgcataaatacaccgaacagcttttcggaagcgaaaacgtttttaaggccggaaccatttccggtgttgccgacaagacggcctacggatatgttaaaaaatatgaggaggaaagaggactcaacctttccaatgccgaaatttcccgtcttgtggacggctgcgtgggagtgaaacgcaccacgggtcagcacccgggcggaatggtcgttgtgccgagagaatatgaaatttatgatttttgcccggttcagcgccctgccgacgacgttaaatccgacacaaaaaccacccacttcgacttccgctccatgcatgatttgctgctgaagcttgacgagctcggacacgatgttcccaccatttataaataccttgaggacaacaccggcatttcgatttccgacgtgcccatgtccgacccgaaggtcatgagtcttttcgagtcctgcgaggctctcggggtaacgcccgagcagatcggcgtcccaacgggaaccctttccatgccggaactcggaacgccctttgtggttcaaatgattgtcgattccaagcccaagacctttaccgaccttctgcagctttcgggcctttcccacggaaccgacgtttggctgggaaacgcccaggatctgattgcccaaaacatatgcaccatttccgaggttatcggaacacgagacagcattatggtttaccttatgcacaagggtcttgacccctccatggcgttccaaattatggagatagtgcgaaagggcaaggctcaccagaagctgaccgaggagcatataaatgccatgaaggaacacaacgttcctcagtggtatatagattcctgctttaaaatcaaatacatgttcccaaaagcccatgccgccgcatacatgatagcggcgctgcggctcggttggtataaggttcatcatccccttgaatattatgcttcctatttcaccgtccgcggcggagatatagatgccgccgtgctttccggcgggcttaaatcggttcagtcgaaaatgcgcgaaatcgagcgcaaggaaaaggaaaaaaccgcctcggccgtggaaaagagcagctatgtcacatggcagatattaaatgaaatgctgtgccgaggcatagaggttcttcctgttgacgtatataaatcagcggcgaaaaaatacgtcgtggaggacggcaaaataagaattccctttaacgccgttcagggactgggcgaaaccgccgccatttctctcgaaaaggccgccaaggaaggcgaatttctttcgtgggacgacataagggaaaagacctctgtttccaaaacagttatggaaacgctcggggagctcggagctctccgtgacattccgaagagccgccaaatgagccttttcggtatataaaatctttttaaaggagacccgaatgaacggaaaattcaaaaagtgtgtaagtatggtgctttcggccgtcgtcgttttcatctttatgacgtcgcccgcaagcgctcagacaagcgaggagcaggagttcgacctgctcggctctctttcggccaaatatgagtcaaacggcaatcccggagccatttcaaacggttcgggcgacgcaggcggcccctcctacggagcctatcagtttccgagctatcaggacggcccgagaacctttgcctattggctgatttacgattcgaagcttgaccccgccgtcggctggcgccttatagacgcctatgagaccgaaaatgcctacggagaaaatttcaacagggaatggagagttattgcctccgaaatgcccgactattttctcaagcttcaacgggcttatgtgcgtacaaaatattacgaccccgccgcagcggcgctcagaggattgggacttgaaatcgacaattattccatagctttcaaaaatgttgtttggtcccgagccgttcagcacggagtgggcggagcgacaaatgttttcaagcgcgcctttgagtcgataggcggttttgagggcaaaagcgagccggagcttatccgcgccgtgtatcacgaatcgggcataaccggcgactatgagggcaacaagatgtatgacagctcctcgtccattgtaagagattacgggcttgacggccaaacaatgagatatttcggcggctgttcgagtgcgatacaggcaggcgtctggctgagactcaatgtcaatgagctcggcgacgcactcgccatgtatgataagtataaggattccgtccccgagccgactccttccgaccgtaaaaaggttgttgccgccacccttgcccacatcaccgacggccgcactcaggtcaacataagaaccggtccctccaccgacagcgcggtgattgtcgccaaggacggcgggacgcgcctcgccataatcggcaataaagagggcgactggttccccgtcagatttgagtcgggcggcagggtgttcgacggatattgccacagcgactatgtcaccatagattttaacagcctgaccgtccttctcggcgacgccgacgaaaacggagcggttactccctccgatgcgctcatgattcttcaaaacagcgtcggaaaaatcgagtttaccgcaaagcagtattatgcctgcaacgttgactttgtcggcgaggtgaccatggccgacgccctgatggtgcttcagatgtcggccggtgttatcgatggattttaatttttgccgccgccttaaaaaggcgggcgtttattacggcgttttcgaataaattcagtttaaaggagtctttgacatggaagaagtatgcaaatttctcaaggaggccgaaacctattttctcgccacctgcgacggggacagtccccgcgtccgtcctttcggaacggctcatatttttgaaaacaagctttatattcaaaccggcaaaagcaaagaggtctcaaagcagatagcaaagaatcccaaggttgagatatgcgcctttaaggacggaaaatggctgcgcctttcgggcgagctttgcgacgacgacaggagagaggcgagggtctccatgctcgaggcctatcctgagctgtgctcgatgtatgaccccgatgacggcaacacgcaggtgctttattttaaaaatgccaaggcggttttcagctcctttaccgaagcgccgaaaacggtggaattttgatggacgatacccgaaaatttgccgagcttataaatttaagcaaaaagatcgtgtttttcggcggagcgggagtttccaccgaaagcggcctaaaagattacagaagtgccgacggaatttatttcacggcgcagaatttcggaaggccgccggaggaaattttgagccgcgactgtttttttcaagatccggagcttttctataaattttaccgagccttttttctgcaaaccgccgagccgaattttacccatgaatttcttgtaaggcttgaaaaaagcggcaaggatgttacggtggtgacccaaaacatcgacggacttcatcaggcggcggggagccgaaaggtttttgaacttcacggaacgacctcgagctacacctgtaccgaatgcggtaaaaaatacggcccaaaaagaataaaatcgtcgccggaaaacattcctaaatgcgactgcggcggaattttaaagccggatgtggtgctttacggcgaacagctttgccaaaagaccgtaaacggagcggttaaagccatttccgaggccgaccttttaatagtcggcggaacctcccttgcggtttatcccgccgccgggtttgtaaggttcttttcggggaatgcaaaggttcttataaatcgggacccgactccctttgacaaatcggcggatcttgttttccatgcctcactgggggatgttttttcgaacgtttcaaggttgatttttgcggtttaaagcgaatatagcttcaaaaaggttgctttttgaagctttttttatttttaaaaacaatattgtcataaaaaaattacaaaaatttggtaaaacatcttgaaattattaacaatttatggtaatataatgacaccaaacaaaaaaagaggaggcaaaataaatggaaaagaaattaaaggtacttatagcggagaacacggcggagtttggcgtgccgtgttcgaatctgctgaaaacctacggaatggacgtggtgctgaccccgaaggacaacagcctgctggtgatctcc

SEQ ID NO: 13 - DNA, 2153 bp, Unknown
  16S sequences of unknown bacteria
tactccccggctgtcatttcggattaattccctcttgactttttatagccggtcttttttcaaaagggaggtggcacggcgtagccgtgacggagtaacagggattgacaaaatgggcacaaaggccgcccgttaatcaaatggcaccctgcgcacctccagccccacgatggcgcgggtgccggaaccgggcgaggattccaggcggatggtgtgcgaaaggcgctcgagcgtctttttgcacagatagaggccgatgcccgtggacttttcgcccgcgcggccgttgaagcccgtataccccttttcgaacacgcggggcaggtcttccggctggatgccgatgccgtcgtcttcgatcaccagcgaaagcggctcgcacagcgatatgcggatgtgcccgttttcgcccgtgtatttcacggcgttggaaagcaactgttcgatggcgaaggaaagccacttatcgtccgtgagcacgcgcgcatccatttcctccaccgtaaggtggatgcgcttggcgatgaacaaccgcgcgtatttgcgcaccgcgccgcgcacgatgggcgccagcgcgcattcgcgcagcacaaaatcgctggcgtccgcgcccaggcgcgcgtattgcagcgccatgtccacataccgttccagcttgaaacgctcggcttccagcgcggcggcgtcttcccgcccggcgagcaaaagccccatggcggccagcggcgttttggcctggtgcacccacagcgtgtaatattccagcatgtccgcgcgctcctggtctgcgcgggaaatttcctcctgccagccgctttgcaggcggcggatgatggcctgcaaatcctcttccagcaggtcgcgcggcggcggcatatcgtccacgccgagcgcggcgttttcgcgcagcgccacgagcgcttcgtgcctgtgtcggaaggcgttcagcccaaaggccgccgccacgccgcccagcgccaggcagatggcgctggcataggccaccgcctccaccggcagatcgtatagcgcgaataccacgccaaaaacaagggaaaagacggcaaacagcgcgatcaggcgcgcatgccgccgcagataggcccaaaacagccggggcaattttatggtctgcattcaatccaccctgtaacccacgcccttttgcgtggaaatgtaatccttcaggcccacgctttccagccgcttgcgcaggcgcgtgacgttcacattgagcgtgttttcatccacaaagctatccgtttcccacaggcggcgcatcaattcctcgcgcggtaccgtttgcccccgcctttccagcagcgtttgcaaaatgcgaaattcgttcttcgtcagctccgcgcggccctcgggccccgtgagcgaggaatcgttcaggttgagcagcgcgccgccgtgctcgatcagccccgtgtgcccggcaaaatcgtaggcgcgccgcaacatggcctgcaatttcgccatcagcaccgtcaattcgaacggcttggcgataaaatcgtccccgcccatatccatggccagcacgatgttcatattgtccgccgcggaagagaggaacaccaccggcacctgggaaatttcgcgaatcttccggcaccaatgatagccattgtaaaagggcaggccgatgtccatcagcaccagatgcggatcgaacgcggcgaattctgccagcacattgcggaaatcccgcgcgcaacgcgcttcatacccccaactttcgatgtgccgggcgatttctcccgcgatcaccgcgtcgtcttccacgataaaaatgcgatacatactttcctccctggcgtgcggtttctccccgtatcataccatgctccgcggcgcctgtaaagcaacggttggctgcaaagcttacaaacgctggcaggccaccttgcagcgctttttgcaaaaggcgatgccgtaggccaggatgtcctcccgcccctcgccgcgcaggcgttcgtcgtagcgcttctctttgatctgcgccagcgcccgcgcgctcgcagcctccaacccctccaggctggaagcgtacttcacctcgatcaccaaccccgcgtccgggtcgtccagctccaccagaatgtcgcaaaacccttcgcccgattccacgttcgattggatcgacc

SEQ ID NO: 14 - DNA, 17875 bp, Unknown
  16S sequences of unknown bacteria
gggcatcgccactttccaattcttgaccgagttgtgagttctctcacaactcggttttttcttatctttcaccgataaacctgcccttcctttcctctatactccttactttcgcctgaccgtttcttttccttcactccctgttacgtctgtctaaaaaatcagccgcacggtttatccgtgcggcttttgtcatgaaatcagttcagagaaaaaatttcttcgtaatttgtatgcagaatttttttcaggaagattatttcgtcgggatataaatgccgttgcccgacttctatttttgccagagcactccttgttatatcgcacccttctaactgtaattttgtggctacatattcttgcgtaaatccgattttttcccgcaatcttcttatattatctccaatcttcctttctatcgatacattcataaataattcctcattttttgtgcttatacgggagcaaaccattgacattattatagcaaagtgataaaatgtatttgcacttatataagtgcaaatacatttagggagaaatacttatggaaaaaaaatcgttgaaggaatctttgttagaggcgaaagcaaataggagtgcagttgcgggaaaaaataagatgtttgagggaaacgacaagatattaaaggctttccgtacgggagttcttattttaacgatagttttggaaatgttgctttttgttggcgttatcattgcttgcgcttattggggcgagggtgctgttgctattgcggttacgtttgtcagtatgatgattttcgttgcgatttcctatgccgcaatgcaattgactttttcctttctcgtcgacgtcaaagcaatcagaaataaattatacggaattaaaaacgacgatttgttagagttggattctgccgaaagcgattcggaaaacggacaagcgcaaatgaagagccttacggggacaaaaagcattgtcgaaaagcaaaacgagcttttgagcttgaaaaaacttttggacgaaaaggtaataacggaagaagaattcgagacggaaaagaaaaaaattttatcgtaggaaatcgtcgagcaaacgctctttccgtaattgaacggcaaaggaatcaaagaagcattgtccgcggattacttttataagaaaaaacagcaaaaaaccgcaaaaatttcaaaaatctcccttgtaaatttcttccggatatgttataatgcgggtaagaaagttcctgaaaggaggaaaatcggttatgaaaatgaaaggttatgcaatgctcggaatcggcaagacggggtggatagaaaaagaagtccccgcttgcggtcctttggacgcgatcgttaagcccgtcgcggtttctccctgcacgtccgacgtgcacacggtctgggagggcgctatcggcgatcgcagggatatgattctcggtcatgaggcggtcggggaaatcgtagaggtcggttctttggtcaaggaccttaaagtcggagaaaaggtcatcgttcccgccattacccccgattggggcagcctcgaatcgcaagggggatattccatgcactcgggcggcatgctggcgggctggaagttctctaacttcaaggacggcgtattcgcggaatttttccacgtgaacgaggcggatgcgaatctcgcccgtctccccgaaggcgttgagcccgcttctgccgtcatgctcagcgatatggtgcccaccggcttccacggtgcggagctcgctcaggtggagtacggcgataccgtatgcgtcatcggcatcggtcccgtcggtctgatgtccgtcgccgcaagcgctttgaagggcgcgggacggctgtttgccgtcggctcccgtcctaactgtgtggaagcggcgaaatattacggagcgaccgacatcattaactataaggacggcgatattgtcgcacaaatcatggacaagacccacggcagaggcgtggataaggtcatcgtcgccggcggcgataacgatacctttattcaggccgtcactatgctcaaaccgggcggaagaatcggaaacgtcaattacctcggttcgggcgattatgtccgtattcctcgcgtagaatggggctgcggcatgggtcacaagaccattgccggagggctcatgcccggcggaaggctcagaatggaaaaactcgtctctctcatgcagtacggccgtttggatacctcccgtttgctcacgcatcgtttcaagggcttcgagcatatggaggaagccctcatgctcatgaaagacaagcccagagatttgattaaaccggtggtcgttctgtaaagactgtttttgattgaaaaatccccctttccgccaaaagcggagagggggatagtttccttgttttataaagtcagatcgcaggttacagatttataagttcgcattatgagataaatccatagtgtaggcataaatcatattgcggggataaactcgcgccgaaaattacgaatttacgcacgggcataattgcttccgcgggttacaaattcactccgtaatcgctgacgagaatctgacccgtgaggggcttggattcgtcggaggcgaggaagagcaaaattcctgcaacctcttccgccgtgcaggattttaaggacaaatccccgtgtttgttcatggcgcccatcatgctcatatccaaagaggcgggattgaggttcatggtcatgggcgtaatgatatttcccggacagaccgcgttgcagcggatatatcggtttgcgagcagcatggccgtgtgtttggtgattccgataattgcggctttggaagcgacgtaaacggctccgcctccgccgttatagcccgccacggatgcgacgttgacgatggacgcgccttcgctcattttttcgagcgccgcgcggatacattgcatggttcccacttcgttgatggaaataactttttccgcgtcctcgtcgaggtatttgtctatcgctttgagtcccgtgtccagcacgcccgcattattgacgagaatgtcgatttttccgaacttgtccgcggcggcctgcatcagagctttgcagtccccgtccttggaaatgtccgtggcgacggtcaggacgctgccgccttctgcgcggattttttccgccacttcatcgagcgcggactgtcttctggcgctgatgacgacgttcgctccttcccgagcaaacaacagcgccgcagccgcgcccactcccgaattgccgcccgtaatgacggccgttttgccttgtaaacgattcataaatttttcctccgaaattttattgattgtaaagcagtgaatattgtagcatatttgtgcacgcttgtcaatacggaggagtaaaatttcacacaattttaagaaatatcttgcggagaaggcaaaagcgtgatataatgaaagaacggcgcgaagaatgaaaaatcggagttcggcgcaaaaaaacgcagaaggaggacggctatgggcgtgagtaaaacggattttgtccgcgggctgcaatgtccgaagatgctttggctggacagtcatcggccggaggagaaaatcattcccgaagaagtgcaaataaaactgaatgaaggcaatgcgttcggggacagggcgatgaacatattcggagcgtacgtagaaacgacttgttatcgtgcggacggacggttggattataagagaatgctggaaaaaacatcggaatgtctgaaagacgggacgcccgtcatctgtgaggcggctttttcctggtacggaaattactgcgcggcggatattctgaaaaagacggcgacgggttacgagctctacgaagtaaaaaacgcgcctgcggtacggaaagaatttctcatagatctcggctttcagagctttctgctcaaaaagtgcggcgtggcgatagaaaaatgctgtctgattttacgcggagagcgggagggagaatatcggatagaggacgagaccgacgcggcaagagcccttgaacggacggcggacagaaaaatatggacgttttccagattgaaaaagcagtcggaggagccgtgcgtttccgtgggagaacagtgcgacgagccgtatcgctgttggtattacgagtattgccatggggaaaagcgttgatttattacgaataaaaaaatttttaagcgttttgcaacgtcgcggcgcttcttttcgtctatataggtgaaaggaggaaaagaatatgaaggtgaagggaaaattttggataggtgcaattttggcctgtgttctggctatggggtcctgcggggcgaaagcaaacgatttcgccgtcggagacggtggcgcggaaacagacgttcttcccgcgggcgaggacgtcggaccggacgccgcagagcccgaaggcggtcaggagacagatttccccgctccggggcagctcaccgcgggggaatggaacgataacgaaaattatgaatttttcctcagtcttttttcaaagggcggaacggacatggccgtcgggacggaagaaaattccaaggaagaaagcgcggattcggtagaggtttccgaggaacagagcgcggaatcggcgcgcgagggaattttttccgaatatacgaacgaatgggggttatatacgcaaaaccgcgtgacgatcgacgttttggacacggacgggaaaccgtgcgcgggcgcgacggcggagcttcgattcgagggcggaaagactttgaaaacaaagacggacgcgcgcggaacggcgtatttcttccccgataccgccgcgccttacgaggtgttcggcgggtatgggacgctcgtccggctcgaacgcggggatgaggggtatttgctcgacgaaacgagccgctcgttctcctcgctcgatctctgtttcatgatcgatacgacgggatccatgggggacgaactcgcctatctgcaatcggaggtgagcgacgtaatttcgcgcgtacaagcggaatttcccgccgcggatatccgtctcggattggtgttttaccgcgacgagggagacgattacgtagtcagaacgtccgattttacgggggatatacaggcgcagcagcgtttcctcgccgaacagagcgcaaggggcggcggagattatcccgaagcggttcacgaagcattcggagcggctttgaagctcggttggcgggaggagagccgaaagattttagtgcctgtactcgacgctccgccgcacggagaaaaaaacgaacagggaaacgcggtcgatatcgaagcggagttcggaaaactcgtctatgaagcgtcgcaatgcgggattgccgcggtacccgtcgccgccagcggagccgacacgctgacgcagtatttaatgcgctctgcggcgttgataacgggcggtacctatgtgtttctgacgaacgacagcgggatcggaaattctcacgaaatgcccgccgtaggagaatttaccgtcgaatatctcaattcctgtctcgtccgcgtaatcggtgaattgtacgacggtattccccgcgaacccgtggatttccgtcaggagactcgttaagactcgttgaagactcgtcggggaatttttgtttttctattgacttttatccctttttgtgctatactatcgacagagtatgaaaaagaggtgaaaggatatgagcggaaaagaaatgcaaaagggcgtaaaagcacccgttgcggccgtcgtgctcggagcgatcgcaatcgtggtccttttgtcgagcatcgtcatttatgacggggattacgagtggaatatagaaatgctgtttaatttcgtacggctttggaaaatgggattttatattaacgccttttttgcccttatttccgagattttatattttctgtttctcgcgtcgctcgtcgccgcgcctcttttgacaagaaaatatttttgggcgtgtacgattcccttcggactgcggattgcatcggcgttattttcgatgttggaagaactccgctcgtcggaatatattgcgacgagagcggaaatcataattctcctgctgatcgccgggattcccctgctgctttttagtctgggcgtcataaaggacaaaatcgtcgtgatcgtttgcgcggcggctgccgtcggattgctttttattttcagtattttcagaatgggaccctatatcatcgacaggaccgtcgatttatcgggcctgctcggatttattctgggcagcgcggagttgtttgtgtttctttctgccgttccgaaaaaagccgaagcgaaagcgggcggggcggagtacgctccttacgtctcggcgcaaaaatataatccttattcccgaaggaatccctccgcgcccgtttccgaacccgtgaaggaagatgtcgaaacgcggctgcggaaactgaaaaaattgagggaggaagatctcattacggaggaggagtattccgcgagacgggaagaaattctgaaagaaatttgacggaaaaatcaatgaaatgaaaaatccctgccgcatgatttagcggcagggattttcttcaataaatcggaacgcttttacccgtttacgacgtcataggcttcgcctctcaaaaacgcggcgagatgctcttccacgcggcggtgcaggcggagccgcgtctccctcggctgccatgccacgtgcggcgtgatatggcagtttttggcgtgtagaagaggattttcgccgcgcggcggctcggaggagagcacgtcgagatacgcgcccgcgattcggccctcgttcagcgccctcgcgagcgcggcctcgtcgatcagtccgccgcgcgcggtattgatgaggattgcggtcggcttgcataaggacagggcgcgttcgtctacgacgtgcagcgtctccgcgctctgcggacagtgcagggaaagaaagtccgaacgcccgaacaattcgtctttggtcacgtattcgtaagggcagttcggccgccgcgtgcgggtatgtacgatgacgcgcatgcccaacgccgaagcgacgcccgccactttggcgccgatgtggccgagcccgaagattccgagagtttttccgctcacttcgagcatggggtagtcgtaataggaaaacgcggaacatttttcccaatccccgcgcgcgacggaggccgtataatcgataaggcttcccgcgcccgccaaaagcagggaaatcgtatgctgagcgaccgcgtcggtggaatagtcgggggtgttggaaactgcgattccgcgcgctttcgcggcgtccaaatcgacgttattgaagcccgtggaatataatcctatatatttgagacggggcagggcagcgatgacttccgcgttaaggtcggtcttattcgcgagcagcacgtccgcgtccttgcagttttcgatgacctgttccgccgtgaggcagggatacagccgcaattccccgaaggctttcagggaggaaaaatccacgtctcccgcaaaggataccgtgtcggtgccgatgagacaaatgaccataatttactccttttgcggcggactgagccgccgtcgaacaacgttccgaatttgacggaaatattataacatacgggcggggaaagttcaaacatttcgggcgcacaatcggtaaattcggtaaaaaaacaaaaaaggtttacaaatgtcttgacagatgtaaagaaaaggcgtatagtgttaatgtctcggaaacggttgactgtcatcgggaggtcggaaggctcaaggcagaagccgaaaaatcggaaatttcaagacaaaaactgaaaaaagcgcttgggcaaaagctgaaaaaagaggacgaaagaaatatgccggacgtgaagagcgaagaaaacgaaataccgtacgggaaagaaaacgaaacgtgcgctgagctgaaaagaaagtacgacgtcatcgttgtgggcgcgggcgtcgcgggcttgaatgcggcgttgtttctgccgcgggataaagaaattctgttgatttccaaagagagcccccgccacagcgattcctatctcgcgcagggcggaatatgcgttctgaaatgggacggggattatgacgcttattttcgggacacgatgcgcgcggggcactttgaaaacaatcccgatacggtggactgcatgcttcgttcctctcgggagacgatcgccgatctgctctgttcgggcgtgcggttttcgcgggacgagaaggggaatttcctctatacccgggagggcggacacagtaaaaaccgcatcatgtatcacgaggactgtacgggcaaggaaatcacttccgctctgttcaggcgggtgaagcggttgaaaaacgtacatatccgcccctataccgtgttgctggacattctcgcagacgaaaagaacgacgtctgcacgggcgccgtactgaaagaccgcgcgacgggaaagatttttcccgtatccgcggattacgtcgttctcgccacgggcggaatcgggggattgttccgcttttccaccaattaccgcaaccttacgggcgacggcgtggcgatttgtttaaggcacggcgtaaagacggagcacgtcgattatatccagattcaccccaccaccctgtatacgaaaaagcggggcaggagattcctcatttccgaatcggtgcgcggcgaaggcgccgtccttttggacggggacgggaatcggtttaccgacgagcttcaaccccgcgacgtggtcacggcggccatctataagcaaatggagaaagagggaagcgagtttgtgcgcctcgatctccgcaccattcccgaaaagacggtgcgggagcactttcccgccatcgtcagaaggtgcgccgcggaggggtacgacgtctttaaggcgcccattcccgtcgtgcccggtcagcactattttatgggtggaatcgccagcgacctcgaaggcaaaacgagcatgcggcggctgttcgccgtgggcgagacctgctgcaacggagtgcacggaaaaaatcggctcgcatccaattcgctcctcgaaagcctcgtgttcgcaaagcgcgccgcgctggcgatctccaacacctattttcccctgtcggcggaagaagaaaaagaaggcatgcagggctttgatgaaagcaattataaggacgagcgaaggctcgccgcggaatataaaaaatctgttcttggagaaatccaaagacaaaagaaagaaacggaggcaaaaaaatgaatcccatcacacagacgttacaggcggataaactcattaaaatggcgctggaagaggacatcaccagcgaggacgtttccaccaatgcggtcatgcccgaatacagaaagggcaaggtacagcttctctgcaaacaggacggcgtaatctgcggcctgagcgtgtttctgcgcaccttccgtctgctcgacgaagcgacggaggcggaatttttcgtctccgacggcgacgaggtgaaaaagggacagctcctcgcggagctgacgggcgatatccgcgttctgctttcgggcgaacgggtggcgctcaattatttgcagcgcatgagcggcatcgcgacctatacccgttcggtcgcgaaacttttggaaggaagcaagaccaaattgctggatacccgcaagacgactcccaacatgcgcatttttgaaaagtacgccgtgcgcgtgggcggcggaaacaatcaccgctataacctttcggacggcgttttgctcaaagacaaccatatcggcgcggcgggcggcgtcgctgcggccgtcagagcggcgaaggaatacgcgccgtttgtccgcaaaatcgaaatcgaggtcgagacgctggaacagatgaaagaagcgctggacgcgggcgcggaaatcatcatgctggacaacatgtcccccgaaaacatggccgaagccgtgaaaatggcgaagggccgcgcggagacggaatgttcgggcaacgtcacgaaagagaatatttctcggctcgtcaatctgggcgtggattatatttccagcggcgcactcacccattcggcgcccattctcgacgtgtctttgaaaaatctgcaccccgtggattgaacaaaaaagggaggaaaggaaaatgacgacggacaatatcggcatcatggcgcgggaaaagcgtcgggaacgcatactcgccgcgctgggcgcgacggccgaaccgcagagcgcgggcgcgctgggagaccgcttcggtgtttcgagacaggtcatcgtgcaggatatcgcggtgctcagggcagagggctcgcccatcgtctccacaaaccgaggctatattctggcttcgggcagacaggcggcgcgcgtctttaaggtctttcacggggaggacagactccaagaggagctggaactcgtcgtggacaggggcgggacggtgaaaaacgtcatcgtcagccatcggatttacggacgcatagaagcggaattgaatatctccaaccgcgtggaagtctccgagtttcttcggagtatccaaggcgggacgagccgtcccttaatggtggtgacgggcgggtatcactatcataccgtgactgcggtgagcgagagcgatttggacgaaatagaaaccgcgctgaaaaagggcggctttttggtggataaataaagaggacaggtatggaagtaacggtattttcgggcgagtacggggattcggacgcgctgaaaaaggaacacgcgctggggcttttcgtctcgacgggagaacatcggattttgttcgatttcggaaacaaaacggcgcttaaaaaccttcgggcgctcgatctgtcggcggcggaagcggatctggcggtgctttcgcacggccattcgggcgcgggcgggggactgaaagagctcgcgcccgcgcttcgcggcatcaaaatttacgcccgcgagtcggcgttcgacgcgcactatttcaaaaaatcccgtttgagctacaagaccgtttctctgccgaagaaattgccgagagagggcttttcgttcgtaaaaagttttctcaaaatcgatgacgagctttcgatcatttccaatttcaaaccgacgaagcaggttttggcggaaccgcgctatttcgtggacggcgatcgttttttcgagccggataccttttctcatgaactcgcgctgatcgtgtcggacgaagattcgctgacactgtttgtcggcggggcgcatgcgggtttgatgcagatcatcgaacgcgcggaaaagacgttctcaaagcaagtcggaaaagtcgtaggggcgctggaacttacggacaagaagggaaagccgctgtactcggaagaacgcacgcggaatttcgccttcgagctggaaaaattcacgcgtgcggaattctatttcgcgagcggcatcggagattcggttttcggcgtattacaggaggaactgggggaacggattcgccgtctgcacgtcggggagacgcggcggatataaaaactgacggagtggagagaaaagggcggaagaatatgagtgaaatagaaaaatataaaaaagtaagccgtatattcagagtggcggggctgattacgtttcccttgatgtttatttactatttaataatcgtattgtcaaatcgggaagagtttaacgcaaagtgtgccgtcgctgtctctgtatttttcggaacggtagcgattttcgttatgcttgctttgatattcgagcggaagagacgttatctggtcgataaatatttcggcagagtttccgccgaggatatcgaaaaaagcaaagagctgttgagccgaataaaaattgtcgtcacaggcggggagtatagttttttgggcgaggaagaatttgaatttgacgctacaatgctgaaaggctggttgaagcaaatggcaaaagggcataaaatatataaaggcggggcggagttttattttgctctccgacaggcaatcgaggaggcgcccgaaagcgaaagagatttgacaaaaaacaaggaatttaatgcgtatgtaagagaactggcggaattattcgagaaaaacgcaacgagcgatatatgaaaaaaccataaaactatcccgctttatttcttttaaggagtaaggcgggatagttttgaaaaagtaaggatttttttgttttcgacaaaagtcccccgaaaaatttcctttttgtttgttataaatcgcgttcggctttcatagattaaagcagaacgataccgaaaggaaaaaggagatttttttatgaacgaagaaatcgaatatgccgaaatgctggaaattcccgtttctacggtcaatgtggtcaagaaaaagaaccgtcgggtccgcgggaaaaatcagccgaatctcaaagagcgcctcatttcccgcgtgaacgacagagtggggaatgactcctatgcggaagaaggagcctattccgcgcccgcgtccgcgatggaacagaatccgatatacgcttccgcggagaacgcggcgatcgaagacgccgcgcagaacacgcccgcgcccgaatcggaggtcaacgcctatgcctacgcggacggcggcgagcggttggaaaccgtcctgctttcggacgaggaggggaaaaccgcgaaaaagcgtcgcggccgttttttcttcggccgcaaagacgagtccgtgcctttggacgaggaagagggaggctacgacgacgacggcggcacgggagtaataaagaccaaagccgaacgccgttcgggaattttcctcacggtggaatttgcgctcgcctgcgcgctctgcgggacgattttcctcaccaacgtctttatgcccacgagcgcaatcaatacgtttttccgcagtctgatgcccgcggaagaggaacaggtcgataaccgcatttattccgactttacgctggcgagcgtcgtcagcgagctgtccgacgcggaaattaccgtttctcctgcgggagtgctttccttcacggatgagtgctgcgtctatcccgcggtggacggaaaagtcgcggaggtgacaaagaacgcttcggggacttacgacgtaaaaatttcgcatacggacagtttttatggaatcatcagcggattggactacgtatattataccgtcggggataaagtgtattccaacgttcccgtgggctactcgaagggcgaatccgccgtacaggtaacgatgtattcgggcgacgagcttctgaattgctatgcggtggacgacgaaaactgtctgacctggatagagagcgagagctgacgcgcggcgtctgaaaacgaaagtgaatctttcggaaacgggcgcccgcgagcgccccggaaagcgtaaaaagaaaaaattccgcctcccccttcatcggaacaggctgaaaattcatcctctgtttttattgctcggagtatattattgctttatcggcgaattgcccatatttcttttgagtgcgctcgtcgcgcttcaacacgaatgtgcgcacgcctttgccgcggcaaaactcggatataagctcgaccgcgtggttctgatgccctacggcgccgtcatagacggagacttgtcgggcatcagtctcaaagatgaatttttcgtcgccgtctggggacctttatgcaacctcttcacggcggcggggttcgccgcgctgtggtggttctggcccgatacctatgcctttaccgatacggcgtgtttcatctctctggcgatcggactggtcaatttcattcccgcctacccgttggacgggggcagggtattgaaatgcgccctaagaacctgggtgaaggaaaaaagcgcggaacgcatttgccgcggcgtgactttgagcgtggcggcggggcttctgaccacgttcgtcgttctctgcgtcagaaaaactcccaattttacgctgctcgcatttacgctctttctcgtcgcgggcgcgttcggaaatccgaaaaacgccgacgctgcctatcggaaaatcaatttttcttccaaagcggcttttcgccgcggcgtggaaatccgccgcgtcgccgtcgaggagacctgtcccttaaaacgcgccgtcgggtttatcgagcgcgataaatacctgattttggacgtctacgacgaaaaggagaattatcttggggaaatcggccaaaacgaattggcggaaattttctctcgtgcggaaatatacgatcccgtcggcgactttctgtaaagagttttgccgcgccgtgaaaggccgataggtttcgcaaacgattgacaggcttcgtaaacggtcatatcgacgtgaatggctgacgggtttctcaaacggtcttactgtaaagggacgatagctttcataaagacggcggctgtaaaaatatgcaaaaaacgccaacgaattttcaaaacccccttgcaaaaagtttcgttatatgctatactatggttaagcggaatttttcgcgcctcaacagtgcaagaaatttgaaggttcggatatatatacatgaagaaggaatggtttttcgaccgctactgcggtcagcagttcgtcgcgctcttggaagacggaaagcttgcggaattcgctgcggaaaaggaaacgggcggcgaaatcgtgggcaatatctataaggggcgcgttatgaacgtgctttccggcatgcaggcggcgtttatttcctgcggactggaacgcaactgctatctgtccacggacgaaacttataccgattattccaaatacgacggcgcgctcggcgttccgaaaaccggtcccctggatttgaaagaaggggacgaaattatcgttcaggtcacaaagccgccgcgcggaaataagggcgcgaaggtcacgacacacctttctttcgtcggaaaaaaccttatttttcttccgaataccgattttgtgggtatttcccgaaaaatcgaggacgaggagcttcgacagaacctcatttttacggcggataagatgcgggaaaaggacagcgagggctttatcgtccgcacgcaagctccgtttgttacccgaagacagctcaaacgggaagccgaatatctcaaaaatctctaccgcgccatgcgcgattacgccgcaaaagcgcccgtgggcagcgtcctttataaggatttcgatttgcccgtccgcgtcatgcgcgacagcatgggcgacgacgttacggccatgtacgtaggggacaaggaattgtacgaacgccttttgtccctcgtccgtctgcgcggggattttcccgaacgcaaactcattttgtatacgggcaagcgcgcgatgatgcgggaatatggcatttctccgctggtgtttgccgcggctcagcccatggtatctttggaaaacggcgcgtatctcgtcatcgaccacacggaagccatgaccgtggtggacgtgaacacgggcagttttatcggaaataaaagcctcgaagacaccgttttcagcgtcaatctggcagcggcgcgggaaatcgcgcggcaggtgcgcctgcggaatatcggcggcatcgtggtggtggatttcatcgatatgacggaagaggcgcacaaagaggccgtgacggcggaattgacggcgtgcctcgcccgcgataaggcgaaatgccacgtcctgcccatgagcgaactttgcctgacgcagttcacgcgcaagcgggtgggctttgacgtgctctcgtacctggtcaagccctgcgcgcattgtcacagcgtcggttatgtccccgaggatattttcgtcgtcacccgcatccgagccgatatcctcgattgctttgcgagcggctaccattccgccgtcgtggagctcaacgaagggatttgcaggcgcattttaagcgaaggtctgttgaaaacggaagcggaaggcgcttggcggaataagcgggtctatctgattccgcacaagacttttcaggactttcagtattccgtgcgcggcgataattcgggcgtccttcaccttcccgataaggcgcagattctttattgaaaaatatttttgcttcttcttatcattcgatatcgttttatgcaaaagccccgctccgacttccgtcggagcggggctttcgtaaacttctgccgaaatttcagagcttttttccgaataaaacggaagcgaaacagggcgatttacgccgcttcttctttctctttgaaaatgacgttcgtattgctgccgaacgcattttccgcaatttcttccgccgatgcgggaatctctatttctttaagcgtggtgcagcccccaaaagcgtttctgccgattgtctttaagccttccgataaagtcacttcggcaagattttcgcattttgcgaacgcattatctccgatttccgtgacgggggcgggaatcgtcacggaaacgagagtggtacagtttataaacgccttgtcgccgattttcgtcaccgaaccgtcgtcgggaatgacggaggttttacagccatacaccaaggtttttgtcgccgtttcgataatgcagtttccgtcgctgtggtatacgggattgccctcctcgacggaaagggcttccaaagacgtacaggaaacgaaaatataatttccgattttcgttacgctcttgggaatgataatactttttaaggactgacacactgcaaacgcattgtttccgatttccgttatgctgtcgggaatggtcacggagacgagcttttcgcaccacacaaatccgttatccgctatccttgcgacgggcaggccgttatacacggcgggaatgatggcttcggtaatatccttctttcgggctttgacttggtaagcgggagaaccgttctccaaagtaaaacggctgaaaaagaggttttcgtccccttgcatgatatggatcgttacgccgtcatcgaaggcgttttccgcaacctcggttgcgtccaagggaagccagacctcctcgattgcgcagtccgtgaaagcaaaagattctatttttttcaaagcgggggaatggtccgcaaaagttatgtatttgagcgccgtgcagccggagaacgcattacttcggatttctcggacggattcggggaaaacgacgtgcgttaaggcggtatcgcggaatgcgctgtttccgataatctttacgcggtctcccaaactgacttcggtaagattttcgcagtttgcgaacgcatagcttccgatttccgtgacgctatcgggaatgacgacggactcgattcccgaagcgaaaaacgcgctctcgccgattttttcgacggtatcgggaatatctattacagctaaattggagcagttcgcaaacgcggaactcgcaatttccgtaacgggtttgcccgcatattcggaggggataacgacgctctttatcgtcggtttgaggtcgtcggcgagagcgaccgcgtatgtacccttttcggtcggagtaaacacaaacatgttttccacgtcgatttctccgcacaccgtacagacgcagttttcgtaacgatgtccctttgcctctaacgtttgcaatttcatgactccgcattcttcgcaaatgtggaccgcctgtccgtcctccgtacaggtgggttcggataaaacgaatccgtcgtcccagacatgcctcgtcgcttttgaaaagtcgtattccgtgtccccgcagatttcgcagcgccgcatcttgactccgagcgaggtgcagttcggctccgcgataatcatccattcggagtatcggtgcgggcagtctaaatccagcgtgacggaggtcccgtccgtgaacgcgacgacgagttctcccttttggttgacggacacctcgcggattccccgtccgtctttaccgtctttaccgtctatgccgtctttaccgtctatgccgtctttaccgtctatgccgtccacgccgtctttaccgtccacgccgtctttaccgtctatgccgtcttt

SEQ ID NO: 15 - DNA, 9817 bp, Unknown
  16S sequences of unknown bacteria
gtgatctcgttgatcctggcgccgatcctgatgcagatgacgccgctgttggatttcctgttccattaagagaaaagaaaaagcaaaccggtgcgatccgatttgctttttttcagctttctgtgtggacgaggcggtagacgacgacctcgcttggagaaaacagccgggcgttgatctcagtggtgcctacgccgctggagacttgcagctccatgccgctgatgctgtatttgcccagtgagtaagtctgggaaccgtcaaactgccggtatccgccgatcagcgggatgttgatctgtgcgccgtgggaattaccggccagccccagggagatcgacgcatagggaatctgctcatcggcgaacagatccggacagtgcgtgatcatgatgttgtattcctgatcgctgatgttgctgaaggcggcgctgaggtctggagagccatttacctgggaatccgccccgatgagcgtgatgccgctcatcgatccgttgcggatgcggatcgcagtgttggtgagcagctcaaagtcggcgccgtccaggatctgggtgacctgcgtcctgatctcttcgctgacctggtcgcgttcgccgagcacggcgtatttgcccagcggcgcatcgatctgcttgagcatctcagtgagcgaggaagcagtttcctcatcgatcccgtttttctcgggatgattgaacaaatcgccgccaaagatgacgacatccgcctgtgcatcattgatcgtatcgatcacatcctgcagcttgttctcgttcatgaacgcgccgtattccacgtccgtgaagaacaggatctgtatatcgttcatcgattccgggatcttgtctgagcgcagggtctcatagcgcacttcggtatggttgaccgccacgaacagcgcgtagtacatcgagcccatgaagatcagcgcgaggacaagaaggatggaaacgatgcgaagcagttttcttaccatctgtttcaccacctgtgtgtaagatattctatcatactgaacggcaaaaaagaagtccgccgcagcggacctcgggttattctgcttttgccggctgtgcctttttggcttcgccctgtgcctctttatcgtggcggcggtgctccttcgcgccatggttctttgccctggctgcacgggaagcgttgcgcgcggcacgcatcgcttcgatctcggccatggtcgacttggagttgatgatgaccgggatgacgatcgggttgcgccgcgtcttgttgtagaggaacggttcgagcgaggagcggacacagttcttcagttcgccgaatgtcgtgcgctgcgccatcttttccttcagcgccgcatagacgatattctccgcctctctaagcaggctttgagaatccttgatgaagacgaagccgcgggaaacgatgaccggcttcatcaggatcttgttttctttagaatcgatggcgatgaccacggagaccagaccattgttggccaggatcttgcggtccttgagcacagcggtggaaagcccgctgatgtcattgccatccacatagatgtcgtccgcctgtatgcggaagctggtcggcagcacctgatgatcgcgcaggacgagcacgtcgccgttggcgcaggtgaagatgttttccggcgggatgccggtctcgatcgctgtgttcttgtgctggacgagcatcttgtattcgccgtggaccggcatgaaatatttcggcttgatcagctgcagcatcagcttctgctcctcctgggaagcgtgcccggtcgtgtgcaggttgttcagcacagacttggtcagcacgttggcgccggcgcggaacagcttgttcaccacatggttgatgctctcgccgttgcctgggatcggggaagaggagaagacgaccgtgtcgcccgggatcagcttgatccagcggtgcgtgccgttggcgatgcgggagagcgccgccagcggttctccctgcgaccctgtgcagacgatgcagatcttgttcgccggcgtgtggttgagctgctcaggcgtgaggaaatgctcgtccgcgatgcggatatttccggatttgcggctgatgttgacgacgttttccatgctgcgtccgaagatgcagaccttgcgcccgcagcgtacggctgcctccaggatctgagagacgcggtgcacgttggatgcgaacgtggcgacgatcagtctgccgctgcacttgcgcgtgatctccaggatctcctgtgcgactttcttctccgagatggaaaagtcttcgacgccggaattggtggaatcgctcatgagcagatcgaccccgatctgtcccatgtatgccatgacctgataatcggcattcagcccgaccggggtcaggtcgaacttgaaatcgccggtctcgacgatgcgcccgttgggcgtattgatcaatatgcccagagaatcgggaatggagtggatcgtgttgaaaaagcccacggtgaaatgcttcatgtggatcgatgactcatcggtgatctcgatgagcttcacgcccttcaccatgcgatgttcctccagcttcttgcggatcagcgcgcaggcaaagcgcggcgcgtagatcgcttccacatttaccgtgcggagcaggaaggggatgcccccgatgtgatcctcgtgaccgtgcgtgatgacgagcaccttgcgcttgcggttatgcttgagcagatggctgtaatcggggatgacatagtccacaccgaggaggttgtcctcgggaaaacggacacctgcgtcaacgatcaggatctcatttccatgttcaaaacagtacgtgttcttgccgatttcacccagtccgccaagcgcgtatatcatggtatcgtttttttcgatcgatgtcttattatattcattgcggaaactatcggtttctttcggtgcgtgtgtgcggtgattagaattcatattatctcctttcctatgatttatctcatgttcagatcaaatgactgcacccttgtccatactattatagcataaaatccgtttctttaaacttcatatgagctaatggtatgcctgaatcaatcatctattataaagaaggcatctgttttgtcaaccatttctctttggatgataaaacaaggggcacggaatgtgtcccttggcttatcacccgatgacttccgcctgcggatcttctttccacgggtcatccttgttgatgcggtcatagaagaggatgccggaaagatgatcgatctcatgctggaggcagatggcggtatagccttccgccctgacccggatgaaatcctttctgagcaggtcgtagccggtgaccgtgatgcgggcatgacgccagacgagcccctcatgctcctcggcaacggaaaggcagccttctccctgcgccagataggcgttctgcacggattccgaaacgatcctggggttggccagcgcaaattcatcgctgccctcttccgtagggacgctgacagcgatcagcgccttggggatgccgagctggatggcggcgatgcccacggcggggcgcaggccttcacgcttggcgatctcctcgtcctgcgaatcgcgcacataagcgatcatcgcctcgagcagctcgctgtcttctgcgctcaggggcagggggacctgctcgcttttcgtgcggatgcgcggatcggtatcgagaatgatgtccttcacagatattttcatgaatgtccttcctttctgatgttcatgataattcttattttaacgtcttttatatcgattgaaaagtttttttcacaaaaacgccgtgtaaaagcattttcgaatatggtagaatgtacttaccgcaaaggagggggaccatggcgaaggagaagaggaaaaaagggaagctgaccggtatcctgcgcatgccgaaaggatcggacaagatcctgcatttcaccgtgcttgtgctggtgctgtttggctccgtgatgatcgtggacatcaatgtgggacagacttcttccaacaatatggtcgtcatcaccactgccgtgaaacaggggctgttcatgatcgccgggtatgtcgcgatgctctttgcggcaaaggtatttgaattcaactggttttaccggctgagcaaggtgatcatcatcgcgatgacggtcttgctcatcctgccgttcttttcgatcgaacaaggcggatccaacgcctggatctatatcacgatcggttcgcaggtcatctcgctgcagccttctgagttcgtcaagccgctcatgatcgtgctgatcgcgacgtatgtctatgcggcgcagtatcacaaggggatgcagaagagcgcatggaagatgctgcgggtgccgatcatctgctttgtcttgttcagcgtcatcatcctggcgcagcgcgatatcggcgcattggccatcttgtttctgatctgcgcaggcgcgatacagactgtcgcttatccgaagctgcgcaagctgcaggtcgcagcgcgcgcggccgtgctgatcggctttgtcttggtcttcatcggcatgtcgcccatcggtctgccgatcgtggaaaagatggcggatctgccgctgctcgggcatatcgccgctcgtttcgtcaatgccgcggacccgaccgcgctcgatatgtacggcggaggctatcagccttcgcatgcgctttacgccatcaccagctcaggcatcttcgggctggggtttggcaactccacccggaagtatggttatctgacccaggcggacagcgactatatcctggccatcatcgtcgaggagctgggcatcttcggcctgctgttcatcacgatcgggtacggcatcatcatcttccggctgttccgctatgcgttcaagaccaatttcgtgccatataagatcatcctgagcggcgcggccatatatctgggcgcccacttcatgctgaatgtgggcggggtcagcgcgctgctgccgctgaccggcgttccgctgctgttcatctccaatggcggttccgcgctggtgagcgcgttcatcacgatggggctgtgtcagcatgtcatcgcgaagatcaatacgacggagctggcggaaaagcagtaagcagaaaagaagtccgcggtccgcggacttccaaagaaagggaagaggagaaacaaagattgggggtttcacatccgttgtttcatcggatgcactagtatcattcccccgtctttgccgtttatacacgaggagttgaaaaatatgcgaattgttgcaggggagtttcgttcccgcaccatcgatgccgttgcgggcagtgcgacccgtccgaccgccgacaagatcaaggaggcggtattttctcgcatcggcccctattttgagggcggaaggatgctggatgcgtatgcgggcagcggcaatatcagctttgaggcgctcagccgcggcatgcgcgagagctggctgtgcgacatcagcgcgaaggcggtcgcgaccatccgcagcaacgcgtccaagctgggcgtggaggagcgctgccacattcaccgccgcgatgtgttcgccatgctcgacacctttgcgcaggcggatatccgcttcgacttagtctatctggatccgccataccgcaagcagaagaatgcagagctcatgctcgcgctggaagagaaggcgctgcttgagccctcggcatgggtcatcgtcgaaagcctcagtgaggatgtcttcgacgaggcgtatggcagcctcgtcaaggtaaaggagaatacatatggaacgatacgcatcacgtgttacaggaggacggcatgagcagggcggtctttccgggatcctttgacccggtgacgctgggccacctgcatctgatccgcagggcggccaggctctatgatgaagtgatcgtggtcattgcggtcaattcgcagaagcacgcgctgttcacggcagaagagcgccgcgcgctgatcgaagagaacatccgcggcatgggcaatgtgcgggtggatacggcagagggactgctggtgcgcaaggtcagagagctgggcgcacaggtgatcattcgcgggatccgcgatgaagcggattttgcctatgagaaacagatcgcctgggcgaatcatgagctggatgaacagatcgagacggtctgcctgttcgcgcaggaaggctatgcatcggtgtccagcagcatcatccgcgagttcgcttcctatggcgcagacatccgccgttatgtgccggaaaacgtggcggcggcgatagagcgaaaatatgagagaaaggagagaaacgatggctgatacgatatttgactggctgaagcgcaacggcatttccttttcggatcgcaggctgatcctggaggcgctgacgcattcttcttatgtgaatgagcataaggaagcgggccatgacaatgaacgactggaattcatgggcgacgcggtcctgcaggtgtggaccagccgcaagctgatcatgctggagcctgtgctcagcgaaggacagatgaccacgctgcgggcgcagctggtctgtgaggaagcgcttgcccgctacaaccggcagctgggctggggcgcctatctgcggctgggcataggcgaggaaaaaagcggcggcagagagcgggattccctgctggcggacatgttcgaggccatgctgggcgcgctgtatctcgatcagggcatggagccggtcacgaagatcctcgagcaagtgctcaccccggcgatcaaggcgccgaaaagcgagacgctgatcgactataagacccgtctgcaggaagtggtgcaggcggatacgcgcaagacgctgcgttatgagctgctcggcatggaagggccgagcaatcatccggaatttgaaatggccgtgctgctggatgacatcgtgctgggcaccgggaagggaaactcgaagaaacgcgcagagcagatggcggccaaagcggcatttgacaagatggcgcggtgagggcatgaacaaggcaaaaacgctgatcgtcctcgtctgcagctgtatcctgacgctgatgatgcctttgggggcacacgcgcaggaagaggaggctgcggacatccatgcgcgctatgcggcagcggcagacctgcagacgatgcaggtgctgtatgagcaggacgcgcagaagaggatgtatccggcttcgctcaccaaggtgctcaccgtgctgactgccatggacgagatcgatgatctggaggagacggtcacgatcagcatagagatgctcacggggctggaagacggtgccctgagcatcgccggcttcctgcttggcgaggaggtcaccatgcgcgatctcatctatggcgcgctgctgcccagcggagcagatgcctgccaggccctcgccgtcgctttgttcggcagcgaggaagcgatggcggccgcaatgaatgaaaaagcttcatccatcggcatgacgcattcccatttcaccaatacggtggggatgcatgatgcggatcattatacgactgccgctgatcttgtgctgctcatgcggcaggcatggcagaacgagacgatcaaggcggcgatgtctgcctctgcatacaccacgacgcccaacgacctgcacggcgaagggctgagcctggagagctcctggatcaggcagtttgcgtatgcggatgaagagaacatctatgtgaaaggggcaaagaccggctatacgccgcaggcgggctattgtctggcgagcatctgtgagatccagggccgcgaggtgatcgtcatcgtcgccggcgtgcaggcagagacgacatttcagggcgaaacggcatcggatacgacagcgatctgcacgcagatcgatacgcagatgcgcacggaaaatgtcctgcaggccggtgagccggcaggcatgctcgatctgcgccacacgttccacgatcctctgcccatccagagcgaagaggatgtcgatgtctgggtgagcaaaaaggaggatgtgcagcttcaggtcagcgtccgatatgaagtgagccaggcgccggtcagcgaaggagagcgcatcgcacagatcgagatctgcgcaggagatgagctgctgctgacgctgcccgtctatgcggaagaagatatcagcgccgagaccggcgccgtgatcatcgataccatacaggatgtgatgatgccctatggctttctggcctgcatctgcgcaggcgccttcatcctgatatggagaaaaagagaacagagggaaaagaaagagggaatttgagtgtttgattttgaaacggtgatccaccgtggggaagacagtgaaaaatggcgcggggcaaaggcgcgcggagaactgccgctgtgggtggcagatatggatttcccctgtgcaccggccattcaggaggcgctggaaaaacgagtgaaggaacagatctacggatatacgaccggcatggatgaggaataccgcggcatcgtctgcgattattaccgccgtcattttgactggacgttcgatccgcaggacatctactttaccggcggggtcgtgcaggccatctccatcttgtgcggactgctctgcgcgcagggagaaggcatcgtgatccagacgccggtctatcatcctttccgccgccagatcgaggccaatcaccgccgctgcgtggtgaatccgctgatccgccatgcggatggcagctatacgatggacctcgctgaccttgaggagaagttccaggatccatccgtcaaagggatcctgctttgttccccgcacaacccggtgggccgggtgtggaagccggaagagctttgcgcgttggcagagcttgccgtgcgctatgataaatggatcatcagcgatgagatccatgccgatatcgtgaaggccggctttacgcatcatgtcctggatgcgctgtgcccgcagcttgccaatcatatcatcacctgcaccgctccgaccaagacattcaatctggccggcgtagagtgctcccatgtcatcatccatgatccgaaatggaaagcgctgtgggaagagaaggtggtgcggcagatgtgcatcagcgagccgaactgctttgcgatcagcgcgctcaaggcagcgttcagcgaatgcgatgaatggcgtgcgcagatgaaccgcaaggtcgatgaaaatgaagcgtgggtcacgcagtttctgcgcgagcagctgccagaggccgtgatctccccgcgtgagggcacatatctgatgtgggtcgatctctccgcatatgaaccggatccccatgtcctggatcagcgcattcgcgaacatgcccgcgtgcatttcaatgacggggccatgttcggggaagaaggcgccggtttccagcgcatcaacatcgcctgcccgcaggtcatcgtgcaggaagcgatggaacgtgtcgcgcaggagctgcggaagtaaacgcaaatggtcgagcgaaagaacagcggtcttgatgatcctgttctttttttgccggccacatgaacgagcggaaaacgctgtattttatcgttaaaaggtgataagatgttggtacttgaaatgagggttgtgcatgaaactgagtgtcactgatcttgcgaaaaagctgcagatggatgaagaaacgctctctgccctggagggcggttctttttccatgaagccggtgtatcaccgccggtccaataccctgtccatccagctccatctggaaaaggcgctgtcgttcggggtgcgtgagcggctgctggcgcgcatgcagaaggagcttcaggtcaaggtggacctgcgtgtggaggcagcggatggcacggtgggcatcatggatctgctcgactatctgcagcatttcgttt

SEQ ID NO: 16 - DNA, 6168 bp, Unknown
  16S sequences of unknown bacteria
gaagcgacggactttccacggcaatttttgtttcgggcaaagaaaaagcgcccgagttttcaaaaaacacggacgcatttgacgttgtttttatcggctccgacggggaagtttcggagcaaagctgcggctgaaaatcagcctattctgactgctgcacggaaacggctctgcgcggcgattataatggggatgatgacaagctcggcaaccgtcataattccgatttgcgccagccttgtggccatgacggcaaaatagggattatgatagagtatcgagatccaaagggtgttgataagcagaccgcacacaaattgcgacagcacaaccgaaatcgcaaccctcaaaaagctcggattgttcttgagaagcagaccgaaaatcacgcctatgagcgctgcggtgaaggtaaaaccgggaaaatagggcccgatggggaagagcagcgtgccgagaagatcggccatgccgcccacaatcgccgcatcgacggggccgaacagcgtggcggcaatgacgacgggaataaaaccgaatccgattttaatgttccacgcctgaatcgacaaaaaccgcgaaagcacgatttgaagcgcgatgagcagggcgacggtcacaagccgtttgagattttgttttcctttttcttgcataataaaaaactcctttcaacagagagtgagtatcactctgccgccgaaaggcttaattgcaggggatattcacagcgggatgcagactgcgcaccgcaggcaaagcctttcgtccccgtgacaactccccgttcacgaagcactgacggaataatccacgcgcgccgtcttactctgttctttgagcttattgtaataccttgtcggctttttgtaaagccccttttaggaaatttaagaaaaatataaatttgggcttgtaaaagataccgattgtgatgtataataagctgtaaataaaattttggaggaatttcaaatgccacttgttaatacgacagagatgtttaaaaaagcttatgaaggcggttatgccatcggcgctttcaacattaacaacatggagattgtacagggtgttgtcgccgcatgtaaaaagcacaacgctcccgttattcttcaggtttcggcaagtgcaagaaagtatgctcatcatgactatctgcttgccatggttaaggccgccgaaaaggagaccggtctcccgatagctcttcatcttgatcacggtcccaatttcgagacctgcaaggagtgcgtcgacggcggatttacttcggtcatggaagcagccttccttacgaggaaaatattgccgtcaccaaaaaggttgtcgactatgcccacaagttcggcgttaccgtcgagggcgaactcggccagcttgccggcgttgaggatgaggtcagcgtttccgcagaggacgcgtcctacacaaagcccgaacaggttcaggatttcgtaagccgcaccggcgttgattcccttgccattgccatcggcacaagccacggcgcatataaattcaaacccggtcagaaaccccagctccgtttcgacattcttgaaaaggtttccgagcttcttcccggattccccattgttcttcacggcgcttcctcggtttctcaggagcacatcgcaatcgtcaacaaattcggcggacagatgcccgacgccatcggtattcccgaggaaatgcttcgcaaggcttcttccatggccgtttgcaaaatcaacatcgactccgaccttcgtcttgccatgaccgcgggaattcgccgtcattttgccgaaaatcccggtcacttcgacccccgtcaatacctcggagagggaagagaagaaatcgagaaggtcgttgctcataagcttgtgagcgtgctcggctgcgccgacaaggcataaaaatcaatcaacatttttcggaggtatattaaatgattacagcaggagatttcagaaacggcgtcacattcgaaatggacggcggagtttatcaggttatcgagtttcagcacgtaaaacccggaaagggcgccgcctttgtccgcaccaagtataaaaacgttattaccggcgccgtggttgaaaccagcttcaaccccaccgcaaaattccccaccgcttacatcgagcgcaaggaaatggaatattcctattccgacggcgatctttactattttatggatcaggagacctttgagcttgttcccatcggaaaggccgagctcggcgacaacttcaagtttgttaaagagaacatgatgtgccgcgtgctttcctacaagggcaaggttttcggtgttgagccccccacatttgtcgagcttcaggtaaccgctaccgaacccggcgtgcgcggcgataccgccaccaacgttaccaagcccgccaccctcgagaccggagccgaaatccgcgttccgattttcatcaatgagggcgacatgattcgcgtcgatacccgcaccggcgagtatatggaacgcgcataatcggaggtattaacatgactgttactgaaaaaatggcttatatcaagggaatggccgacagcattgaccttaatcccgacgataaaaaggataagcttattcttgccatggtcgacgctctttccgagcttgccgactatgtgaccgacgttgacgattatgtcgaccagctcgccgctcaggttgacgagatcgacgaggatctcggaaacgtcgagcaggatttctacggcgacgactgcgactgcggctgctgtgacgacgattgcgattgctgcgacgacggcggcgccgtttgccccaagtgcggagccgagtttgagcttgacctcgacgctcttgaaaacggcgacatcatcacctgccccgaatgcggagccgagctcaactttgagtatgtcgacgacgaggacgaaaccgaggaataattttttcgggtgaaaatatgaaaagattcttttcgctttttttggcggcggctcttttgttttccttttcggcctgtaaaaagaaggacccggagccggaacccgtttcggcggtttccgagccggagcccgatcccgaaatggacgacaccaccgtctacaacggcaaaacgctcaagcaatattatggtgaaaacgaggattccatcggctggatgaaaatccccggcaccaaaaccgacaatatcgttatgctcggaaaggaaaaggcctatgacgggcagagcgaggccgatgtcaacttctatcttcatcatgatttcgaccacaattattctcaggcgggggaactttacatcgacttccgcgccaatgtcggtccaaggtcgacaagcaacaatctcacggtttacggtcaccacatggccaacggaacaatgcttgccggtatcgacagatataaaaatcagagctttgccgaaaaaaatccctacatcaccttcaacaccctttggaccaagcatcgtttcaaggtttatgccgttttcacggtggatttgaccaccgattacggcaatgccttcgattaccgccaacccgaatataagggagaggcctttgacacatatgtcaaggaaatttccgaccgccgatactatgatacgggcgaacagattaccgaggacagcgtgcttatcagtctttcgacctgcacatatcccaccggaaatcccgccaccgatgacgcccgccttgtggtcgtcgcgagaatgtgtaccgacgaggaggagcaaaagcttgcttcgggcgagcttaaaaatgcggacgattaaatttcagaggtgttaaaaatgtcagagaaaaaaggcttttttgcctcctttgccgaatttataaaccgcggcagcgttattgaccttgctgtcggcgttataatcggcggagcctttcagggaattgtcaaatctcttgtcagcgatttgataatgccttttgtggggcttgccacgggcggcataaattttaccgatcagtttttggtgctcaagcttgccgacggggtggagagcggaactacatacgcttcccttcaggcggctaaggacgcaggcgcaacggtttttgcctacggctcatttataaccgaagttataaatttcctcattatggcctttgtcatattccttcttgtcagaggcataaacaatctgagagatttcagaaagaaacccgtcgaggaagaggctccgaccacaaaggtctgcccattctgcaaaaccgaaataagcgtcgacgccacccgttgtcccaactgcacctccgagctttgcgaggagcaggaaaaggaaaccgccgcggtgtgacggtatatacgcaaaacaacaaaagacatgacccgttaagagccatgtcttttgttatgcctttgaaagtttgccgatgacctcgtcgagcgattttagggtggcgaccgccagctttcggtatttttcgtcgggaaccttcaaatcgggaatacatattacatctatatcggccgcatgagccgccgaaatacccgcctcgctgtcctcaagcacaagacagtcctccggctttgcatttgccttttttgcggcggtcagaaaaatttcagggtcgggctttccgtttttaacgtccgagccgtataccgccgagaaaaagtaatcggaaataccgttttgctcaagaatggtgtcggcgcggcttttgacgcttgatgtggcgagaacggcttttattccgttctcctttaaaaaccgcaaaagcttttttgccccgggtttgagcggtattcctttggcaaaatactccttttcggcctcggagatataacaaagaccctcctgcacggttatgggcagctcgtaatgggacacgatgtgctccatgtttttcacgcccactctgccgcagtaggtgtgcatatattcggcaagcgtaatgtcctttccgtactccagcagcatttttctgcaaatttcaaaggtgggaatttcgctgtcggcaagcagtccgtcaaggtcaaatataacggcttttttcaaagaaatcatctcccgatttttatatttagtatgtgcttttttacttgatttgagcaatccgcaaaaggaaattgacaaaatcggcaatgtatgatataatcatgataccctaaagttggctttaagtcaaggcgcggcaaggagattttttatgtattacagcatcggcagggtgtccgagatgttcgggcttcccgtttccaccttgagatattatgacaaggagggactttttcccaatatggagagggtctcgggaataagaaaattcagcgacaaagagcttgaaaccctcagggtaatcgagtgcttaaaaaaatccggccttgaaataaaggacataaagcaatttatggagtggtgctctcagggcagttcgacttattcaaagcgccgtgagcttttcgaacgtcaaaaggaaaatatcgagtgccggataagccaccttgagcaggctcttgacatgataaaattcaagtgctggtattatgataccgccgttgtcgacggaaacgaggacagacttaaggaaatgataccgaatgctcttccgccggaaattcagcagatatatgaccgaacccacgaaaaagattaacaaacgccgtctttcggaagtctttccgaagggcggttttcgcatatttggccaaaaaggttgatttttccgacgagatgagttataatttattatcattatattagtgaaagtgtgctgtgtcgaaaggagtcggtaaaatgaaaaacaagctttacaggattttgccgctttttttggcgctttgtctgctgctttcctgttcaaaaaccacgggggagcagggcgaaaccgtttccgacgctgccgagccttttcatgcaagcgggcagataaatatggcctttgtgcaaaacgacaccctgagtccctatgaggccaagaccaagagcaatcaggaaatatcacgtcttatgtatgacgggcttgtacgactcaacgacaaattcgagccggtttatgttcttgcctccgacattacggccgacggcaacaaatgcaccgtcacgcttaattcctcggcaaggtttaccgacggaaagcaggttacggccgacgacgttgtatattcgatttcttctgcaaaaaacgcttctctttccaaatattataccaagcttgaaaatgtaatcggttatt

SEQ ID NO: 17 - DNA, 3808 bp, Unknown
  16S sequences of unknown bacteria
cctgctggattaacggaaaggagcgatgatccatgaacgaaactacccggcacacgctttcggtgctggtggaaaacaccgccggcgttctgagtcaggtgtcccgcctgttctcccgcaagggctacaacatcgattccctggccgtcggcaccaccgatgatcccaaaatctcccgcatcaccattgaaatcgatacggatgacgcctccgcccggcagatcgccaatcagctgcgcaagctgtttccggtctattcggtgcaggagctgtcccccgacgattccatccgccgcgagctggtgatgattaaggtacgcgccgccaacagtgaggaccgcaacgaagtcattcagattgccaacatctttcgtgcttccatcattgacgtgtccctcaattccctgaccattgccattatcggcgccgagtccaaagtggacgctatccaaaagctcctgcagggcttcggcatccttgaaatggttcgtaccggtatggtcgccctggagcggggcggctctacgatcaacgataataacaaagaaaaaggagaatttaattatggcaagctgctatgacatgaaggcaaaaatgtactatgaaaaggactgcgacctgaaatacctcaaggggaagaagatcgctgtcattggctatggttctcagggccatgcccatgcccagaacctgcgcgacagcggctgcgatgtaatcattggcctgcgtcacggcaaatcctgggagaaagccgtcaaggacggttttgaagtttacacggttgccgaagccactcagaaggctgatatcattatgatcctggtcaacgacgagcgcgctgccgatatttataatgagtccatcggccccaacctgtctgccggcaacgccatcgcttttgcccacggttttaacatccgttacaagcagattgtcccccccgctgacgtcgatgtgttcatggctgcacccaaaggccccggccacaccgtgcgcggccagtatgtggaaggcaaaggcgtaccctgcctgatcgctgtggagcaggacgccaccggcgagtgcaaaaacattgccctggcttatatcgccggcatcggcggcgcccgcgccggcatcatggagactaccatggatatcgagaccgaaaccgacctgttcggtgagcagaccgtgctgtgcggcggcttggtggacctgatgcagtgcggcttcgaggtgctctgcgaagccggttatgctcccgaaaacgcttatttcgaggtctgccacgaggtcaagctgatcgttgacctgatcaacaagggcggtgtggctgccatgaactactccatttccgacaccgctgaatacggcgagtatgtgtccggcccccgggtcatcgaccacgaccaagtcaaggccaacatgcgcgcagtcctgtccgacattcaggacggcacctttgccggcaagtggattgccgagaacaagaacggccgcactttcttcaattccaagcgcgccatgctggcaaagcatcccctggaaacggtcggcgagaagctgcgcaatgaaatgctctggaaagacgccgagtccggcgatgccggtttggacgccgcttccaagtaattcccttcacaatgctacaaaccggcccactgcgttgcagcgagccggttttcctctccccaatctgcgaaaggaacgctgtctccatgcaatatctgatcgtttttctcgagggtatcatcacctttatctccccctgcctgctgccgatgcttccaatttacgtctcttattttgctggcagcgaggcccaagacacacaaaaaacactgctccacgcctttggctttgtactgggattcactttggtgttcatggcgctgggggcgctggccggtaccctgggcagtttcctgactgcctaccagaacgttgtcaaccttgtctgcggcctgatcgtgatcttttttggcctgcattttctgggcgtatttcagctgaacctgttccggggcagccgcaaagccatccgcacccgtaacctgggctttttctccgccatggtgcttggtttcatcttctctctgggctggacaccctgcgtgggggccttcctcggcagtgcactgatgctggcctcccagcaggggcatgtgctcagcggtatgctgatgctactaatctattccctgggcctgggattgccatttctgatcagcgccgtgctgatcgaccggctcaaatctgcttttgactggatcaaaagccactatgccataatccaactattcagcggcagtttcctgatcctggtgggcgtgctcatggccaccggactgttgggccgcctgctcacacttttatcgtaaacggaggaagttttcttgaaacagcataaaacaatttggattattctgcttctggccgccctgctcctcggcgcttctgtgctgtacacccagctcgctccctccagcggcgcactggctcccacgtccgcgcccgaaagcgacagtgcaacaccggagcctatcgctgcacccgattttacggcatacgatcttgacggcaacgccgtacaactgtccgattttgccggttccccgattgtgctgaacttctgggccagctggtgcggtccctgcaagagcgaaatgggcgtcttccagaaagcctatgatacatggggtgatgaggttcagtttgttatggtcaatatgaccggcggacgggaaaccctcgaaagcgcgtccgcctatgtgaccgaacagggattcactttccctgtcctctacgacacggacgccgatgccgccgtcacctacggcgtgcgcacactgcccaccacctattttatcgacgccgacggcttcctcattgctcaaggccgatctgctctggacgaggaaacattgcatgccggcatcgacatgatcctgtcttgagccacaccgaaaacagcgccgtattttcccgaacaggaaaagcacggcgctgtttttattcatattttttcgccgcatacaccaccggcacaaaaaagcccagcaccgcaatcagagacagaggaagccagcccagcggcggcaggaacgcacgcagcatcagacagagcagcggaaaccccaccggcgtccctatcagccacaaacggcaggtgcggataatatgaggccagttacggttattcagcgcaatgcccgccaaattcatacggaatattccgtcgctgtaactggtgatccggttttcatcataataggccggcagcacatcccggatcccgaagcacagatacgcgccaaaccccagacacaacccttccaccagcagcacgccgccgaataccgccggatctggagcgcacagaagcaataccgccattcccaatactgccagcggcaagcacaaccaccagcgccgtttccatttttgccgttcttcctgccgccgctgctgttccccggccgagaggcggaccgccccctccaccagcatttccacctcccgctgcgccagcggcgcatccgattccaggcgttcgccccgcagcagctctgtcacgctgacgcccagcgtttccgccagtggaatcagcagcgctgtgtccggcatactcacccgacgctcccacttgctgaccgctttatccgtcacatgcaggcgctccgccaattctttctgcgtccatcctttttcccggcgcagcgccgccacaaaggagccaaggtttttctcccgccgttcctcttccatcgtgtcctcacctcaccgctcatggtaaaacctgtctcttatacacatctgacgctgc

SEQ ID NO: 18 - DNA, 2122 bp, Unknown
  16S sequences of unknown bacteria
aatgtcttgactttatttctcctgttgactttttcaacaagactgttgcacttggattgacaatttgaggagccaagattgatgcgaaactcaaatatatttatttgtagccgaaatttgatgtaaacaggctgtttatgtgcaaacctgtggtttgcataggcgttcaatgaacgcccctacggatttattttataaatatatttatctatccccataattcattttaccaaattacaagtctaaaatattatttaccggcctatccgtgtgttcaatgcggatacaaagtcttcataccaccggtcaaaagcctcgtcggtaatgtagggggcaactgcctcttcccttgtccgtcctgccgcaactttggcgttaatttcttccaaatccgcctttgccttgtcggaaaggttataatccaaaacttttcttgcagccatgccgttttcaaatgcggaggttgtataatattcacaaccttcgtcatcagaaataaccaccttcaaacagtcataagcctttgggtttatttcaaggttgttatcccccagagctttgtccaaggcatcaacagaatgagattcctttgtaaccggcatataggaagattcgcagacaaacttgtagttattttctgtctccgtaaaccatttaaggaaaacgcaagcggcgtattcgtgggctgtgtctgactttgtaacagccatacctgccccctgctgaaccttgacattttctcccccgtcaaaaatcggcgcatttaaaatatcataatcaatactttcactgccctctgccgtctccacacagtccgggaagtacatagaagatgaagaagaacctgtgtaggcgataatatcccctgttttaacatcatcggagcggaatctgccgtaaccggcaaaccaaccctttacggtaggcacataccaattatcccaaaggcggcggattttttctttgtcggcatttaatttaacgccttcacctgtgacctgaaaaatttcggtgcccagttgtttcatacctattacaaagtagttagccatggaatctctgccgtagaaagccttgccccctgaccattcgtagtattttttcgcaacttcaacaattccctcgtcggttaaaagcatatcttttgtaacgcccgtctgctcggcaaaaggcttccaggcggtttcgttaatcattgttatttccgttgactttgccgtagggaaaagataaagtgcctcaccgttgttaaggtagccttcacgaatgtagccctcaacatatttgtcgatgtcatcctgtgtaaaatatctggtcaaatccgcaagacctaccgtgttcaatgccgtgtaggccaaatcggaataggaggcaaaaatattcggcacatcttccgcacctactttgccctcaatggcatctgtcacggcctgttccaaatcggaaactgagccttggcttttgccctcaacataaatgccctgttccttgcctaccgtggcattaaattccgacacaagccggtcaaaagccgcctgctgagcgccgttgtaatagtgccaaacggttattgctattgggttgttggggtcaagttttacaacttccacatttttggtgtcactccgacagcctgtaagggcccctaaaagcaaaaccgctgccataaggaaagttacaattttctttttcatttttcctcctattgccgaactgcctttataaaggtactgtcggcagtaaaataaatataaataacataactttttgttatgatatttggttgtaagtttggttgaaaatcagcatttttaaccgaacgaattgcaaggctctctttggtaaagagagctgtcagcgcagctgactgagagattggggaacattttgtttatgttcgatattcggtaacaacttcgcttgcaaatcagtttatcgtatcaaggtcaatccctccggtttttcttacgaaaaaccacctccctttgcatgtcatgtcctgtgggtacaagggaggcaaagttgcggattttggggttgttatttacagccgaaatttgatgtaaacagattgtctatgtgcaaacctgcggtttgcataggcgttcaatgaacgccccta

SEQ ID NO: 19 - DNA, 28340 bp, Unknown
  16S sequences of unknown bacteria
caagctgtgcgctcgccgaaagctttccgttctcgggaatgacgattccgccgtcctcggcgatctctccgtcaaccgtcaggctgtagggatagtatccctcgcggcatacgacggaggcgtaaacggtctgccccgcctcgggggatgcagtaagctcctttgttcttccgaagtccgcataaagcttaatttctcccggcgcgctttccgccggggtgtcctcggcgaacgccggagccgatgttgagagcatcagtgccgcaagaaccgcgcaaaatatttttccgtagaatttcatgcctttttctcctttcgaaattcaaaatgctgcagtatggatatattttttttaaaattttcaggggttcgatgtaatatatctctgcataagtgtaatatctgcatttgtaactgttccatcgccgttataatcggcaagatatatttgcgcatttgaaaggttatcccagcccgagcaataccgtgttaccaatattacatctgcattggttatagttccactgtaattaacatcaccacgcataagattaattggcgcgcggtaactgccctcctgatttgcaacagatgacagatcagctattttatttcctctgttatccgtaatcttaccgcttaacaattgcttcacattacctgtaagatcaactccaaggctgaaatttttgttatcaacaccaattccctgactgaccaccttgaaacaatcaaacactagtgtaaaactgcttactctttgcgtctgcggtccgggaatttcagcacttgttatacttccatttttctcttttaccaacgtaggacttacctgattgcgttgaacgggattaaatgagagttccgctacataatcaactttatagttacaaaccgtaattgctgtaaaccaattgtaggctgctccaagaggacgaaatgcggatactctttctcccggaagagaatcttcccaattgccgggtattgtagtttccttattcagtgcatcgtaaagcacccatgcatatccaccactgccgaaatcttctccccatgaattggcaatcttaaatgcgcctttttcacattcttctattattccatttcgatttacatcatatgatttattatcatcatacccaacaaccactaccgaatgtccgggattctttgccgtaaaacgatatagtataacatcacctttggagacaccttcatcaaaatcaaaatccgatgaagcttgaagaactttgccggaagccaaatatgacttaacttcatccaaacgagaatcggtaggtttagaaatcttcccccaaatcgtcaccggaatagttttaaaatacgcaacccttgtgtctaaagcttcgcgcattttgcttgtgttaaaatataacggctgcgatgaattatattctccctcatacggattatctgccatatgaagtgctccatgatgttcaagaaattcataggctttcccaacatataaaccaccatctgtatccatttcccttaaatagtaaaatggccattgaggtgaatacgcattttctgctgttgtggttacaccattaagtttgtttgcctcatatgtaaattgataatatactgttgaaaaagcaacacacgatccgaccctgccttgattagcgattggtggaaaatacggagatgtactcaaatcgacactcgccggcaaactacttcttaacatagacacattttcacgttcactgttatcagccctcattttcatgaatacttcatctgagtcaaaaagaactcctcccgaacaagcatgcctttccgtgacatcttccgctatgcttccgaacggcagtgtgattgccaaaaggagcgcggctatggatgcggtcaatgtttttctcgccatctgtttgaaatgttttttcattttgctgtgtcctttcgtttgtaatttaattggtcattacaaccaatattattataacacagctttgaattttttgtcaacatctcatggtgaaaaaatacataaattttctgtatttgctttgtattatttattttttggttgcaaaagcgtgaaagtctgacccaaattctttatttattcgctcattctccgatattcagcgcaacgtcgtgcgtgtgcaggtaatcatacgccggatactcacttttaaggaacgattcatccgatgaaaccgcattcttcggaagagccgcaaactgatagaacagaagcgtatagccatacggaacggtttccgcaataccgtactcaagcacggtctttccgtctttgcagtaaattctgttcaaacgttcgtagccctcgaacgcgccgtggctcgaaagcacaacaagcagcgtgtgttcgttgaaaaactcttcaccgtatccggcgattatgtcgtcggtgctccagcaaatctcatccctgtacttttcgggatcaaactcgtctttgccccatttctccacaagttcatcgagaaaaccgctgtcgggctttacgtcggcaagaaaatttttaagctcttctaccgaatttatcacaacttctctgtcgtgtttttcttcgccgcgtgtgatcttaagcatagaagtgaaatccaccgtgcggatattcgccgcaaccgaatattccttctcggggtaaagctcgttcttccatccggaaaggcggcgaaccatctgaattacatctttgttgtcaatggggtcgctgccgttttctccgctcatcttcccgtcgtagttcccggcaagcgtgtcgatatcgggacttgaatgacgcaaggagtcaggaattcctccgtcaacggcatacatgatcatgagaacgaggtccttcatatcgacccttccgtcaacggctatatcgcccgcgagcacaagctgtgcgctcgccgaaagctttccgttctcgggaatgacgattccgccgtcttcggcgatctctccgtcaaccgtcaggctgtagggatagtatccctctcggcacacgacggaggcgtaaacggtctgtcccgcctcgggggacgccgtaagctcctttgtcctttcggagtcagcataaagcttaatttctcccggtgcgctttccgccggggtttccgcggcgaacgccggagccgatgttgagagcatcagtgccgcaagaaatgcgcaaaatatttttccgtagaatttcatgtctttttctcctttcgaaattcaggaatttatggatatgtttttgctttcactatataataccgaaaaaattcggattatgctgcagtgttgaaaaatttttttgaaaaattttcaggagtctgacatgaatgcggcggcaggtgaatttaatgctcttttttcgcccgcaaagcagtttaccgtgcccgcctgctttttatttagccctttacttctgttatcattattatcatatctttgaataagatcaattattttgtcgagattttagctataatcgaaaaacgtattgagctgctaagtagtttattcacatttgttttcacgcaaaaaaggaggatcttccgatcctccttttcggttttgtctctgcggcagatgcgccgtgcgattatcggatatgcagtccgtcgggcgtgtgcagatcgtccgtgaagaatccgcagatgaggtgcatgacgcgccccgccgcaagcgctctgacgtactcccttgtgtgaagcgatccgaaatgcaccgtcatcgccgcgcagcgcgcgccgtcggcaaatcctatgcagaccgtgccgggttcaatcccgcgtccgtcacagtaaggagacgaatcggcgatccccgtcgtggacacggcgatatccgagccgaagcgctcctgcgcgccgcgcgccatctcagccgcggtctgttcgctcaccacgccgtatttttcgacagtctccgcgtccacgccgaggatcaatgttttcgtatccgtagcgtatgtgaccgcgctgccgcgcaggactgcggacgcgccgggtatgtcagagagcatctttgcgcaaagtcctcccgttatgctctcggcgaatgcgaccgtccgccccgaatccgcaagggttcgaaatcccgcgtatgcgcagctttcgtatgctccgttttctatgccgtccgatgcgaaatatatgtgttcgccgacctcggtctccctcacgcgcgcctcaagcgacgcgatcatttccgccgcctccgcttcgctctgcgctcttgcgctgattctcagtcttgtttcgccgctcttgcagtacggtgcgagagtcggatttgcgcccgacgtcagatcgccgagcacctcgtccacgcggctctcgcccattccgcaaacgtaaagattgcggctgcgtatgatcgcatccgaccgctcctttatatacgggatcacgctgtgcaaaaacatttcgcgcatttcgtggggcacgccgggcagcatcacgaccgcacacgaatccttctcgattatcgcgccgggcgcggtgccgcatgaattgtacagcacgcgcgctccctgcggaagctgcgcctgcttgagatttccggggctcatcggtctgccgcgcagacgggcgcggatgttctcctccgcctccgcgtcatgaacgagcacaagaccgagaagatcggcaaccgtttcctttgtgaggtcgtcgttggtcggtccgagcccgccggtcgttatcacaagatcggacgaggcgatcgcctcaccgatcaccgccttcagccgttccgggttgtctcccacagatgtgctgcgataaagcggcacgccgagctcgcgcagtcttgccgcaatatacgcttcgtttgtgttcacgatatccccgagaagaagctcggttccgacgcacacaatctgtgccgatgaaatcttcattattatataccttggctttcgcgcggaaagctccctttctgtccggcatatgcggaattttacgtccgtgatagatcggcggcggtgtttcgcctacgcaagggtgcgcatgtcggaggcatcatgcctcgccgccgttttaaaatcgtccgcagatgagcgcggggctcagcgcacactgtcagagagcgaacaaaatccgaaagcactttcgcaaattgcacccgtacggtataacctttgcgctttcgggaatatactaatatcggcgctcgctgtagcgaacgcgccgcgccgggcaggctgaccacgccggggtttgccggggcgcggctttttttgtccgtttctgcggaattttcgggtttcaatccatttattggcgaattatgttcacattttaatttattttcggatcggtgtcatgataggcaattgtacaatttggtgtcaagagtttttgcgaaaaatttcattttctacaggctgagattggatgagcggcgaaaaatccgcggtttcggcagggttttgaacaggctgtgccatagtgtctgttgaaaaggttcttgattttcagggttttcaacagtttgaacagggttttctacaggtcggaggtcgaacagtgttgatatccgacgatattttccgtcgtgttgcacatcggtgcttttttgtgcatattccacatttgggatttcgaatatgtattttttgttacatacaggtttccaatcggtggaaaagcgtttttcagatcccgaaatactttttgtcgagcgatctgagctgtatcgcctcggcgacatgctgaggctctatcgactccgaatgcgcaagatcggcgaccgtgcgtgcgacacggagcacacggtcatacccgcgcgcggacagattcatcttttcgaatgcggttttaagaagtctgagcgaagcatcgcccaccgcgcagaactcgcgtatttcgcttcgcgtcatcgctgcgttgcacgccgaagcagaccccattctgcgaatcgcaagagcgcgcgcgtcttcaactctcgcgcgtatctgcgcggaggattcggatttttcctcccttgtcagctcatcgaaggaaagtgcgggcagctcgacctgtatgtcgattctgtcgagcagcggtccgcttattttggagagatattttttgatatcctcacggcggcaggtacattctctgattccagagccgtagtatccgcatcggcacggattcatcgcgcagacaagcatgaaccggctcgggtatgtgacgcgacccgccgcgcgggttatcgtaacctgtccgtcctcgagcggctgacgcatggactcggtaaccgccttattgaattcgggcagctcgtcgaggaagagaacgccgccggaggcgagggatatctcgccgggcatcgggatcgcgcctccgccgacaagcgcgggcgcggacattgtgtggtgcggtgagcggaacggtcttacggtcacaagcccggattcggaatcgagcgtacccgatgcggaatgtatcttcgtgacctcgacggattcctcaaagctcatccgcggcattattgtcggaaggcgttttgcaagcatcgattttcccgtgccgggaggaccgaccataagtatattatgaccgcctgccgctgcgatctccattgcgcggcgcgcgcgttcctgtcccttgatctcggagaagtccgcgccgtccgagggaggcgcggaaaagtcgggctccgtaaattcggcggcggcgatcgttttcactcccgtgaggtggcgaaagaacgaatcaagattatccaccgggtataccgaaactccgccgaccgctgccgcctcggctgcgttccgcgcgggaacgaacacctttttgaatcccgcgtcgcgcgcgcagagcgtgcggctgaggacgccgcgaatggggcgcagctctccagagaaggaaagctcgccgatgagcacgctgtccgaaaggtcggtatccggcggaagtatcccgcacgccttccatatcgcggcgatcatcgcaagatcgagagacgagccctccttgcgccggtccgcgggcgcgaggtttattatgatctccgcctccggaagcgttctcgcgctgttttcgcttgccgcggcaagtcttcttttcgattcgcgcacggcattatcgggaagtccgactatctcaaaatacggaagattttcggaaaacgagcattcgaccgtcacaatatagccgtcgatcccgaaaagccctgtcgaataagcggtcgtaagcaaagcaatgcctcctcaatcacgattgtcgtatacggtatcccccggtttggtatggctgatcggcttctttttcgaaatgtccccgccctgtgcgtttctgcgtccgttctgcacggtgcgccgattttcgttctgcacgttctgcaccgtccgtcgggtgtcagcgcttccctgcacgctgcgcgccgtctgagtctgcggactccggcgcgccgtcggcgccgcttcctttacggaagtgctttccttatggggcgaatctgcggggacagttctgcgctgctgcggttttgccgacggcgtgctgccctgcccgccttcggcggcagggggacggcgcgtctgcgtatttcccgggcagctctgccgattcacgctgtccgcctttttgctctcctgaatacgccgcatttgcgcggctctcgcttcacggagcttttcggcttcgagatgcgatctctcgtttgactctgcggcgcgcgtccgaacgctgctgcgcatcctgttcttcttcggttttccgactgcggcgcacaccgcgcacaaaacgatgatcgccactgccgcaactgcaagcacgagcgtaattttcgaatccttcttcggggcggtatcctgcgagatacttccctgcgctgacgtttgtgtatcaggcgcgtcggtcgactgcggctcggctgtttcggtcagcgcgtcctgctttgcctgctgaatgctgtacagctcgatattgtcgaagaaatccgccttggtatccgcgccgacggtgcttctccagagtccgtagcggcacgggctgtatttcgttatctgcgatgctttggttatcggagcgttcgccgtgccgcgcatccattcggtaaaccatgtccaatgctggctgacgtggcactcgtatccggcgttgctcatttcgtatgcggtctttccgccgaaatgctcaagcggctgatcgaaatccataacaatctcgttttccgcccaaaggtgaaggtaaagcttaggcgtatcccacacgccgtactgagccgcagagtacggaaatttttccgcatcagccgcggcagacaccgcgtcgcgcagtgtttccgaatttatgatatgcgtaccgtgaccgtattcgccggcggcgtcatgcccgacgacgacctgcggcttgaatctgcggagattttcgacctgccattcgaggaaatcgtcgtagccgtatcctgcgtttgcaaacacctgcattccgccctcgcgggattccgaatagaggtcgggaaatatgccgatcacggggtaatttctgatgcccgccgcccaaagtccgttaagctgctcatgcggtcggacgggcgtattcgtatgctcgcagaaatagacgacctgcaccgccgcgccgtaatccaccgaatacgggagcactccggcaaagaaaagctgttcgtcgtcgctgtgagacgaaaacagaagcagatccgcttttttgcacggcttatcccacacctgaagatcgtccggcagctttccggcggtgaacgcgcggatctccgagatcgacgctcccttcgggaaggtcatcacgatctcttttgattctccggtgagagaggcgacgtccacatgctcgtgaaggaacgaatcccgaccgcggtcgcactcattgccgttcgctttgaggatccatggcttcgactcgagataaaattcgacgtaaagagaagcgatcggctcctgcgaggtaatcgtcagcgagccggtatagccgatcgtcgcgcagcttccctcgtttgaatcggtgagcggcgaggtgtcggcggtatcccagctgtaaaattcgagtgtcccggtaagctcctttgccgccgtctcctccgcatatgagatcggtgcggcacaaaggagaaatgcggtgctgagcaaaatgcaaagcagtgtctttttcacggtcgtaaatcctttcggaaaagtcgttttatattttctttgcggaggatgtatctatctttccgtgaacacgctcatgatatgcgaccgccgagcggataagtccggcgatcatattgttcgtgctctgcccctctatctgtgcgagagcctccgccttttcgagcagtgcagcatcaagcttcagcgtgaaatccactttctgtttcatgtatttttcctttcgtttatgaaaaaaccttgtcgttttccagatccgcattttataaagcgctcctcgggaaagcgcgtcgcggtcaatgcgaaagctgtccgagtgcaaaacggtctctgtgtcgctgtttcatactccgccgtcggcgcggaaattcgcgcgtgaggctatgccgaacaagtcctgcgcccgcgtgatccggggcggcatcggtaatctgcccgttatttcccgacgcagaagcgcgcgaatattccggagactatttcctcggagacgccgcgaccgtcgatgctgagtatctcgccgagcgcttcctccgcgctcgagcaggcggcatccggcagttcacccgagcgaagcgcgcctatcgcgcaggcgagagcctccgaggaacggtcgagcgccgccttctgctgcgcgttccagatcatggcgcggtcggagatgtccgcctcgccggaatcaaaaagctcttcaaccgcgcgttcgagtccgtccatgccctcgccggagcgcgctgatatgccgaccgtttttctgtgaagtgctctgacaaattcttcatcctccgcgctcatcatgcgcgagagatcgttcttattgagcaccgcgaccgtcgggcacgacggatgatctttcacgaaatcgcgcgcaaaaatcttttcctcatcggaaagagagtcggagagatcgtagacgaaaaaaacaagcgacgatgaatccgcgcagtcgagcgcacgctcgacgccgatcgcctcgaccctgtcggtcgaatccctcagtcccgcggtatcggagagaagaagcgtcacgccggcgaacgacaccgtttcgcgcagaatgtccctcgtcgttcccgcaatatccgtgactatcgcgcgctcttcgccgcagagcctgttgtaaagcgagcttttcccgccgttcgggcgtccgattatcgcgcacggaactcccgcggcgatcgcgctgccccgtcggtatgtggcggacagtgctttcagcttctctcccgtggaatcgaaaatatccgcaagatcgctttccgatatctcgccgatatcctcatcggggtagtctatcgcggcataaagctgagacagcgcgccggatatcatatcggcggcttcggtgacggcggcggacagaagtccgcgctcggcagaggatgcaagcgaggctctctccgcggtatccgcatcgatcagcattccgaccgcctcagcctccgaaagcgtaagctttcccgaaatgaacgcgcgccgcgtgaattctcccgccgctgcggggcgcgcgcctgcggcgaacaccgcctcaagcaccgccgtggtaacgtaaactccgccgtggcaggtgatctccgccatgtcctcgcccgtataggatgcgggagcggcgaaaaacgtacatattcctgaatcgacggtcgtcttcccggaaacaatcctcccgtacaccgcgcgtctcggcgcgtcggcgggacttgcctttcctgctgggacaaacacgcggtcaataatctcggcgctgtccggtccgcttattcttatcattgcaacgccgccgcgtccgtgaggtgttgatacggcggcgacggtctgcgtataattttcagacatacttatcctttctgcggctttgcatcacacggatcgaatcacaataggcaatccgccgcacggcacacttcgacaaagcgctaaagtgtgctgcccggcacgaatcgcacgggaagcgaaatccgagtatccgttcgcacgcgcttctccgcactttcgcgtcatcggcgcatcgggctttcggtccggctttcagtcgcgtcaccgtccgacttacgccgtgcgggatgcgtcatttccgctcgttctgcgcggtcgcgcgatcatccttttcgcgctttaagccttctctgcaccgtccggcaagcggacagcggtcacactcgcatccgcgcgctttgcagatatccctgccgaagagcaccgcccgatggcagaaatcgctctgcatatcccgcgggatcagcggatccattatccgctcgacccgcgccggatcgcgcagcccctcttcgtaaaagccgatctttccgcatatccgcataaaatgcgtatcggcgacaatcccgccgagcccgtacacgtccccgagcacgagatttgcgatctttctgccgacgccggggaacgagagcagctcgtctatatcgcacgggatctcgccgccgtattcccggacgagcttttccgacatcgccttaatcgatgacgctttcattctgaaaagcccgcacggtcttacgacatcctctatctcggaaagcggtgcctccgccatctctgcggcggtgccgaagcgcgcgaaaagctcgcggcagacgacgttcaccctctcgtcggtacactgcgcgctgagccgcgccataacgagaagcctccacggatcgccgccgtagtcaagcgagcagcgcgcgtccgggtaaagcttttcaagctcttcggcgcagaacatggcaagcgcgcggagcttttcggcattctccgatgcggcgggcgtattcttcggctgtgcgccggcgtcagtccgggagtgtcccaaagcttttgcctccggcgagatggccgcatcggcggacatctttgcctttcggatgtttacttttttatcagccatatcagcccttctcatcattttctccggctgtgccgttcgcgttttcctcggctttcggatccttggcgttcgggctgtttgtgatcgcgccgcgctcctcaaggtatctgtcacggaattcgtcgtatgcgtccttgaaatcaaggttgaaatagtgcgtgaacacgtcgcgcacggcatatcccgcgtcagtaccgcccgcgccctgctcgatcaccgtagttcctacgatctccggatcatcaaacggggcgaacgccgtaaacactgcgtttgccgacttgttctcggaaacctgcgcggttcccgtctttccgccgaccgcaagagggtatccggtgaacagccttgccgccgatcccgtatcctcggtaacgttcttcatcgcgttaagcacgacggagaccgcctcgtcggaaagcatcattttattcagtgcttcagtctgcaccttatagattatcgccccggtcgcgtgggaacgcacgtcctgaagaatgtgcgcgccgtatcttgttccgccgttcacgagagttgcgatatagcaggaaagctgaagcggcgtgaacgtattatccatctgaccgatcgccgcctgaacggtatctccggggctccatgcgttcagcccgtgctctatgcggtattcgggaccgccgagcgttccgaccgcctcgtcaagctcgatgcccgtatgctcgccgaggccgtagcccttgcagtattcgttcattttctcgattccgaggcggcgtcctacctcatagaagaagcagttgcacgacacctgtatagcctcggtgacgttgagcagaccgtgactcgaaccgaacatcaggtttatccagcatcgcggtgcgaaccccgtctcctcataatatctgtacacgccttcgtccattatttccgtataaggtgtgattattccttcgttgagcgcggcgaccgcgacccccggcttgaataccgatccgggagtatacgcgccgttcagcgcacggttgaacagaggcgaagaggaattcttcgaaagcgaagcgtaatcctcgtcgaaggtcgaaagatcgaacgtcggattggacgcgacggcaagcacggcgcccgtctttatgttcatgaccgtgaacgcgccggcccgcgcgtcctcgccgtcaagctcgccctctttatcctccgccagtgcgcggatatatgcgatattcgcatcaagcgagtcctcgacaatcttctgatactctatatctatcgtgaggtacacgtcgttgcccgcgatcggctcctttgaaacgtattcgtcgatcacgtttccctcggagtcctcgatgaccgtcagctgaccgtcgatcccgcgcagctgatcctcgaaagccttttccacgcctgaaacgccgactatcgcgtcgagcgaatatccgagcgaatcgtaatattcagtcttgtcgggctgtatcttgccgacccgtccgaggatatggcttgcgtatcccggaacgccgtagactctctcgacgttcgtttttacggagatgccgcgcgaacttccctccgaaagcagagtgataagctcaagcggggcgttctcggcgataagatagggattcagcggtgcgaaatttctgagctccatgtcaaggcggaagcagaaaagctccctcgtctcttccgcgttatatgtgtagtacgtctttttcttctccgtataggtaagtccgtaccgcttcaggagaagcgcggcgcagtcgtccgcctccggcagcggaatatcgcggtcgggtgtggtttcctcttcgttctccgtctgcgtctggggatttttcgggaatttcgcgccgagatcgtcgagcagcctcatcaggcgcgacgcataaacggtatacgatccgtcatccttataaagataggacgtattccacgaaaagacgaacttttccccgttccgctcgagcgtgaacggaccctcgggcgtatcatattccgcgccgaaatcgcgcactcgcgtgatcaccgacatgatgagcggattcttatccgcattcttcgcgggcagcgtcgtcgcttcgaagctgacatcgtacgaatacttgttcgtgacaagcgcgacgccgtttctgtcgtagatctgaccgcgcagcgcctgtatcgtaacggttctcgtgcttgttttgcttccggaggtcatcgtatagtaatcctgacccgcgatctgcagattcacgagcctgcctatatatatgagacaaacgagaaggaatatccccgcaagcgcaatataccgtccgagatgttcgcgttttttcattatacgttatttgtcccgcgggactccctttcttaagtttatccgatcataaatcggaaggcgtatcggtgcgctcggcacgggttctgtggaaggctttcagcgatatccagaccgccgcctgaacgagcggcgagacggcgagagtcgaaaaatactccggaagaagcgttcccgtgagcacctcggtgaatgtaaagtgcgccatatgcgcatgcagcatcataagagtcgccgccgcgcgcagaaatcccgcgcaaagctgatatataagccgtatcacggcgttttgtctgaggtagtagcggctgagcagtccgcttatatatccggtaagcatataaacgagcgggatcaccgaaaagcccgtcgttccgaccgaggatatgaggagcgacgatatcagtccgcagaccgcgccccatttttcaccttcggacacggcaatcgcaatgaccgcagacagcatcatatcgggcaccgcgccgaacgggcgcaggctcgaaaagatcgtggtctgaagaagggtgaaaagtatcatcagtgcggcgcagatgcccgcctttataagcgtttcgcgttcgagcaagatgtttgaaaatgccgaagatacaaagcgcttcacctttgcgcggagtgcattgaggtctattttcccctcgctgaggatcgggcgcttttccggaggaaccgtttttctcctgctcgcggtacgctgtgacggcggacgcgcggtcgtgctctttccgagatatgcactgcggcggtaatactgcgccggggcggcattatccgtcctgcggtttgcaccgccgacacgggaattttcaggtcgccgccgcgcgccgttttgcccgacatcatttcccgcacgcgatcgtgcggtacctgtgcgctcagtctttcccgtcttccgccgtgcgccgttttcacgcaggcgcgcatccgtcggcttatgggcggtacggcgtctgtccgcgccgtcggtatgcgcggtatttccccgcgcacctccgctttgatacgcgccgtttccgagcggtgagccgtcggggcgtaccgttctccgcgtaccgttcccgcgtccgtccgtgttcggcatatttccgttattcatcggcatcggtcgcttccttcgtctcatatgaagttatgaccatgacattagtaaggtctccgaggttcgcggcaagcttcacatatgcaaccttattctgactgaattcgtcggtctcgaccgaatcgacgtatccgatcacaagcccgcgcggatatacgcttccgtagccgcttgccactatgcggtcgccgaccgcaacatcgctgtcaggcgaaagatatgtcatcttcagaagtccggcggcagcaagagaatagcttcccgagacaagtcccgcctcccccgtgcggcttatgaccgcaccggtcgcactcgatgcttcggcgatcgtgaccaccttcgcccagtgtgcgcccgcctcggcgatatatccgacgatgccgtccgaggtaacgacgggcatattttcgaggcatccggacgaagtgccgcggtctatagtgagaacgctgatataattcgagctgccgcgccccgtcaccgccgcctccgtgagggagaaatccatgtgttcgcgcttcagctcgagatagtcgtaaagccaatcgttcatccgttcgagctcttccgcggtgtacaccttgtcattcattttcgcaaggtccgatttcaggcgttcgttttcggcggcaagtctgtcatattccgtgaaataggcggcatagcccgaaagcccgtcggcagcaaagctgaacagcttctgcccgggcatgagaatcgccgcaataccgctctgcaccacgtcggaaagtcccatcgccgtaagtatcgacggtaccgcgatcatggcgagcgcgataatcagcaccgctatgaaaaaccttgtcttgaaaaaattcttcatctgaatctccgttccgccgcacggcggtaaaagcagcagttaccgttcgggaacgccgctgagttatctgtttctgaaggaaacggcaccgttgaagtccgattcaatgacgtgaccgattccgaccgcaacgcagtcgagcggactctttgcgacaatcacgcggattcccgtagtctgtgcgattacctgtgcaagtcccgcaatgagcgcgcctcctccggtaagcatgattcccgagtcgtatatatccgatgaaagttccggcggtgtcgtctcaagcgtatttcttatgcagtctatgatgcgcgatatgtcctcactcatcgcctcgcggatctgcgccgaattcacggtaagtatcgcgggaagtccgttctggaggtttcgcccgcggatttccatcgcaccgcggtcggtcgcctcaagcgcggagccgagattttttttgagctcctccgcagtcacgtcgccgatcaggacgtgaaaattattctttatatatgccgcgatcgactcgtcgaaggtgtcgcccgcgatcttgatcgaatttgacaggacgatgccgccgagacttatgaccgcaacctctgtcgtcccgccgccgatgtcgattatcatacttccgcgcgcgtcctcaacgcgcagtcccgcgccgatcgccgcagcaaacggctcctcaataagcgcgacggactgtgcgcccgcttcgagtgtcacatcctcgacagcgcgcttttcaacctccgtaaccccataggggatggagatcatgaccttcgggcggctgaaaagagcgttgccggacacgcgcgagaacatatcgcgaagcatcttcgccgcgaaatcgaattccgcgatgaccccgtccttcagcggatgcaccgcctttatcgagccgggggtctttccgagcatcatcttcgcttcgtttccgaccgcgacaaccttgccgcctcgcgtttcagccgcgacgaccgacggctcacggagcacaatccccttgcccttggcatagactatgacgttcgaggttccgaggtcaattcctatattcttactcattctgcaattcaaacctttcttcattccggacgaccgactcgccgctcatccgaagctttattttatacgtctgacggggaaatccggggcgcgtcccgtgcggtaagcgccgataacgccgcgcactctgtccgcactctcgtcagtaaacacgaaatgctctgcgatgccccgtccgcggattgcagacggattatcggcagtccagactggtacgctgttgaacaccgtgttcgtacagtcgcggttcccgacgacaaagaattttacgctttttctgtcggtgatgtattccctgcacgcttccccggggcggatcttgcccgaaaagcctccgcttcccctgcggcagcggagcgggtcgtgcatcatgcagcgcaccgtatgcataagcggaagctttccgtaggcgacggcggaaagcgcgccgtgcgccgtgcgcgcgatatcgcgcagagccgccgagccgagttcgggcgaaagcgtgatgcaccgcgcgccgagcgcgccgaggagatccgcagtatcgcggttaaacacgttcagcctgaacgacgcggtcacatccgcgccgagcgaacgtgcgaaatatatttgacccaccgtgtgcgcgagcaccttcgagcccggcacgatcctttccgcgatcgcggcggcaagctcgtccgtcataaacggcggcaggctcagcgcacagccgtcgcgcatctccgtataaggaagatatatctcgtcgaagaattcgaacgcttcttcgggaacagcgtccgcaaacataaattccgccgtgcgtccgtttttttcgtgcgagctctccgtccgatcggagatctccgtgatctcctcttccggtatcttgcgcgcggcgcaatgcggtatcgaaatttctccgctgccgacgtgtccggcgttttccgtccgcgcagggggatcggtaagcgccgcaacggcgcttcgtctgagcgaattaagctcggacgcgccgagatacgatgcgccgtccatctcaagttcaaaggattcaagtgaaaatccggtgccgccgagctttgaaagagaagctctcgctctttcttcggtgagcggggatttttccgccgggcgcacgtcctcctccgataacaccgatgccgaagcgaacggagactccatgcacatccgggccttccttccgctttcggctttcagcgatgcgcggacgggcacggtgcgggaaagccccgcaaacgcggcggcgctctgcgcgtccgacgcacgcacgcccgtcattccggcgtaagagcggcggaggtatccgtcggtaaagccgcgctcgaaaagcgacgccatgtatgcgatctcatcttcggtcgcgcatcggcgctcgtcaagcaggcggcggtatatccggcacacaccgtaaacgtagtctgcgttcttctgccgtccttcgatcttcagcgaacgcacacccgatgagatgatcccggggatatccggcgcatagcacatgtcggcaagggaaaggagatacccttcccgaccgccgagtttccacggaaggcggcacggctgtgcgcattccccgcggttcgcgctccgaccgccgatcatcgatgacatgaggcactgccccgacagcgacacgcagtgcgcgccgtggacgaacgcctcgatctcgatcgggctgttttcgcagagggtgcgcagatcgccgagcgaaagctcgcgcggcgcgaccatgcgtgaaaatccgagttcttcaagtgcgcgggcatcggggagaaattccggcgtaagctgtgtgctcgcgtgaagctgcatctcgggaaagcgcgcgcggataccgagcgcaagccccggatcggcgcagataacggcgtcggtcccttcgaaataaagaagcgacacaagctcgagcgcgcgctcaagctcaacgtcacggatacgcgtgttgaccgcggcatacgctttcacgccgtaggccctgcaaagtctgagtgcggaagcaatctcgccgtcggtgaagttcaccgcacgcgcacgcgccgaaaatgaggacgcaccgaaataaacggcatctgctccgccctcgatcgcggcggcaagcgattccggcgatcccgccggaagaagaagctccggcaaggagcgctctgcgctctccgccgcgcacgacggagatttatttgtcatcgttgcggcgcaggagcatttctatctgttcaagcttgtctcttttggactccgcgcgattttccttcgccggttttgcctcttccgctttcttcgtttcgtcttcgggggcacattctgcgtccgcagagcaggaagcgcacgaagtacaggtttcgtcgctctgcgcattgtcttcggtgtcggtcacggcgttctcatcggcgctctcatccgcgccgtcctttattccgagcgcgcttttcaccgccggggatgccttctgcgatgaggcaagctcctctctcatgcgcttcagattcgcgtcgtaaagcgagatctgagcctcaaggttccgtatgcgcttctctgccttggtgcattcgccgcagtaatcgagggcgcagagcaacgctgcgtcaagctttgagcatcgcttgttgcgaataatcagatcgctgactcttgcattaatcttctcgacgattgaattgacgaaatcctcgggctcgtccgatacgaccgaaagctgaatgtccgatatttcaatattatagcgttccttcatgatattcctccggaatgttgatttttcgaatagaaatagttatacattataattataatccattcggcggataaatggaatacctttttgtaaatttaacaattatcaagtaaaaacgcgcgaaaatcccgctccgtacactttattccgataaaagcaaacgaggcggtctaagcggcggcagactccggcagcgaaagcgaaaaagcatcccgtgctttgcagttcgggatgctttttatcggtttatctgtgagtcttttcgatccgggcaaggagagccacacggcgcggatgatttccgctgttctcgaactccgtatcgaggaacaggtcgaccatatcgaccgcaagtcccgatccgacgacacgcgcacccatgcagaggacgttcgcatcgttgtgcagacgggtgaagcgtgcgctgaacgtatccgagcagcacgccgcgcggatcccgtcgaacttgttcgccgcgatcgacattccgacaccggttccgcagacgaggatcgcgcaatcgcattctcccgagaggaccgcgcggcaagccgcagcggcataatcgggataatcacagctttcctcgttgtaggtgccgaaatcacggaattcgatgccgcgcgacgaaaggtggagcatcagctcgttcttgagagagaatcccgcgtgatcgcacgcgagtgctacggtcttatacatcaaagaacgacctcgcgtccggtctcggcagacttatagatagcctcaaggatcttgatcatgttgaggccctgctcgggaacgtagtccggagccgcgccgtcaagtacgattctcgtgaagtgacggagtgcctcgtcgtgaccgttgcccatgccgccgctgcggacggtattgacaagcttgccgttctcctcggagtagatcttggcatcgccgttgtcgcaccaggtgattcccgccttggttccgcgaagctcgacgaatctcgtctcgccctcgatgttggaagcccagctgaactcgatctggaggcaggcgccgttgtcgaagcggatgaagcccattgcgaggtcctcaacgtcgaaggtgccgtcttccttggcatcgccgaacttggaatgctcgctgtcgctctgcgcgtcatcgttggcaaacttgctgtaggtgcatccggaaaccgcaacgggcttcgggttgcccatgagccagatggaaaggtcgatcatatgtacgccgaggtcgatcaggggcccgccgccggactgtgccttggtggtgaaccagccgcccttgccggggataccgcggcggcggatccatccgcagcgtccgcagtatatctcgcctgctgcgccgctctcgatgtacttcttcaggtactgcgagttctcataataacggttgtttctcataaccatgagaaccttgccgtacttctcgcttgcttccttcatcttctgagtttcctcaacgcttaccgcgtcgggcttctcgcagaacacatgaagtccgtgctccattgcgtatacggctatgatggagtggaagttgttcggggttgcgatatcgaccgcgtcaaggtcttccttgtcgatcatctcgcggaaatccgtgtaaacggagattccgtcgatgccgagacgcttgatcgcgttggtgcagcgctcctcgatgaggtcgcagagagcaacgatctgaacacgcggattctcggcatgactggtgaacagatggtggctgcccattccgcctataccgataaggccgattctgagtttcttttccatatttgaatacctcgtttttcacggcgcaatgccgaaattttcatgacttacccttaatacgatatcacatagcaccggaaaaatcaacagattttcaaaaaatcgcgcgttgtttttcgccgtgtcggacgttttaccgctcccggcagaaaaattacgcttccccctccgcgcgtgggtatcattcgccggagccgttttttcccccgccggcgagatcgtcaacgagaagatcggcgaacacgataatcagaagaacgaccgcaccccatatcgcccgtcctccgaggcgaacgcacagaaatgccgacacgatccctcccgcgacaaacgaaaggatcatgagaatatgcatgacgaggcgccttttcgcctcggggtcgcggtgcgcggttccgacgatgtttacccccacctgacggagatgattggtgcagaaggtggtcgccatcggaacgtgctgagctgcgcgaaacgtgttgtactgcatcgacgcgatgaaattgaccgtcacctgaaatatctgcacgggcgcgctgtccgggatgaatccgaggatgagcaggcacagcgcctcgattgcgataaagaacgtctcccagcgtgcaaatccgaccgaattcacatatttcggaagaaattccgaaagcaccgcgccgaggagatacgccgaaatcggtatgaaatagtagagcgcgcggtgaaagcttcccttgccgagctgcaccgcaagcagaacgaagtttgcggtctgcgcgttgcagaacactccgcccttcagtgtgaaggtatacgcgccgagaaatccgccgaccgcgatcatcatcaaatacacgcgaagcttttccgcctcggaaaattccttttcgcgcaaaattatattattttttcgcattttgttcacctgcatttttgcatgtttttcgtttcaattctatcatttcaagctccgtttgtcaagcttatagtccgatttttcgataaatatgcagtgtgtgagcgccgaaaattcattttcggcttttgttccgcgtccggcttcgaaaaagccgtgaacattttttcattttcgtcttgaaattagtatatcatgtatggtagaatacagttgtacttgaaggacggctcgcatcgacacgggttgtccaaatcaaatcaagaaatcaggagatttttcatggctttcagaagaactcacgagctttggacgtatgatgtcttcccgaaggttttcgaggcaggcaaagaagcggaaattcacatccattacacgggcgggcgcaagtcgatgtccccggaacagacctatgaggcaaccgttatgtggatgtccggcagcaacggtaattatccggctacggagtacaagcgcgtcgttcccttcaacggaaccgaggacggcagcttcacggtaaaggtagagcttccccacgagggcgagtatcacatttggtgctgcttcggtaccttctccgtttatgcggtaagcggcgatctcgtaggcgtttacccgttcatgggcgaccttcaccttcattccacatactccgacggttcgcagactcccgaattcgttgcatcgagctatcgcgcgcacggctgcgacttccttgcgatcaccgatcactaccgttactatccctctcttcgcgttatggagagtttcaaggacattcccaacgagcttacccttctcaccggtgaggaagtacagcttcccgccgcaaacggtctgttcactcctcagcacacgataagcatcggcgccgagtacagcatcaacgcgatgatcagcggcacacagaccgacgaggtcggaaccgatccctcgacgcgctccctcttcggaaagtgccccgacgttatgagccaggatgaattcggcgcaaagatggcagagctcaccgctcagatcgaggttcccggcaatgttgaggctcacgcggcagctcagctcaagtggatccacgatgagatcagacgagcaaacggtctcggaatcttcgtacatcctaattggatcgactgcagcacataccacactccgacggcactcaacgattggcttgttgagaacaagatcttcgacgcattcgaggtgctcggcggagaggactacttcgaacagaatggtctccagtcgatcagatactatgaggacatggcacgcggtcataagtatccgatcgtaggaagcaccgacagccacgacgcaacaatcgagaacagaatcgcattcctctgctccaccatggtgttctcacccgagaacgagagatgcgctctcatcgactccataaagaagctcagaagcgttgcaatagatacgctcagcaaggagttccgcgtcgtcggtgagctccgctacgcaacctacgcttgcttcctgcttcagcactacttcccgatgcacgacgacgcttgctttgaagagggccgcctcatgaagcaggcagtctacggcaccgaggaagagaaggaagaggcgatcaaggctctcggcatgatgaacggcagaatgaagcgcatgcgcgagaagtatttcgcattctgatttcggaaacagcatttctccgtcccaccgacggaaggcgcacaaaaagtcccttgcccatcggcaagggacttttttctatggtatgatggggcgcggtatgtacgaaagcctgcaccctggcgatggcatgcccgttcggtaacctgagttttcacatagatgcgggcgcgcgcttgtacggcagtctgcgccgcagcgcaatccggggacaggcttttctccggcgctcatgcgccgtgacggagtgcggctgtgcctgtcccgttatctcgtttcacggatgcgcgccgtttcccgcttcagcgaaagtgcggtcgtacacattacgcattccccggctgcacagttgtgcggcgcgggaggctgttcgataaaatttccgctgcagcgtttttctctcctgccgattcccgagtgaaaacggcaaatctcccctcggcagaagatctgccgagggaaagccgatcgccggcaccgcctccgccgtgcgaaatgcgcttccgccgtgcggacgaaacagtttacttcagtccgaggcgcacaagggattcctcatactgcttgcggtcccgcgttccgagaatgttttcgattattcttatctcgccgtccttctcggcataggtgtgctcaaccgatgagtgccatccgccgcgcaggtcggtaggctcgtagcggcggaacagtcctgccgccgtcgggaagtatccctcgcccgttccctcgtaagaggtaagctcaaagacgttatcacgctcacaatcggtcgcgcgctcataccgcacaagtcctacgcccggagcaaaccaaaagtccatgcatccgccgaaatacgccaagcctctggaaagcccgtcgatttggacatggatatgtctgcatccttcaaaggtgcctgcggctgtcgtcacggtctcatcctcgcccacggtgatttcccggcgaacgctgtccgcgaagataaccacgttcttattttcggtatatccgggaacaaatttgtcactccacagacagccgatgtcatccgaccatatactgagaaggaatgcatgaagaagctttgtaccgtcgaaatccatcgtccgggtgtctttccactcgatatgtacactgcactcaattattttcttttcacattctctttcaaccacacggtagagattgaagaagttccagacacctttttccgtatagtcgggatttgctttttcgtccgtctcaaagatgcgctttgtaacatccgcaaatgctgatgcgaactttctttcataatccgtctttgatgccttctgcatcagatcaagagaagcatagacctcatcgcggttgcagagtcctgcatcgtcgccgtttttgacatacttagcgcggataaaagcgcagttgccgtctaccgtggatttattgaaatccgcaggttttttgtgctcatactgagaaatatttatctttttgtcatccgcatagacgacctcataaatgctttcgatatcatgtaagtcccatttggaccacttgtctcgattcgaaagagagaatttccagcggttgcccacatcaaagggaataatttcgcccgaagagttatccgtacatgtgaactccgtaaggacccattcttcgcagctccaacgctttacttccgcttttacgattccgacgcccggagcaatccatgctttcgcggcacatccatctgctttgcagacttcgatcagaatgcaccctccgaatgttccggcgggcacggtgacgttttcgctgctgctctttaccgtataagcagactcaccgtcagaggcaacgaacgtatctccgggcttcatcgaagaatcgagcaccattctgtcgcacataccgagcccgcagaaaagtccgctgccctcgcttaggaatccgggcagatcagtaaagtaaagcttatcaccgtctttttcaagaagatttccggtcgcgcctatcatgcagtctccgttcaccattatcctgtcgcagagttctgccgctttgatcgcgccgacggcactggcataatatacgtccgacggatcaagaacctccgtcaccttgcgaaactctgcgaatgcttcgtcacagcggccgtgtttggtaagaagctctgccgcataccagaaaatctcatagccgagagcaagacggtatccgccttcacgaagagcgtctatcttcccgcgcataaagtcgagcagagcttctcttctgtacttattgttttcaaccgctaaaacagcctgcatcacctcgtcgttatggcttgcctcgaccgcttcttttatacgcctgaaagtctcgtcgttcttcgctcccggaaggaaccaatatccgaggatcaaaacttcggcaagcataaagttctttttgtcggtgtccgaaagtgattccaccgccgcgagcacttcgcggtagtcattttcaaatccggatcggtcatccttccgcgtgctctttctcagctcgtcgatctggcgaagcacacgtttctcaagggattcgttttcgtcatataccgttttttccataattccgtatcctttccgcaattgttttcttccttcggagaggcgccatgttaccgttcccgccggcagggaaagcatttcggcgatctcctttaccgaatagccgtcgaagtaatgaagttttaccgtctcacggatcttttccgtgagcgcttcgacagcttcccgaagctcttcgttttccgaatccgcgacaagtgtgatctccggatcatcacattcctcggattcgaaataagaaacaagatcaagagagatgtccgccgcggtatttctataatgaaacgctatattctttgccgtgtttcccgcgatcctgcagacccacgatgaaaacttttcgcgctcgttaagcgtgtcaagcttcatccatgcggaaacaaacgcatcctgcgcggcatcctcggcagagtatttattccccgtgatgcggtacgcaaccgaattcacaagctttccgtagcgaatcacaagctcttcataagccgcgtcgtttccgagaagtgtgaggtcgacaagcgtttcgtctttttcttctttcaagtagtggttcatcggaagtcctctcttttggtcctgaagcttcggtattcaaccggttacgataatatgacaattttttcggcgaaaatattgggtggtctgaaaaatttttttatttttttgcagtcggtcgtcccgagtccattatacattataaaaagcgttctgtaaagtcatctgttcacctcacgccgggagacggataaggcgggaaatgtcgcatcgcgttcaatacgcaaaaaccccggagccttaccgtaaggcttcgggggggttcaaagaatcgcttgactgaatatctctttgatggtacaatgaagacaaacaaacatgagccgctgcaaacggataaaacacgccgccgatcggcgttttttcgtcctgcttgcgatgattgcggcagaaagaagattttatgaaaattgccgtggcaggaatacttgttttcgaagggaaagctttgcttctgcacagaaccgagccgcccgtatgttggggacctccgggcggagagcttaaagacgatgaatcattcaccgatgggctgaagcgcgaagtatttgaagaaaccgggcttgaatgtatgttcgttatgcccgtcgaaacatgggcagggatgcacgatgacctcccgatgcaaagcatcacattcgtttgcgagtgtaatgattcggacgtaacgctttccgaagagcatgatgcgttttgttgggtgccgttcgacgaattgagtgagtggaaggatcgaacggattttgatgttgcgctttgggggaattatattcggacggcgatctatcacaaaaatttatcggggatgcagaagagacttctttagatattgtgtaaacctccgagacggtataaaatagaaataac

SEQ ID NO: 20 - DNA, 9690 bp, Unknown
  16S sequences of unknown bacteria
ctggagtaggtaagtttcctgcttccgttgtgcagagcaataggcagtgaaaaaattgtatgaaaaaaaatacttgctatcctggcgggtatcggttagtatatctgtattgcatcgcggtagcaaggtaaagcgaaagagaactaaagtaactgcgatcatgagcaagtaatgaagctagaccctgtcagcagagctgcagggatagattgcgaatgtccgctttacttgataaaataagagtgagtcaaaacagataaaaagaggcttcgaagcaaaatacttcgaagccttattttgtcagctttactctgcagcggtcacagaagtgatatgcggatttacgccctcgtaccagtacaggaagccttccatatcgatcttgtcgccgatcttcagctccttgactgccttatacacatcagttgtgttgtcgcacagataagactcaacggtgaaggtataggtctctccgtttaaggaaacgttgaagtaaagatcgtctccatcagagcctgagccatcatagttgtaaaggaaagcgacgtcattaccggactcgtcctgaccagctgcctctacggtcatacccttgaaggaaacgaactggttctggtagtcgatcagttcatccttgccgagcagatcagtaacatccttaaccggagcgatgtattcgccatcctcgatctcgattgtcgcatctgcgatctcgacctcgccggaccactcagccttgtagccggtgactttgatcttggtacccggaacgagctttgcatagtcatcttcagagcaggcagcgttgtatacgaaataagcgccgtccttatcctgagtatagagggtagctttgtcttcccaccaggactgttttgcctgtacataagcctcgatcacaacttcatcgtcgactgctgcagccatgtactcgtcataggtcataacaccttcggattttacatcctcagactctgcttcggaagcagcctctgtagcagcttctgtagcggcctcggtagtttcctcggccatagccgtgcaggaaaaagcgaatgccatggaaagcgtcagtgccagtgcaatgttcttcttcataatacctctcctttttgcttatgaatgatttgcaaaaatcattataccccatttcttcaatggaatcaagtaagtcgcctgtttctgcgtctctttttccctatctgtgtaaatatatagagaagaatcagaatccaggtgacgatcagcccgccaagcagagcaatcgctgtatccggaagcggaccgagatctgctttgccgccggaggatgatgcatcgatctgatccagatggtagagcgaggtgacgtcgcggtacatggactgaatgaaatcgtcattgacctctttttttctacggacggatttggagacggtctcaatgagctgaccggcagcatcgcgcaaagaggcggagccgttgaataccggtgtaacgaaggtgtcatcaatgtgagacagaagaagcctggcagctttgatctttacttcgtaatgggtcgaggtatcttcgccacatcgtgagaggtaatcctgataggcggcagcttcctgtgccttttttgtgaccgggatatagccttcggtttcggagtaggcgatctgtacgtcattggtcagaagatattgtgtgaacagccaggaagcgagtacctcctgtgagtcagacttattaaaaatgcagatggacggtccctggctgatcatttgcgggtgttctggatcaaactgcggtacggtcatcacttcggtatcaaaagaagtgacggcgtctgcgctgatatcggagagcggggcatcctcgcccatccacgttgcgcctgccgtcgaatccacagcgaagatacactggccggcatttaaaaagttggccggatagccggaaatcttgaaggtcgaaaaagcaccgcttttgacgtgggccgcgatctccagaagcagttctgccgtcgtatcgttgaacagaccgactgtgccgtcatctgaagaatagtcagcatctttttgcttcagcatctgaatcatcatattatcggtcgatttgtaaatgaatggaatcagcacatcctgaccattgatggcataggtgccgttggcattttgcttcattgcagcttctgagacttcccatatgaaatcccatgtcagcgtatccggaagcgtataaccgagcttttccacatatgtcttattgacatagcaggcttcggtagaacgcatgaatggaacagcataagtatgatcggagaatgtgcattcctccagatatttgtcaatcatgtctgattcacctggtccgtcgtaagcaagctcggagcctccaaatccgtatttttcattggaaaaaagagtatcgagcggtacgacggttccctcgccgcttaaataggtggcgatgtgatccggataggtgatgcagacgtttggcgtcgtgtcagtcgcaatgtttgtgatgacatcattataaatttttccgtaatccgtgtacagccgcaggtcgaccttgatgtttggataaagcgcttcaaaatctgagatggcttttttataaatatcggtctgcgttttgttcgtgtcgttcttggcccagaaagtgatctcatatgacctggaagtatcgaatttgtccggaattgcaaggctttttgcctcctttgccccgtggcagcctgaaagcagcagaagcgaggatgtggcaacggtaagcgataagactttcgatatttttttcatcccttagtccctcctctagaaacgccagccatgaccttgtttcgaaagatcagaaacaggacaatgagcggggcggaaatcacgacaactgcagccatcatagccggaatgttttcccggccaaagccattttcgcggatctcctgaatgccgtttgagacgagatagtagttcggatcgtcggtaatcagccgtggccagacataggaattccagcattcgatgatcttgaggattgtgacggtaatcagggtcgggcggcagattggcatgagtacacgcaacaggtatttcaggtcagaggtgccgtcgacctttgcggcgcgatagagctcatccggtacctgctcgaaattttccttcagaagataaatgtaaaaaacagaggtgatggaagggaggatcaggccggaaaaggtgttgcgcatgttcaggttggtgatcgtgacaaaatttgtgataatgacgagctcattcgggatcatcatcagggagagaaagagcgtaaaggtcagattcttcccggtgaatttcagacgcgcgaaggcaaatgccgcgagtgtgatgacaatgagcatggctgcggtcgttatgatcgtgaaaaacagggtattggcgagatagcggccgagcgggactgcggtaaaagcgtcctgatagttctgcagggtcgggtgcagtgtgaaaaatgagggaatatgctcggcgttgtagctgccatagcttttcaccgaggtaagcagcatccagtaaaatggaaacaggacgatgacggcccataaaagcagcagaaagtagacgagtatatttcgcaggacgccctgttgcttttctgtgcgcatggtctttttgtagtcagttgtttgcttttccatagaatacctttctcctgctgacaagaaggttgatgcaggtgattgtcagtacgataataaagagcaggatcgctgcggctgacgcataggacgggtagccgccgccttccccgtaaagcatgtcatagacgtagccaacgatcgtattcatcccggctgcgttcagatttgtgccgaacagtgcgactgcgtcgctgtaggatttgaatgcaccgatgaagccggtgatgaccagataaaagatcatcggggagatcatcggaagcgtaatccgcatgaaaatgcgaaatcgcgacgtaccatcgacgcgggctgcgttgtagtagctctgatcgaccgaggcgagggcgccggtcaggatcagaatcttgaatggcatgacgacccagatcgtgtaaaagcacagaacaaacatttttgcccagtacggtccgtcgatgaaatccaccgggcctgcgccaaaccatgcgagcatgagattgatcagcccgtcggtgtaaggcgtctttttgaacaggatcataaatacaagaccgacggccagtgtatttgtgacataaggcaggaagtagatggtctgaaaggcctggcgcagcggccggattgagcttaaggctgccgagatcagcagtgccagcagggtggagagcggcacggtgatgatcacgagcagaaacgtatttttaatagcctgcagaaaatatggatcatgcaggacgtaagagtagttgtaccagccgacgccgtagtaagtctgagatgcggaattgtacccttcttcaaacgagtagatgaacacgtcgatgagtgggtagaccaggaagaatcccagaaacagaatcgccggcagcaggtacagccatgctttaaagcttttcttttccataataatatagctcctttagtctgcgttctgaaaacggatccgtttgccggattctttttcaaacaggaatacctttgtcggctttaaggaaaaccggatcgtccttgcagtcgtatcgatcggtgtttctgcggtgatgatggaacggatcgaggcattctcactgtttacatggtttgaaacgacactgatatcgcgtcccatgacctcgacaccttcgaacgtacagcacaacggaccgtccgaagccgggataaagccttccgggcggattccgacaaacacatcctgatccgagacacctggaaccgtaagcacgggattttctccgacgagcagttgtccggagcgcacgtttccggagaatacattgatcggcggagtgccgagaaactttgcaacgaaaagattcgccggatcatcgtagacatcctgaggttttccgatctgctgcacgacccctttacacatcacgacgatcaggtcggaaatactcatcgcctcgtcctgatcatgtgtgacaaagacggttgtgatctttgtctcctgctgaatgcggcggatctcctcacgggtctgtaatcgaagccgcgcatccagatttgagagcggctcatctaagaggaggacacgcggcattttcacgagtgcacgggcaattgccacgcgctgctgctgaccgccggagagctcagatggcttgcgttccatcagttcctcgatctgtacgagccgggcagcggtctttgtgcgttcattcatggcagctttcgtcagcttgtccttaccttttaaattctgcagcggaaataaaatattttggcgtacggtcagatgcggatagagggcatagttttgaaaaaccatgccgacgccgcgtcgttccggcggaagcgcggtgacatcctcatcgccgaacaggatactgccatccgtaggagagagaagcccgcaaagcagatttaaggttgtgctcttcccgcagccggatggaccgagcagcccgatcagcttgccatccgggatttcaaagttgaagtgatcgacggccacgacctcagacggctcttttttgctgcgccccgggaaagttttggtcagatcctgcaatacaattttcataatttctcttttctccttatactgaaaagaaaccgggcattgctgcaccggaaggattcaggtattttatggattattatagcggatttttgtgcgggtcacaagtcatatccataaaaagaatgtgttctggataaacgggccgacggccttataaaaagagctgtagcagtcgtgtccggtcaagcacgaagatggatgcgtccatgaacagatgtgccagcagagtgctcagaatcacgccgttggaggtgagcaaaaagtcggtgtgaaatccgtaccagcagacaaaggcggaatagcagcccatcagcgcgagcagtggcagattgatgagtacaccatgcaccgtagagcagaaatcatgccaggtaaaatcaaagtaaatgaagcgtcctacggctagtgtgatgaaatacaggatcagggcgtcgtagttgtcatccaggtaaatgaatttgatgtacagcaaaatgagtacgatgtagaacgaggatacgagccggattgatgccttttgatccgctgtgatacagcgcagggggacgagtgcccgatcaagccagccgtttaagatgacggagcaggcgagaaagatcagcagaatgaaatcctgatatttctgccagtacacggacacttccggaattttttcgtcaatgatgtagtagagtgagagaaacatcagaatcgaggtgctgcagaagaccatttcgaaaaaacgctcgaccaggttgtactcccgcttgcggtggcggctgtgaatctgccggatcgtccgcggtgagtagtcggcggcattcagcttctgatgtacctgaatttttgcggtgataagaacaatggcaagtacgatgacaagtccgagaaacgacagcagcagaaacggggctgcatttttcggatcaaagtagtgagagagatagtaagatttcattggaattccttccttatttccctgcacaggggaattctgtgcagggaagagatatctgcgtctgggatagtcagcgattcatatatttgtgaatggttgcttttgtgcttccttttccgttgatcatttcgcggaacatcccctcgattttttcaccaagccctgctttgtaaaggtcgatgaaaaataccttttcatttgagaggatcgggtggagctgatcggtcaggctttctgggttgccaaacacgacagaagaaagcgccgcctggatttccggtaccattgggtccggggcgagctcgtaagtatttcccatgtcatcgacaccgagcatgtagcgcagccatccggcaataccgagcgggatcgcagtcagacgttcggcgctgccatattttttcatgtaggctttgattgtctcaccgaagcggacaccgacgccctgtgacgtatcggtggcaagccgcagattcgtatcgccaagatactcattggggaagcggtcggtgaagagttcgtcggtgaacgccttcggtgagagaattctaggatcctcgaccattggaaggccctcgtcataagcgaccatacgtgccattttcatcatatccgggttcgtattgagcatttttgcatagagctcctcgccgagtacgacaccgaccggaccggtcgcggaatgaaccggattcaggcaggcagtgaccttcatacgctccgagagattgacggtcgcacgatcggccagatagacgccaaagcccttttccagctccggacgaccgttcggaaaacgatcctcgataacgaggtactgcggctgctctgcgttgataaacggtgcgatgtaggtacgctttgaggtgatgaccggagccatatcctcgacgccgagcgcctccagatcggccgcgatcgcgtcgcttggccgtggtgtgatcttatcgatcatggtccacgggaaggagacctgcgtctcatcgccaagccatgcaagaaaatcttctgtgacgtacccttttttctgccattccctggccattgtgaggacggaatggcgcagtaaatcaccgttgtgtgagcagttatccatggagacgagtgcaatcggagtgcggctgtcctgatagcggacgtaaagcatagcagtcaggacggccatcgcgctggttgccttctccggaccgttatcgatatccgattgaataaatggaaaatagatgccgtctgatccggcgagagcatagcctttttctgtaattgtaaaggagataagctgcagctctttgctgcggaacacttccttcaggcgtgcccagtgtgccggatcggaggactgggcttttaccgcttcggccatagatccgagtactttgtacgttctggtgccgtcggcatggagaatgacactcagaccgaggttgtcatatggcgtgtatattttatctacgacatcatagtcaaacgtctcgatgcaggtgagaccacggtcaagtacaccggcctccagcaatccgtcggcgataccaccgataaagatacggaaaatatttccgatgccaaagtgtgcccagcgaggtgcctgctttgcttttttcgaaacagcagcaacatcatagcccggaagtaaaattccggctttctgaaacactgtggtgtttttaattccttccaatgtcagcttcatatcgtttttgcctcctcatagcgtaaaaataattttgtaaaacagtttgacattattatagcatatcttttcacggggtacaataaatatattttttagcactgaggtaccagccggaacgcaaatgtaaattccgtctcatccagccggtatttttcaagcagctccggtccacagctgttggagccgataccgttctgacgataatcgatgcagagaaccgtgtgaccggattcttccagttcataattgtgtgctttttttgtcagttcttcctctgtgtagacggaggcgttgaatgagaatggtacggcgcttgcggcagtcagtgacacatctgcattgccgattgtcacatagtcacaatcataatggctgccattttcctgcgggcgaagataatcctcatgcattgcacggacatcagaagagaagcagccatggtaaccggcacgtcgtttgtcgatataactctcgaacggcccgatgccaaaataatcgacctgattcagttcatttggaaggaagagccgtatgccaaagcgtggcagcatcgggaagatcggatcgcgggtcacggcaagagagagatcaacagcaccatctgcaaagacagtgaatacggcctgcatattcaaaatccgctggatgtagcatgcggacagagaaagtgttgtgtggatctgtacactgtgagcatgctcatccatccgtacatccgtctgatagcttctcgtcatggttcggtcaaactgagccgtcctccattcgttttcgatgatgcggtcgttatctgtcggagcacgccagatgttatactccatcggacagtcaaggagtgactgatttttgtataccatttttgtaaatacaccgataagcttgtcataggtatagcagaattccggcgaggagatggtaaggtaatggtcatcctgccgaatagtcagaggctgcgcagcagttgtggatgtctccggcgctgcgagcagagagacagtcttctggttgcgggcatcctcagattcaaggatcagttcatcaaaaccgaggagatgtccctccggtacaagtggcagggctgcggtctggatgtaggaaagcttcagaaagcccttaccggcagcgattttcggcagaggcagcgtgatttccttttctgcatgcggagcaaggtcaagcgtattcggatcagcaatcgtgccggaggtgagtattgcgccgtccacagtcacttcgtaggagagcatgagcagatccttcagattcgtaaagtccatgtagttgcgcagcacagcttttccggtggatgcatcaaaggaaacgacgcgaaccgggcgaaatacatttttgaattccatcagcccggtgtgcggggtacgatccgggtaaacgaggccatccat

SEQ ID NO: 21 - DNA, 20544 bp, Unknown
  16S sequences of unknown bacteria
tccattttggtatcgtaccgagccttgagccgtttggctaattctttctgtagcacaggtatggcgaggtggtcttaaatctggaaagaaagacggaggaggcaacatgatgattcaagcggttctcagtaatcccagtcacccggaatacggcgtggcgaccatcccgttccccatcccccacgaccagtacgcgcattgcatagagctgttggaggcgttggagatcggcgacgcgctcaagacggactgcaaggtagagaagatcgacagcttctacgatgtactcaagcgcacggaaatgctcacggtcaacgtggaggagctgaactacctcgccaagcggctggaaagcttcgacagcggcgaggccgcgcagtttctggcgatggcgcacaagctggagctttttgagctgaaggatctcatcaacctgaccttctgctgccagcaagccacggtcattacagacttttccgacctcgccgctgttggccgtgaccactacatgaacctgcacggcggcagtgccaaaacagaggaattggatgcgctggatggcgaggaattggcacagcggcttatcgaaaacggcagcggcacgatcaccccctacggtgtggtctacgacaacggcatgaagctggagcagatctatgacggtcggttcttcccctgctattactatgagccaaacgccatcaccgttgcggtgacctctaaagccgaaccggaggacaccgagcacatcacatggctgtacctccccatgatgcaggaggagatcgaccgcgtcctccttcgcgggggcatcacagatcccgccgatgtcctcctgcggctggaggacagccagcttcccaacgaggtggatatcctgttggatatggagtacgaaaccatctctgacctcaacgaactggcaggggcaacggatgggttgtcaaaagcggatatggaaaagctgggcgccgtggtcacgctggcagagccaaagtccgcggcacagatcaaaaaccttgcggaaagccttgacctctttgactttgcccccggtgcacactctcccgccgagtacggcaagtacatgatccgtcagtccggtcatttcgactatgacgaaaatctcgacgctttttatgactatgaaaagtacggcacggaacgcatgaacgcggaggacgggatgttcaccgaccgaggttacatcgcgtacaagggctataccagcatggaggaagtaatgaacggcagccagagcagccacatggagatgggaggtttttcacgatgatcattcaggcggaactgaagtgtaagcagaccgggtgtgaggcagatccctgtgccgtggataaggtcatcgagctgccaagcccacggttccagcagttcagccgcgcactgctggctgactatgatttcatcgcagaaaacaaaaatgccatccgacacgatgaggatgccaggcactgtctgctcatcctcgatgcggagggaatggacggtttccttgttgacccgcaggggcacaactacgcccggtacagcgcctttgttcccaacgcccgcagcttgctgacaccggatatggcaatcgaccgcagctatctttcaccggcagagccttggcgggatgagagcagggatgaaatgctccgcatgacgctgcgtgtcgatggaaagccggactacaccctcgtcctccccgctgacgaggaatacctcgatgcggtgaagacttacctcgatatcgacgttttcgcagatgcgatgctctgtgatattcgcttcaaggtgccttacatcggtgagctaattcgtgacacggattgccccgccgtggaggattacaacgattttgccgaagccttggaggacatctggcagcaggacgggctgcttctgacctacgccgccgtgctggaggccgagaagccggaaaccttgcaccgtgcctgtgagctcctgcaagatttggacaactatcagcgcatcacggagggcgcctatgggtacggtcagcagcgattgcaggaaacgctggggctggatgatgaagccatctatgagctggacggctacatggattttgagaaatacggtcaggactgcatggaaaacgactgcgtggcaaaaacagagttcggcctgctgcgccgcctggacccgcccttccaggagcagacgcaggggcagcagatgtttcagtagactttgcggcagatgtgtagtatgtttgccgttgcccaaaagaagggagtgatacctatgaacaccaagatctcatatctgtacagagatgccgataactacaagatgcacaataaatgcgtcattgccggtacgctgactacggaacaggctcgtaccatcaaagatagctgcgaaatgggcgaatacttcattccaaggcaagtaggactgccggaacgccgcttcgaccggtatgatcctgcggtggatcactgctggttcgagctggatgaggactgcttctcagaaacgatagaaccgcctactgtagcccttactgccacagaactggtcaaccgtttcgaaggatgtaaaaacaactggcgggatgaatcgtacacgccgcagatgggaggcatgaaattttgaaagtcaacgcaagaacagataaattccagcaccttgaagtatttgataagcccgcgctgttcaccaacgggcgcatcgcccgtgataccgtgccgcagggctggtactgctatgacattcgcggctctgacgatgatcccggcgagctgtgttacatggaagaaaatgttgtggtcaaccacgcaggctcggtgctgatgccggaaaagctggcgatgcctatgccgcacaagcgcaccccttataatcttccccggcaggaggtggaccggtgagctactttgacagcatttacgccgacacgctcctgccgcccagggctgtatccgtttatatgtacctcaaggatcggtccaatcgtgcgggaagctgctggcccggtatcaagacgattgcgagagatatgaatctctcccgcagtaccgtcaagcgggcattggcggatttggagcagcacggctatcttgccaagctgccccgataccgccccaatgggagtaacacctccaatctctatacgctcaaataaagcaaaagtggttggtatcataatgtgataccaaccactttaccggaataaagagaaggactgtgccgctccaccaggggaggattatgcctatttgctggaccgaggatgggttcaatatggacccaccggaaccacccactctatcagagattaagacagagaaagaacaatcacaatgggatagcttccaagcagagaatcagcgccgtacacgcaggatataagaccgactctatgcgtcacggcaggtttctattgacatctctgttgagtttcctgtaatatgatatgcgaaattaaatctgacttacaaattaagtaaagatttccgtgtaggcgaaaggcggtgtctgtgtatgcttacggtgcagaacgtttcccacgatccgttttacaaccaggcctttgaggaatatgtctaccagacgtatctggacgatgatattttcctgctgtggcagaacgctccggcggtggtggtgggcagctatcagaacatctgccgggaggtgcacgtggaagccctgcggcagcgggggatccccgtggtgcgccggatcagcggcggcgggacggtctatcacgatctggggaatgtgaattacacgtacatcgtccgcgccagcggcacggtggactacgacgccgtgctctccccggtgatcgcggcgttgaatgaaatcggcgttcccgcacggaagaaccgaacctgtgacatcgccatcggcgatttgaagatctccggcagcgcccaacggatgacaaaggggcggctgctgcaccacggcacgctgctgttctcctccgacctgggcgtgctggatcagatcaccacccaccggaaaaacgactgcttccagagccgggggacaccgtccgccatctgtaccgtcaccaatatacgggagcatctggcgagtcccatgaccattgaggagtttcaagaccggctgctggcgcagatggtgccgcccgggagtccccatctgacgctgacagcggagcaggaggcggaggtctgccgtctgcgggacgagaagtaccgcagctgggagtggacgtggggcaagacgcccgccttcacctacgagaaatccgggcaattccacggcgcgcctatccgcgtcgcctaccaagccaagcgcggcatcgtttcaagcgcggtcatcgactgcgatgccatcgacggtgcgctggcggcgcagctgctcaacggcgcgcgcttggacccggagggctttgccgccatctgccatcggctggcaggcgacggggcggaggaattgatggactatctcatgtgaagcggctataagacacttttgataatcgtatcgccgggtacggcagaaaggaacaacacgatggagaagaagatcaatatgcccaagctggcaccggaaatggaaagcggcgttctgtgcgcgtggctgaaggaggagggcgacaccgtcgccgcaggcgagccgctctttgagatcgagaccaataaggtggtcaatcaggtggaggccaccgtctccggtgtgctgaagaagcagctggcggaggagggcgacaccgtctgtgtggacaccgccgtggcggtggtggaagcggagtaagacatggaaaagaaaccggaatggctgaaggttcgctataatcaggacgccgtcaatgaggtggcggcgctgatgcgggatctgaagctgaacaccgtctgcaaggaggccaactgccccaatctgggtgagtgctaccagaagcacacctccacctttatgatactcggcagcgtctgcacacggaactgccggttctgcaacgtcaccaccggccatccgctgcccccccgacccggaggagcccatgaacgtggcaagagccgccaaaaagctgaatctgcggcacgtggtgctgacctgctccacccgtgacgacctgccggacggtggcgcggagcagtttgccaagtgcgtccgcgccattcgggaggtctgccccggcaccaccgtggagacgctgatctccgacatgaagggcgaccacgccgcgctggacacggtgatcgccgcccatccggaggtgctgaaccacaacgtggagacggtgaaggagctgcaaagcgccgtgcgtccccaggcccggtacgagcggtctctgggcgtgctgcgctactgcaaggagaaggaccccacgctgctgaccaagaccggcttcatggtgggtctgggagagacggaggagcagatcagccgtctcatggacgatattctggagacgggctgcgacatcctcaccatcgggcagtatctccagccctcgccccagcactacccgctggcgcggtacgccacgccggaggattttgcccgctggaaggagctggcgctggccaagggcttccgccatgtggcgtccgcgccgctggcacgcagctcctacaaggcgtgggaggcactggaggacgtgcatgatctatattgagaccggctccacggatgtgtactataacttcgggttggaatactactttacgctggaaaagcgtctgccggagacggtgttccttttctggtgcaccacgcccacgctgatggtgggcaagtaccagaatgtgctggaggagatcaacaagccctatgccgacgaacacggcatccatctggtgcgccgcatgagcggcggcggcaccatctatacggacatgggcggctggcagttcacgttcatccagcacaaggaggccggggagatcgagttcagccagtacatcgccccagtgatcggcgcgctgggggagatgggggtcaacgccgccttcaacgggcgcaacgacctgaccatcgacggcaagaagttctccggcaacgcccagtaccggctgggcgactgcatcgtgcatcacggctccctgctgttcgacacggacatcgcgcagatggtggcgtccaccacggtggacagctacaagatcacctctaagagcatcaagtccgtccgggaccgcgtgaccaacatctccgagaatcttcccgcccccatggacgcggagaccttcaaggagaccatggtgcgccacatcatgaacggcagcaccgccgtctacaccgtcacgccggaggacgatgcccgcatccgggagatcgccggggagcagttccggagttgggagcggatcttcggcagaagcccgaagttcaccatcgaccggacgggacgctttgccggcgggaaggtgcagttcaagctggacgtgcagaaggggcttatccgggatgccgccgtatacggcgactttttctccacgctggacgcagataccctctgcgccgcactgatgggctgcccctatgagcggggcgcggtgctggaagcactccgcagccacggcatcgacggcgcggtgtaccgcatttccgccgaggagcttgcgtcggtggtggtcgactgacccgctgtacgcctgtccgctgtgaaccttacattcccatattgcagcaagaccgcctacagaaaactgtagacggtctttttttctttaattttcgcttcttgcgatttccagaacaaagagcgagccgcaggtttcacccacatttttgaagctgtgatgcaccctggcagcgtaagccgttgtgtcgcccgcgtgcagatgacgcacctccgtcgagccattctcctctgagcgaagatagatgtcaaatgttccatccagcacaaggacatattccatcccctcgtggtgatcgaaggaatgctgtgcgccgggctcgtaaaacaggcgaaatccacccagcttaaaaggatcatgtccttttgcgagtccgaaagccttgatacccggctcaaaggcgacctccgaggctgcattcaggttgatcaccttttcatcggcgagaggatgggtagatgttacatctgccaaggtcttgccgtagagcttgaccagtgcatggaccttttgaaagctgatcccgcatttcccgttttcaaccatactgatgaaggccggcgtgacgccaacgctctctgccaccttcgccagcgaaagacccgcctgctgtcggaattccttcaattttgtcccaatgatatagttgtccacattgtgattctctctgcccatacgcacatccaccttgtcaaaaataaacagcatcacaaatctctcccattctgtgatgctgttttaattttatcacaaaacccagtgaaaagaaagtgccatgtataacattttagataagttttatgattaaatatacttgacatattaagcgcaatactctacaataagagttacttaaaaattaagtagttttgttcgatattcacaagaatggaggaggcgagaaatgaatcggtacatcattgagtttggcattggcatggacttccatggtcaaaatgtcagtaaggctgccgcaaaagcggcgaaaaatgcaatttcatccagttgtctttgcggattgagcgaagttctgggaatggaggagctcagtcaagtgaaggtcaaggtcacaatcgcagtaccaagaccggaggaggtcgatcatcagcaggtcgcggactgcttccccattggaagcgttgaggtgcaggcagtaaacggcggtcttcattttcccggcctatatctcccgcagtttggtgaccgcgatgacagcatcgaagtggctgtcgcggcggtagaggtggtaattccggagcggaacgccgttcctgaataatattatgaggaggtcatctaatgaaagtatccaaggaagccatgaaagacatgtacctgcggatgatccgcatccgcgaatttgagagtaaggcacagagcctgtttgctgatggcaagatccccggatttgttcatttgtaccttggcgaggaagctgtcgctaccggtgtgtgcgcctgcctgcgggatgacgattatatcaccagcacccatcgcggtcatggtcatatcgtagccaagggcggcgacctgaagttcatgatggcggagctgtttggcaaggaaaccggctactgcaagggtaagggcggctccatgcacatcgccgaccccgacaagggcattctgggcgccaacggtatcgtgggtgccggtcacaacatcgcggtaggcgcaggcctttccgccagctaccggggaaccgatcaggtttgcgtctgcttcttcggcgacgcttctaccaatcagggtaccttccacgagtctctgaatatggccgcgatctggaagctccccatcattttcgtttgtgagaacaacaattatggcatctccatgagccaggcgcgccatcaggccatcaaggatgtggcggatcgcggggcagcctacggcattcctggtattgccgtggatggcaatgatgttatggcggtcaacgaagctgctgccgaggcggtggcacgagccagaaagggacagggtcccaccctgctggaatgcaagacctatcgctggagagggcatttcgagggagatcccgccaactataagcccaaggaggagcaggaggcgtggctgaagaaggaccccattccccgattcgccgcatttctcaaggaaaacaagatcctgaccgcggaggatctggctgcgctggatcagcaggttcaggaagaattggcggaagccattcgctttgccgatgagagccccatccccactgtcgatgctgtcgttcaggatgtttattccgatatcgttgaggaggtacgtgccagatgaaaaagatgagttatgcagaagcgatccgtgaaggcatgagcatccggatgcgcgaagatcccagtgttctgctgtttggcgaggatgtgggagccttcggcggctgctttggtgttactgccggtatgttcgatgagtttggtgacaagcgggtacgggataccccgatttcggagggtgccattattggcgccgctgtcggctccgccgccaccggcctgcgccccattgccgagctgatgttctgcgatttcctgacggtgggcatggatcagctggtgaatcaggcggcaaagatgcgctatatgttcggcggaaaaatctccatgcccatggtggttcgcctgcccggcggcgcaggcgtaagtgccgccgcacagcactctcagtccttggaggcatgggtcacccatgttcccggcttgaaggtcgtatatccctccaccccgcaggatgcgctggggcttatgctctcctccattgatgatgaaaaccccgtcatgtttgtggagcacaaggccatgtacacgatgaagggcgatgtggacagcctcgagcccatccctcttggaaagggcgacatcaagcgcagcggtgaggatgtgaccattattgcaaccggcaagatggttcacgaggctctggccgccgccaagattctggaggaagacggcatttccgccgaggttcttgacccccgcacgctgtatcctctggataagaagctcatcgcacagtcgctgggcaaaacgcataaggcagtgatcgtcacggaggaaaaccggagaggcggttacggcggagagatctccgctatcatcgccgaagaaatgttcgatctgctggattgtcccatcgtccgcattggcgcgctggatacgccggttcccttcgctcccgttctggagcaggcttatctgcctaacgcccaggatatcgtgaaggccgtccgtacacaggaataagcagctcaggcggagaggaggggtactgtgtccagtattggtatcattgcaaatcccgcttcgggaaaggatatccgcaggctggtttcctacgccacaacgatcgacaatcaggaaaaggtcaatattgtcaagaggatcgtgctggcggctcaggcaatgggtgttgatacggtttggtttatgccggacacctttcaaatcggctgggcagtcattgaagacctttccagagatgaaaagctgacggctgattgccgcctgctggatataccgctgactgctacctcgcaggacaccacagcggccgctgcggaaatggaacggcttggtgttggatgtgttgtggttctcggcggcgacggaaccagtcgggcggttgccaagggtataaaaaaggtacctctcctccccctttccaccggaaccaacaatgtgtatccggaaatgcttgaggggactgttgccggtatggctgccgccgttgccgcgcagttttcagaccccgctatatgctgtattcgggacaagcagatcgaagttacgctgaatggatcgctgacggatattgcattgatcgacgcagttatttccgatgacttatgcgtgggctcaaaggccatttgggacgcctcaaagctccagcacatttttgtgacaaggtgccatcctgccagcatcggcttttccacagctgccgggtgcctgcaaatcgtcagagacacggatgactacggattagccgtagaattgcgatcggagggtgagaaaatcatcgcaccgatcgcggcgggcgtcctatctgagctggagatctggcaggcaaagcgtatgccgctggactgcccggaaacgctgctgttacaggaggaatgcatggtggctttggatggcgagcgagagttgcgcggacacgcgggagataccttgacttttaccgtcacgaggcatggcccatggcgcgtacaagcaaaaagagcacttgaagaagctgtccgccgcgaattcttcgctgccggcagaatgatcgatcccacataattacgaggaggtgtatacatggcgcaagaagtcttgatgccaaagctgggcctgaccatgacggaagggaccattgaagaatggaaatacaaggaaggcgatagcgtcaaaaaaggcgatattctgttttccgtggcaacagataaattgacaaacgatgtggaggcagaggcggacggtgttctgctgaaaatcctgcttcccgagggggagaccgcaccgtgcaaggcggtgatcgcttacattggggaagcgggcgaggtcattgcagagggcggtgcttccgcagaaagcaccgcggcgcaagctccggcttcttccgcggcggctgttcccgccaaggctcccgctgccacacgcgatccgggtacgccggttttagcttctccggcagcgaaaaagctggccaaggaaaagggcgttgaccttgctcttgttgccggaaccggcccgaaggggcggatcactcttgaggatgtcgaagcatatctaaccgcgcccaaggccgatgaacccgctgccgaagtaaagaccagtcctttggctgcaaagattgctgaggagttgggcgttgatgtttccaagatccagaccgatggccgtgtgatgaaggcagatgttctggccgctgccggcgtgtgtacggcagctcctgccgctgaagcagcccccgcgatctccgccggcgacaacgatgagccccccgtgaaggtgaatccgctgcgccggagtattgccgccaacatggcaaattcctggcatacctctccccgcgtgacctataccttcgccgtggatgtgaccgcgatgaaggatctgcgggcaaagctgaaggatagcctgaaggagcaggggatcaagctgacctacaaccatattctgatgaaggtggttgccaaggcactgatggagttcccggatgtcaacgccagcttcgcggacaatatgctgacacggcataagcacgtgaacatgggactggctgtggcgaagggcgacggcctgatcgtgccgaatgtgaagaatgccgacagcaagagccttgcggagatcgcgaaagagaccgaggctctgatcgaagctacccgcagcggaaagatcgatatgaaggacatgaccggcggaacctttacgatctccagcctgggtccctatggcgtgcggagcttctccccgatcataaaccagcctgagctggcgattttgggtgtatgcgacatcgtggatacgcccattgtgtgcaacggcgagatcgtgatccgtcccatgatgaatctgtgcctgacagcggatcaccgtgtggtggatggtgtaatggccagtaagtttatgaaacgggtcgtggagctgctggagaatctgtatctcttgcttatctgacagagaacggacggtggcacttgcctccgtccgtttttgcctaaaaaagagaaccgcactcttttcgcaaagcgcggatgcacaaccatgaaaatgcagaaaggacagagtaaaatggcaactgaagtattgatgcccaagctgggcttgaccatgacagaaggcacgatcgaggaatggcggatcaaggaagggcagccggtgaaaaaaggcgaggtgctcttttctgttgcgacagataagctgaccaacgatgtggaagcagatgcggatggtattctgctgaagatcctgctgccggaaggcgagaccgccagctgcaagagcgtcatcgcctatatcgggcagcccggcgaggcgattcccggcgtggcttccggcgcagctcctgccgcggagagtgcgcccgtccctgccgctgcagccgtttccgccgacggccccaggactgtgctggtgatcggcggcggccccggcggctatgtggccgccatccgagcagcccagctgggtgcaaaggtcaccctcattgagaaagagcatttgggcggcacctgcctgaatatcggctgcatcccaaccaagtgcctgctccatagtgccgagctggtggaggacatcaaaaatcagggcaaggacatcggcgtgaaggtcaccggcgtggaggtggatttcccccaagtcatcgcccataagaacgacatctccaaaaagctcacgggcggtgtcagaagcctgctgaaaatgaacaaggtcaccgtcatcgatggaaaggccgcttttaccgctcccaaaaagctgagcgtcaaaaaggcggacggctcccacgaggaaatgacagcggatgccattattatctccaccggctccgtcaactccacgcctcccatccccggtctgaaggaaaaccccaactgcatcgactccaccggcgcattgagtctcaaggttctgccgaagtccatggtggtcatcggcggcggcgtcatcggccttgagctggcctgcgcctatgccgccttcggtaccaagatcaccgtggtggaggccatggatcacatgctgcccatgctggacggcgacctcaccaaaatcggcgtagagcacatgaagaagatgggtatggagttccatctggaatgcccggtgcaggcggtggaaagcagccctgtgggcgccaaggtaatctgcaaaaacaaggctggcgaagccgtcagctttgaggcggagaaggtgctggtggccatcggccgcaaagccaataccgccatgctcgacctcagtgccggtaaactcgacaacaaccgcggccgcatcaaggtcaatgacaagatggagaccagcgtccccggcgtgtatgccatcggcgactgtgtcatgggctatgctcagcttgcgcacactgcctccgccatgggcgaggtggcggcggagaacatctgcggccatgaggctcactatgatgaatccaccaaccccacctgcgtctacattgagccggaggctgcctctgtgggactcacggaggagcagtgcaaggccaagggcatcgcatacaaggtgggtaaattccccatgagtgccaacggaaaggcactgatcctcaatggcggagagggtctggtaaagctcatcgccggagcgaaatacggcgaaattctgggtatgcatatcatagggccacgagccacagacctcatttccgagggcgcgctggccatccggctggaggccacggtggatgaactgatctctaccattcatagtcatcccaccgtcaccgaaacgctgcgggaggccgcgctgaatgtagagaaaagagcgatccatacaccgaaccggtaaaacgatcctgtgcggcggcagcgcgatcaccgcttgacagagcactcggcctctccttaacagaatgaatcctcctcacatatttcattgattagtcgaggaactctgttcaagaagtccatcaaaagcgcatgatgcacaggacgcagtgtgatcaggaaaagaggagccacctgttcgtttgtttgccggtatgtctctgcagaaggcagcggatcgtgcaaagggaggtcaacaatatcgtcctttgtgccctccgctgtgtccctatgaatgcagcgaagcagcggtcggatcatacatcctgccgctgcttcatttttttgtaaattgaccaatcagacagcacaggcattcgcctcacctgcccgagaagtctcctctctgctgtacagcagagcctccaccatggctttaatcgcggcgcgatctcgcacatcgcaggcgcgaataagccggacaagctggacctcttctgattcttctacctcatcttctggataagccactcggtcagcggagattcccaaagcccgcacgatccgacagaacacctcgatacttggcgcacgttgttcattttcgattgccgccaagtgccgcacgccaattttggcgcgttctgcgatgatttcacgggaaaaacctttctgcaaccgaattccttttaagatcaggcccatcttgtccgttatttttgcttcatctttttcgaacactctcagttcacctccagctatattctatcgggagacgccgaaacagagaatgtcgtattcgtagttatattttggaactaatagtgccatatgttccggtaatccggccatataaaaaaacggctggattggcgggagacttgtcatgcttacaacagggacctcctttccgtctggaaaggaggtcttatgcactctctgtgtgtaaggacaccgctcattttgagcgcgtcaatatgagacagccatcctgcgggttggaagtggacattggattttaaatcaccttccaaacgcagatagcggagcatatcccaagtatgacgcattagttcttaataaaagctacgctcagaacaaaaacgcacaggcgcatatattgcgcctgtgcgtttttgttcgacagaaagcagaggggacgccccgctgccgcggcccgccacccgtttctgagatttgcagccaaccaaatttcagaatacggaggaaccatatatgggatttaattacgcggcagaaaagaagaagtttgaaacgctgtgggcaagactccggcgtgaatatagggcggccgggatgtccgatgccgccatccagaagatgcatgacttcgattgggaggtattcaaacaggagaggatctatcgccttcatacgcaggacttgggcatcggcatctttgacgagccttccgccgagcaggaggacaagtccgcattgatgaaaaagttcctggaatcggtcagccgctgggacgattacacgatggcgtcaaggtacggctggatagaggggatcggtgaccagcggttggtgagggtgctgaaaaggctttcgatttcggagaaggagctcttgaccaagtattgcattgaggacaagacccagcaggagattgcagcggaaatgggcctctcccagagagctgtcggtaagcaacttcaacaactcaaaaaatatttcaagaaattttgaaaaatggttctaaaaatcgcgttctcgctgcctaccacatgaggggatctttttcatgatccctctgaaccttgaaaaacaccgcccaggcggtcatagccggtgactggaatacctttgctgacagcgcgagcgtcagaccgggtgcgcgaggaccacctgtgcggagcattctccgcatattaggacggccaatggaaggtgcagagcgatacccacccaggtcaaatgcagctttggcaggctgcttcgccatgaccgcgtcagcttacaatgatactcctgtacgcagcttcgagagaacctcggaggggtgaaactcccgtgacgcgcgccagcgcggttccagccgccgcccttgcctggggaagtagtgtcgaatacaggcagcaacgcaagagcaagaaggccgctccgcaaggagcagttccgccccgatacggagcggcctcttctgctttgcggcagaagtatggggatcgtccacctcctctttctcttttccgccatccgttctcttctctctttcattcctctgaacggcctgcattcaacctccctccttatccccccggacgatcctcatatttgtgccgcaaggtacgactcaaaaaataggagggcattgccatgaaaaagagttctatgtttgaaaaatatcccgatgttgttgaggtggatgacctccgcaaaatgctgggtggaatcagtcgacgactggcgtatcgcctcttggctgaacaggagatcagatgcgtcaaggtaggcagagcctacaagatcccgaaggtatgcgtaatcgagtacctgatgggcgaggatatgtgccgcatcaatttatcatgagccgaattgacagatcgtttagaaaacaagaggtcgtttgccgaaaagcgtagaaaagtcgagtggtatttctccacttggagtatagctattcccaacgcattgtggtatgtttgggatgtcaatggcgggcaatacgactacctgttatagaataggaggacattatgataacaggctgcctgcagcaaaaaaacggtttttactatgcggttctttacctgaaggtcaatggccgccgcagatgcaaatgggtacccatgcggcttcccgtcgagggaaccagcgcacgcaaagcccagaaagcatttgatgagatccggctccagtatgagcgggaggaagaagaacggctggatcgagaggcaaaagcaaaggagctcgcagagaacacgcatagtaatacgaggttttctgcatggtgcgggatagtgcatgaccgcagcagccgcagaaggctttgcctttcagcgggtagtcccgctttttcttgtttggctgggaaaatcggagctggctggcctgcacggtatcaaacacagatttctcgacgatggccgggtgatggttggggatgatgtaccatgattctctgtccttcaggcggcttctggtgccgcctacttcgagaactgcccgcttgccgatcacatacacgccggtgtagcgttcgtcctccaaaatgcggagaatggtggatgtactccaaatcccgtgacagcgggaaatatcgtgggtgtgattgccgtgcgccgctttgtactggccgggagtggggatgttcctgcggaacagttcccgcgtgatggcagcggcgttcatgccacctgcggagaggctgaaaatgagctgtacaatggctgcggcatctgggtcgggttccattctgccatcggcgcttttgcggtagccgtagggacagattttgctctgatactcgccgcgctgcatcttggcgtacttggcactcttggttttgatggacatatcgcggctgtaatactcgctgatgagatacttgaacgccatgtccatgccgccggtgtcgcccttgaatttgctactgtcaaaatcgtcgctgatagaaatgaaacgggtatggaacagtgggaacacacgctcgatgaagtagccggtttcaatgctgtttcgcccgaagcgggaaaaatccttgacaatgatgcagtcgatctgattggcccgcaccagttcaatgagcttctgtacctgcgggcgctcaaaatttgtgccgctgtacccgttgtcgatgaactccataatctccgcgttcagggcttcgggcatggaagccgcgtactcgtggaggacgagactctggttttcaatgctcaggctgtcgtacttgtaatcctcgatggagaggcggatgtagagggcgattacatatttctgcattgttccagcacctccgcataggtttcaaactcgctctggaagcgatagtgcaccgtgatctgcttgtcgtgagatacctcgatgcggtcgatcagccgctcgatgagtacgccggtcagcgcccggtcggtcttaatttgtgcggcatcctgttccagcgcccggtgctgctctgcttgagcatccatcgttcgcaggccgtcctccaactgctccatttccacggcgaggtcggcaatgcggctttcgtacttctccttgtagtcaaagtattcatccttggtgagaacgccttggacgaggttttcatataaactccgcacgataccgcgaagctgctggatttcctgtctgcggctggtgatcttctcccgcagctcagcgcggtcagcggcctgccggggcagctccgcaagggagagggtgtattgccccagctccgtatcaagcgcgtcctgaagcatatctgccagcatatccagcagcctatcctcgcggatggtcacgccggggcaggcatccttgctgattcggctctggctcagacaatggtagaagtacacatcatcggacttcttgcggatgtttctctgccggtgcaggctaccgccgcaatgggcgcagaacaccttgcctttgagaagattcggcgtgaaggctttgacctcccgcgccttggcgcggctggcggtctgactgagaatttcctgcaccgccgcgaactgttcccggctgatgatggcctcgtgggtgtcccgtaccaccgtccattcctcggcatcggccttgacctgtcggtgatccacggttttagtctgcccctgaacaagatctccggtgtagacctcggagcggagaataacgccgactgtccgggtctgccacttgccgctgccgagcaaattttcgtgggtgatcttgccctgcatcttcttgtagtggctgggagtgagaacgcccgcttcattcagccgcacagcgatggtattgaggccagcgccctcggaagcccagcggaacatccgctgcaccacaacggcggcaacggggtcgatgataagctggtggcaatcgtcctcggctttcagatagccgtagggagtacgcgcaccgatgaacttgccgtccttcatggcctgccgctgctgcgccctgatcttgcgcccaatgtccaaagcgtaggcttcgtttatcatgttccgcagcggaatgatgataccggaatgggcatcctccgggttggcggtgtcgaagttttcattgaccgcaatgaagcggacgctgcggatacggaaatactgctcaatgtagtagccggtgtcgatggtgtttcgtcccaaacgggaaaggtctttgacaatgacgcagtttacatgaccggcctcaatatctgagagcatctgcagaaagcccggacggtggaagtttgtccccgtcgcgccgttgtcgatgtaggtatcgtacacgctgatctccggatactgctccagatagcgggcaataatcatctgctgggtttcaatggatacgctgtgcgtgtgggtatcctccaccgaaaggcggacatagatcgcggcgcggcaagcggcgtcggcctcctgcacggccaccgcagccgtttctttcctgctttttctcgccatgctcagcccacctttctctgttcgtaatctttctgctgcgctgccagcgccaaaagccgcaacgccttttcgtattcgtcctcatgggtaaaggcaatatccagctcctttttgccacggacgcggatgctctgcaccatgtgaatgagcgccctgcggtctaaggtttccagcgtggagaactgcgtaaactgtgaaatccagcggttgcgctcgcttcggttttccaaaacctccgtgagtttttccttgagaacgcggacgctctcgcggatgtcctcggcctgcttggtgtacttggctttgtaggaggcgtattcttccttggtaagcataccccccacaaggctctcataaagccgtgccttgaactccagcacctgctccaaccggcgctcattgtcggtgatgtggtcgctgtattccttggcaagcgcctgattgatgctggtctggtcaatgccggtcagcagcgcctccagagaagcaatattgccgatataggctttcaggctgtcccgcacacagtcgatcaggctgctttctttcagcatgaccggatgggcgcagccctttttcttgccggtgggacaatagttcctctccaaaaagtcgttggtaatgctctgcaatcccttatccttggcggcaagctgcttgacggtcatttttccgtggggattggccttgctgtactgatgcttctggcggtcgtttttcagctgctccagcagcttggcaatggtgtctctgcggcggcggtagccctgcacggcgcactgatactgcattcggcgctcatgctgctcgttgctccagaggcttccgggataat

SEQ ID NO: 22 - DNA, 32759 bp, Unknown
  16S sequences of unknown bacteria
tatatatagcagtataacatattaaatattatttgtaaatatatttcaaaaaaaatttagatttgccgaaaacggtatatttttttaattagtcccgaaaacgcgaaattttatgtagatttcgaaaaatttttaatttttggtattgacatttatgggagcgtgttatataatggtatatgcgaattactgagttgaggagggtttaaaatgcgcagaacataccagccgaagaaaagacagcgttcaaaagagcatggcttccgcaagagaatgagaaccgccaacggcagaaaagtattggcgagaagacgtgcaaagggaagaaaacaactttctctgtaatttaagaaacgttagggcggcaacaacctgccgcccgttcttgtcttttctcgtattttatttgagcattcattgacggcaaaaaccgcggaaaagagcgggcaatatgaaaaatactgttgctttgaaagaaaacagaatattcagaaatctgtacggcggaaaaagcaaagttacgccggaatttgttttgtactataagaaaaacaagttaacttttaacaggctcggtataaccgtcagcaaaaaaatcggacatgccgttgagagaaacagagccaaaagagttttgcgcgaggcgtacagactctgtgagaacagaataaaggtcggctttgatatagtgcttgttgcgcgaagccgcacaaaagaagtttcaatgaatattgtcaaggaaagaatggaaaacattttttctgcggaaggtctgtttgcggagttcgaaaaatgaaaaaggcggcaataaaacttatcaggttttatcagaaacacatttcgccgtgtaaaagcccgtgctgtcggttttatccgacttgttcctcgtatgctctggaagcatttgagatccacggtttttttaagggattgcttttgagtgtttggagaattttaaggtgcaatcctttttgtaagggcgggtatgaccccgttcccgagaaaaagaaaaaataatccgttactttgtatataaggagcctgtcaatgtcatcattaacaacactcggaattattgacataatatactggccgttcggaatgttgatgaaagggatatattctcttgtcggaaactacggtatagccattataattttcggtatcatagtaaaactacttcttcttcctcttgcgttttcaaacgaaaaaacaaggctgagaaatatgcggatacagcctaagatgagagagattcagcaaagatacaagggtgacacaagaaacccgaagtatcaggaagaaatgcaaaaactttatgcggaagaaaattacaatcctatgaaaggttgtcttccgcaactcattcagttcccgataatctttgcggtattcaatgccatcagacgcccgatgctttatatctacggattcagcagcagcgcaatacttaccatcggacaaactctttacaatatagaccctgcggttaaaaaggttttcggagataccgttgaaaaagtaaccgaaaaaacggttgcttatcatgaagtgttgctttcgggttcgatgaaaaacaatttcgataccgttatttccgcacttaatgagaaatttcccgacttttccgaaaagtttgcgggattcagtcaatcatctatgatagacaccaacttcctcggtctcgacctttcgcaaactccgacatggggttggaactggactatacttattcccatcatttccgcgcttacatcgcttcttataagccttgtatctatgagacttaaccgcgatccgagcggcgaaaaacagccgggtatgggcgcaatgaagggtcttatgcttttcatgccgctgttctctttgtgggtcggcttccagtataccaccggcgtaggtatgtactggatcatatccaaccttctttccggcgttcagatgatagcactcttctatttgtttaagcacagaagagaaaaagccgaagcaaaactcgtggcacagcaacccgtaaaagagaaaaaacttaattataatcagatagaaaaaatacagcgcgaacaggcggaagccgaaagacttgccgaaaaaaaggcaaaagaagatcagaataaaaagtaaaggagaaaaggtcttttatggaaagaaattttaccggaaaaacgattgacgacgccataaaagcggcttccgaagaactcggacttgcaagagaagatttcagcgttgacgttattgaaaatccgaaaagcggctttctcggtctcggagcaaagcccgcagttataaaagttacttacaaaaacgaagtaaacgccgttgagtttgtcgaagagtttctcgacggacttatggaaaaaatgggcataatggaatacgaactcaaagtgaccgagcccgaagaaaagagtataaaagccgagataaacggttccgaactcgcaagcctgataaagaagcgcagcgaagttatagatgcggttcagtccatgaccgctcttgcaatgaacagacatatcgaggagtattacaagatttccgttgatatcaactccggaagagaaagaaataccgctcgtctcgaaaatttggctgttaaagtggcaaagcaggttcagaagacaaagagaaaagtaactctcagttcgatgaattccgcaaaaagaagagttatccactccaaactgcaaaactttgagaatataacgacttattccgtgggcgaagaacccaacagaagagtcattatagcatataagtggcccgaggggcaggagcctcccgcagagcccgaaagaagaccgtatcctccgaaaggaaacggcggaaagaaaccgtatcgcaaaaacggcggttacggcaataaaggcggttacagaaagcctcgcagagaagacagagcgccttccgagcagcgtgaggaaaatgttgccgacaacaacgaaaacgaataatgtaaaagggcgactgtatgtcgcccttttaactgatagagatatttttcatttaaacggagaaattcatgaaaacgatagttgctatatcaacggcaccaatgacgtctgcgataggaatagttcgcataagcggggacagggcgtttgaaataaccgaaaagattttttcaaaacctctcgcaaatgttgacggatatcgcgttgtctacggaaaaatatatgataggaaaaaagttctcgatacagtgcttgcaacggtttttcgcgctcccaacagttatacgggcgaagataccgttgaactttcgtgccacggaagcccatatattctgaatagagtggtagaacttctcattgaaaacggagcggttcgtgcgggacgcggtgaattttccaaaatggcgtatataaacggcaaaatggacgctgtacaggcggagggagttatagaccttatagaagcgcagacggcggctgaagtcgcggctgcacagagtgaactcggcggaaagatatccgaaaaagtcgaagaggtcagaaaaaaacttgtatccttgtctgccgatatacttgcatacgttgattatcccgatgaggatatagcagatatttcgtccgaaaagatagaaaaaaccgtttcggaatgttatgagcagatcaatgctctttcgcttacttacggcaggggacgaatgataaaaaacggtgtcagaaccgttatttgcggcaaaccgaatgcaggtaaatcaatgcttatgaacggcatcctcggctgcgagagaagcattgtcaccgaaacagaggggacgacccgcgatgttgtcggagaaagcgcggttttcgggggagttaaactcgaagtacgcgacacggcgggaatacgcgatgcgtccgacgatgttgaaaagataggtgttaaacttgcggaaaaggagcttgcgtccgccgacctgattctttttgtttttgatatgagcagaaaaaaggacgaaaacgacgaacgtgttcttgaagagattaaaaaatcaagcgcaaagaaaattgccgtgctgaacaaatccgatattgccgcaaaaactgaaaaaacacccgattttgaagagtttgacgcatccgttgtcataagcgcaaaaaccggagagggaatgaaaaaccttgaaaaaaccgtcgcttcacttgtttcggacggagtcgttccgagtgaagtcgttatgaacgcgcgtcagtttgaatgtctctgcggttgtgcggctgcgctgaaaaacgcgcttgacaatatctccatgacgcctgatgtactgcttgatgatgtaaacgaagcgatagtctgtctcggctcggtcacgggcaaaggcgttgcggaacaaattatcgaagatattttttcgcgtttctgcgtaggaaagtagttttttgtcagaatacggtgtaatagggatttttagaaagtaaagacctcgcttgacaaaaaatatgttatatggtaaaatataatatacagaatttatacgggaaagatttttatgattattattgatgagtacaaagtaaaacttaaacagataaaagcggaaattgacgatttgcacggctcaatgggtatagataatgcacgcaagcgtctttccgaaatagaagagataaccgccgctcccgatttctggaacgatgccgcgaacagccaccatattcttaaagaacaaaaagcggtcaaggcaaaaataaccgcttacgatgcgctgtattctctttatgaagatgcgggaacgtatcttgaacttgccgcagatgcggacgacggatctcttgacgaagaaataggggaaacgttcagaaaccttgaaaaaaccgttgaaaaactgcgtctcgaaacgcttttgagcggcgaatacgatatgaacaacgcaattctgaatttccatgcgggcgcgggcggaacggaagctcaggattgggcgcttatgctttatcgtatgtatactcgttttgcggaaaaacacggatacaaagtaaaagttctcgatatgcttgacggcgacgaagcgggtataaagagcgcgtccattatggtagagggcgcaaacgcttacggttatttgaagagcgaaacaggcattcacagacttgtccgcgtgtctccttttgatgcggcaggcaaacgccacacttcattcgcttccgttgaagttatgcccgatattgacgatgattccaacgatattgagataagagacgaagatataaaagtggaagcgcaccgtgcaagcggcgcaggcggtcagcacatcaacaagaccgactctgcaatcagaattatccatatccctacgggaatagtcgttggctgccagaatgagcgttcgcagaagcagaacaaagaaatggctctccgtatgctgaaagcaaaacttgttgaaattaaggaacgcgaacaccttgaaaagatcgaagacatcaagggcgaccaaaaagaaattgcatggggttcgcagatccgttcttatgtatttatgccgtacacgcttgtaaaagaccacagaacgaattacgaaatgggcaacgtcaatgcagtaatggacggagacctggacggtttcatagacgcatatctgaaatctcttacgcagaagtaataattactgtgaagcggaaaaccgaaattttcagattataaagaaactcgaataaacaatgtgacataaacaacaaccgctccgttttggggcggtcattgttatataaaagagcgacgattttgtaatcgccgctcttactgtttattgtgtatttcaatgttttttgcaactgtaaaactctgttgagacatcgtgtttcacgtgaaacatttatcttttgagtttttcctcgccgcccatataaggacgaagcgcaacgggaatgttgactgttccgtctgcctgcaagttgttttcaaggaatgcaatgagcattctcggaggagcaacaacggtgttgttgagagtgtgcgcaagatattttgttccgtcttccgccgctattcttatcttcaaacgtcttgcctgcgcgtctccgagattggagcaggaacctacttcaaagtatttcttctgacgcggcgaccacgcttcaacgtcaagtgatttaactttgaggtctgcaaggtctcccgagcagcattcaagcgttcttacgggaatgtcaaggcttctgaacaggtcaaccgtgttctgccacagtttatcaaaccacatcatgctgtcttcgggtttacaaataactatcatttcctgtttttcgaactggtggattctgtaaacgcctctctcttctatgccgtgcgctcctttttccttacggaaacagggagaatacgaggtgagcgtctgcggaagttttgcttcgggaattatctgatcaatgaattttcctatcatcgagtgctcggaagttcctataagataaaggtcttcaccctcaatcttatacatcattgattccatttccgcaaaggacataacgccggtaacaacgtcggagcgaatcatgaaaggcggaacacagtaggtaaatcctctgtttatcataaaatcgcgtgcataagcgataacggcggaatggagtcttgcgatatcgcccataagatagtagaaaccgtttcccgcaactcttcttgcagcgtcgaggtcaatgccgttatacgcttccattatttcggtatgatacggtatctcaaaatcgggaacaacaggttcgccgtatcttgtgatctcaacgttttcgctgtcatctttgcctatgggaacggaagggtctatcatttgcggaatgaccatcattattttcttgattttttcttcaagaacgttttctttcgctgtcagttcatctatgcggtctccctcttttgcgatttcggtctttatctcttccgcttcatcttttttcccctgtgccataagtcctcctatgagcttggaagccttatttctctttgaacgaagcgtttcgacttcggtctttgtcgtgcgaagttctgcgtcaagtgcaattacttcgtcaaccatcggaagtttgtggtcttgaaatttctttttgatgttttcttttaccgcatcgggattttctcttaaaaatttgatatcgagcatattactcttctccttctttcaacatatctatcagcgtgttcagatcatcgtccgagtagtactccaaaacgattgtgcctttgactttgctttttgcttttcctgacggaacgatcttgacttttctgccgtaattcgacgagagttcggaagaaatctccctataataaatatcgttcggactttcttttttcgttctggtcagcggtcttttcttctttgcaagattttcgacgtctcgaaccgtaagccccttgtctattatcatttttacaagttcggaaaatttcttcttgctttcggctctttccgcaagcggcaacagtgcacgggcatgtcccgaagaaagttttccgtccaaaacaaggtcgagagtttcgtcaggcagtgccaaaatacgcattgcgttggcaaccgcaggtcttgatttcccgaccttttcggcaacttgctcctgtgtcagcgaaaactcatctatcaacgctttgtagccttttgcttcttcgacgacgttcaggttttctctttgcaggttttcgataagcccgatttcaagcgcttctttgtcgctcaaatcctttacgataacggggacttccgttaaacccgccattcttgccgctctccaacggcgctcaccagaaactatctgatatctgtcgccgtcgatttttctcgctataataggctgcaaaagtcctctgtctgcgacagaggcggataactcttcgagcgcttgtttgtcaaacgccttacgcggttgatccctgttcggttcgacatctgaaattttcacgaagagcaactgcttttcgtcgattttgtcgatgagaggcgcattgtcttcaaacaatccttcaagtcctcttccgagtccttttgacatctttctttacctcccgttatttttcaatatctcttccgcaagttccgcatacgcctttgcgccttttgagcctctgtcatagtaatttatcggcttgccgtggctcggggcttccgaaatgcggacattgcgaggaattacagttttgaacgtctttgacgcaaagtactttttgacttccgcaagcacctgcatggtcagattaagtcttccgtcaaacatcgttatcaaaacgccctcaatatcaagttgcggattgtagacttttttgacctgcttaaccgtgttcgtcagttgtgaaagaccttcaagcgcaaaaaattcgcattgtatcggtatcaacaccgtgtctgccgctgtcagggcgtttattgttaccaaaccgagcgacggcggacagtcgataagaataaagtcaaacagattttctgtttcggcagtttttaacgcattttcaagcctttttgctctcccttgcgcttccgcaagctcgagttccgctcccgccagatccattgttgacggaactatccaaagattatgatacggcgttttaattaccaaatcggaaagttttacgttctcgtccgtcagaagatcataggaagatttctgaaggtctttttttcttatcccgcaaccggtcgttgcatttccctgcgcgtccatgtctatgagcagaacttttacgccttttcccgccatgcacgccgcaaggttgactacggtcgttgtctttccgactccgcctttttggttggcgacggctatcgtctttatcattattcatcctttctttttttgtcttgcgatgaaaaacggatttatttttgtttgcaatccgctcgcagttgtgtgatgtgtttattatatcatacggacgtcaggaaatcaatacccttttattatctttcgacaaaacgcaaaaatttatttcagaaatcatcttcgaatgcaatgtttcacatgaaacatcgctgtatatattgacgctttcccttgtattttcgataattttgatgaattgcgaatgctatttccatttactttacttattttttcgttacatatgaaatccgaaaaaaacggttgatttttttataaaaaaatgttatagtatatgtatgaaaaacacaaattgaataatgaaaggttttatatatggatatttccgcttatgtgctttcactgctggcgtatgccgtgctgatgggttgctttaattacatatataagaagcggacggaacgtacgggcattcttcgcgccgacagacaactcagcgtctccgtttccgcactgtctttgcagatcaacgatatcggaatttgggtagttgctataataccttgtatagcattcagttcggttgcgggtgttaaagcggctttttatatttcgataggtcttattttcggatattatctgagttgctcccttttgtcggaacgtatgaagatatatgcccaggtcggaaacgtcggttcgataccgtcgttcctgtctcaccgatatggagataagcgcggtataatccgcataatcagcgcggttatcggcgttatgctcacgctttcgtttacatctttcactctctctttttccgcctcacttctttcccgtgcgtttggtttttcgcatacgactgccgtaacggtatgcgttatcgcggtacttacccttatagttctcggcggctttatgtcgtctcctcacagcgacgccgcgcaaagccttttgataggcggtgcgacaatcattctttgtatatgtcttacaggctctcttgaccttgaacaaacggcgattttcaattatatatacccgaaagcgctgaatattttgccgtcacttttcggcagcagcgaaaacatttctctgttcacgcttcttatgtgtctcggctggtttgtttgctgcctcggttcgccgcagttgctcaccaattttttacgaatgaaaacttcgcgaatcgctccccgcgcaaaagcggtctccacattttggagcgcaataacgcttttcggcgcaactttcatcggctttatgtggctgatactttttcctgagaaaagttccgccgatgcgatgatggagtctttgctgctgtctgattctctctttgtccgctgtcttcttctcgttgccgttttcggcgttctttccgctgttacaaaggcgaatatccttatggcgtcgggattttttgcggaggatatatatccgttgatacgctccgacgtcgataaaaaagagataggttatgttaagtttttcagcgtccttatcttttctctcctttcgttagcactttctgcggatataggttcaaattctttcaatatcctcgcattctcaatttcggggctttgtgcggcgttcggtcctgtcgttctgttttctcttcgttctaaaaaagtaacgcttatcggtgggatatgctctatccttgccggaaccgcaagttcgtttttcataacgctgtttttctcttcaaaaatcggtgcgggcttcaatatatattccgttttccccgcatttttgatatcgacggcagttctcttccttgtttctttgattgacccgaaaaaaccgtcccctgaggtattgaaagaatatgaccgcgttcgggcaatagttcattgcaaaggaaattatttgatgaaatagttatttttaataattatctttttggttgcgcgcggatttttccgcgcgttttctttttgtagcgtcgattttgtccgaaataagttagtttttcctaattgtgggaattctgtaaaacgtagaaaaaatttatatagacatattgatttttatatataaatgtgctaatattattgcataaactattaaaagtagttttaaaaactatttgtcgaatatcgtcgaaataatgattttgacgctttcggacggcttaataaaacaaatacggaggcttttatggctgattttattctttcctgtgaatctactgttgatttaccgtattcatacgtcagcggcagaaatattcccgttattttctattcttatatcgttgacggcgtttcttacgttgatgatatggaacgcaatcccgatgcgcttccccgtttttacgattttatagaaaagggaaaacttccgacgacttctcaattaaatgagtttttgtactacgactttttcaaagaacttcttcaaaaaggcgacgttctgcacgttgcgttcggctcgggaatgaccccgtccattcgcaatgccgttgaagcggctgaaaaactccgtgcggaatttcccgacagaaaacttgttataatagactctctttgcagttgctccgggtacggacttcttgttgatctcgcagccgaccttcgcgacgagggtaaaagtttagacgaaatcgcgcaatatctgcttgaagcgagaagcaaagttcagcatcagttcttctcgaccgatatgacgatgttccgccgcagcggaagagtttcgggcgctgccgccatggtttcgacattgctcggtatctgccccgtcatgtgccttgacgattgcggaaaaattgttgcatacgacaaggtaagaggtaagaaaaacgcaatcaaaaaacttgtttccgaagcacagaagcatattcagaacggtgctgattacgacggaaagttctttctttccaattcaaattgccccgaacttgctgaagaaacaaaacaggctcttgaagaagcgttccccaaactcaaaggcaagataaagatgttcaatatcggcaccataatcgcctctcattgcggtccaggcaccattgccgcattcttcctcggcgacggcagacgctcgttcaaataaagcgtctctgcgcttgtaggctcacaaatcacaaacagatagtttcctttcctttatatcataccaaaccgcaaggggatgaaaaaacttacgtttttcatccccttgcggtattagggtgtagtttgggcttgaaaatattaagatatttgttttgacggataatggcacggcaaggtcagtttattcatattgtccgttttgagttttaaagaagaatgaacatatcggttgagcgttatagttacgcttgaatgaccaaggatttcgctcaggctttttatctcaaaaccgagctcgacgcatcgggttgcaaaggtgtgtctcaacacgtgaaaattcgcgtctgatatcccgcattcggacaaatatcttttgaatttgtattgtacggttctcgggtcgggacaatgttcagaactttccgaaagaataaaatttgccgattcggaacggaattgaaaaagcaattccgacaaaaacgccggaagaggtatcacccttgaagatgtatcgcttttcggttctgtcaaaaacagaccggttttatttttgccgttattcgttctcaatctctgcacggttttttttatttcaattgattttttctctgctgagacattttcccatttcaaagcgcaaatttctccgagtcttatccccgtatacagagaaagtagaatcccgcattttgaaatatcaagatcttttataagaaagctgacgagtttcttctgctcttcaagtgaaaagacccgcatttctttttgaggaacgcggatcttcagtctttttaattcgcgtacagaggcaatgcctctgcttttcataaaattaaacgtatctttaattataacaagtatatccgataaggttttcggcgcaagtccttttccgtcgttttgcaaactgtacatatattcctcgatacgggtcaatgtcaattcgggaatcgggatatttccaaggtcggggaataggcgggcttctgcttcgtacaaatacttttcataagtagaagtctttacattcaaacgtttttcggcaagccaatcgttgaggatttcagcgtaaagaacggtttgtttcttctgaatactttttttaaagcagtttattttccgtcctttcaggctttgtgcttctttctttgtatttctgtctttataaatattttcttctgttctgcgcatatggtcttcctctcttttataacttgatttggagaagcagaaaagatacttgacgcacgaaaatttcggcagtatctcattgaaagagtatgatatcacaaaaataagacgaaaatttggtcagggaaaaatatttacgataaaaaacggacgctcgcaagagcgtccgtttgacatttttgtttttatatcagaaaatcgagaaaagcgttatcagtatcaaaaaagtcaatgctggggcaactgtcgtgagtgcggtattccgttttgcaagttgcgaacgcatcgttctttttctcggtattttgaatattccgtataccgcggcggaggaagccatggaaatcgcatattcggtaattcccatgtcgcctgtcaggcggcgcaggcgcacaaggcggaaaacaaagaacatcagcagttcggtcattttgtcgcaggcatagccgagagcggcggcaaacgggtgaagaaaccctgtcatttcaagcaaaaccgctgcaaccgcgcaagggtaaagtatggatactatcggcaaacaaactatgtttgagaaaactgaaataaaactttggcctccgaagaaataatacaacagcgggaaagtgaagaaaaatgccgcaatggaagtgcagaaaagtcccgaaaagaagcgaaaaactctgttcgggtaatgttttgtcagtcggaaaaacgcggttgaagaaagaacggaaaatttttcggcaagaagaattattccgagcgtcgctccgaaagacagcagaaaagatgcggagaccgcagaaagcgggtctgcgataactattataagtgcggcaacaccgagattgttcaggttgtctgttttacggcgcaaaagatttcccgaaaacgcaagcgcggacatcagcgccgcacgaacgacggaagaagtaaaaccgcagacggcggcgagcagaaataccgccagaataaatgttatgttgcggataaatcggtttcttacaaatgaaaacagttttgaaagaaatgcaatgaaaacgctgatatgcagacccgaaaccgcgacgatgtgcgaaagtcccgcatcgctcaacgcttctctttgacgcagggacatttcctgttttctgccgagaataagcgctttcagaaatccctgctttttctctgcaacggcttcgatattcttttcaatatactttcttgcggaataaattgcctttgaaaatatgaatccatccgcttccgaaaaagacgctttctttgcgtcgataaatacggaagcgacggtcgatgaagcgtagttcgtcgccgtatatttcccgtccggtgcggaaaatttgaattcgccctcgatagccgtgaaaacggggcattcgagcggttcgcgggttatgaccgttatttcacccgcaagcggagccgattcgggctttgcggggtaaagataatatcccgacaaggtttttctgccgtcgtcggtcatgacaagccgaacggtatgcttttctccgtcacataaagcgtttctctgctttccgtaattgatatacttgaaaagccaagcgctcatgcaaactgatgctccgataaatgcggcaagaaatatctttgcaatctttttgcccagggcattgaatataatgaaaagacaacccgtgacggaacagaacccgaaagcgaccgtaagagctgccgccgacgatatgtaaaaagatgtaaaagtcgctgcaacgacgcagaaagtgccgacaaaaccgctgacggcgaatgctctttttaactccgcgtcaaaaatccgttgcgccttttgtacgcggacgtttcccgatggtctcatctgttatcgtccttttttgacaaaattcgccttttattgcctgtattatacttccgaaatagtaaaaagtcaagcggctttgtgaaaaaaattaggcagatataactggaagtatctttaaattcccgataaaagattgtcccaaatcctgtttttctttgagaaaatgcggctttcgggggtatttgcattgacaaagacacaactgtatgataaaattgaatacacagatgtatccgaaaggaagtgacctcatatcctcgaacagataaaatcccctgccgacgtgaaaaaaatgtcgaatgccgaaaccgcacaactttgtgcggagattcgcaaaacattgatagaaacggtcggaaaaacgggcggacatcttgcttccaatctcggtatcgttgaattgacggtcgctatacataaaacttttaacgctcccgcagataagataatattcgacgtcggacatcagtcttatgttcacaagatactgacgggcagatacgaaaaaatgcccgaactccgcaaaaaaggcggaatatcgggctttacacgccgttccgaaagcgaatacgacccattcggaagcggtcacagcggaaatgccgtttcggcggggctgggctttgcggaagcgaacagaatggacggcaaaaacgattatgtcgtctgcgttgtgggggacggttctttcacgaacggaatggtttttgaagcgttgaacaattgtcaccgcgaaaatcttaatttgataataattctcaacgataacgaaatgtccatatccccgaatgtcggcgggcttgcaaagtatctttcgaaaaagagcagttccaaaaagtatttcagattcaaaaaaggactgcaacggtttttgaaacatataccgtatctcggcaacgggctgatggcgttattcagaaagataagagatctgctcaaacgcataatatttcccggaaacatattcgaggatctcgggcttgactatataggtcccgtcgataccctcgacgtttcaaaaatatgcgacgtgcttgaagaggcaaagtcgcagaaaaaggtctgtctggttcatgtgctgacacataaggggcggggctacgcgcctgcggaagaaaatccgtcgctgtatcatgcggttgcgccgtttgatacggaaaaagggattgttccgtcagataaaaagacgttttcttccgaattcggcaatatactttgcgacttggcgaagcgcgaccccgcaatctgcgcagtgaccgccgcgatgtgtgacggaacgggactttgcggcttttcaaaagggtttcccgaacggttctttgatgtcggaatagcggaagaacacgccgttactttttgcgcggggcttgccgccgcaggaaaaattcccgtgtttgcggtatattcttcgttcttgcagcggtgttttgaccaactcatacacgatattgccatacagaatcttcacgtcgttatctgtgttgaccgtgcggggtttgtaggcggggacggggtgacgcaccaagggcttttcgatatcggaatggctctttccgttccgaatacaaaagtctggtctcccgacggatttgacgaacttcggaaatgccttgaagaagcggtattatccgacggactttgcatagtccgttacccgaaaggcggcgagacggactatgaccgtgcggcgtttgaagaatacgacggtttttccgtttttgacgcaaaagaaaagcccgaagcgactgttgttacatacggtcgcataacaaaaaatgtggcggtcgcggcagaaaaactcggaaacgtccgtgttgtaaaactcctgcgtctttctccgataaacacggaaaaactcggctctttccttgtcggaaaagtgttttttgcggaagagggcatgaaaaacggcggcgtcggcgaattcctttcagaaacgttccccgaaaaaaacatttatgtccgcgccgtttcggattttaccgacggcggaagcgagaacgaattgatacgcgaatacggatttgatgcggattttttggaaaaaatgatttccgagagcctcggaagagtataataaaaatatgttcggctcaggcatggaaaggttgagccctgatgaacggaaaggtgaacgtatgaaaataaaatttctcggcgcggcgcatgaggttacaggctcgtgcacgctgttggaagttaacggcaaaaaaatccttgtcgattgcggaatggagcagggcgcggatatttacgaaaattgcgaacttcccgtctccgttacggatatcgactgcgtatttcttacccacgcgcatatagaccattccggaaaacttcccgaactgacaaaagcgggatttcgcggaaatatttttgcaacggaagcaactgctgaactctgccgcataatgttgcttgattccgcgcatatccaggaaagcgaagccgaatggcgcaaccgaaaagcgaaacgctccggcggtgaaaaatatgaaccgccgtatacttccgatgacgtttacaagaccattccgctttttgtaaagtgcaagtacagcaccgaatacaatatatatgagggcgtttccgcacgctttatcgacgcggggcatttgctcggttcatcgtcgatagaactgacggttaccgagaacggaaaaaccgagacaattctgttctcgggagatataggaaacgttgacaaacctcttatccgcgacccgcaaaagccgacaaaagcggatattgtcatcatagaatcgacttatggcgaccgtctgcacgaaaagacgcagaccgaccatgccgcggagtttgccgctgttatacaaaaaacttttgacagaggaggcaatcttataatcccctctttcgcggtgggaagaacacaggaacttctgtatctcatctcgcagataaaggacagaaaacttgttcgcggtcacgacggattccctgtctgggtggacagtccgcttgcagttgaagcaaccgggatatatgcgggcggaatggacgattattatgacggtgatacgcttgctctgataaaacagggcaaaaacccgctccgttttgacgggctgaatgtctccgttacgagcgaagattccgttcgcttgaacagagataagactccgaaaataatcatttccgcaagcggaatgtgtgaggcgggacgtattcgccaccatttaaagcataatatctggcgtcccgaatgtacgattctttttgtcgggtatcaagcggaggggactctcggcagagcgcttgtcgagggtgcgaaaaagatcaaacttttcggcgaagaagtcagcgtcaacgcgcagatagaagttcttgcgggaacaagcggacacgcggacagggatatgcttctcaactggctcggcaatatatttccgcgtccgaaaaaagtctttgtcaaccacggggacgacgaagtttgcgacgtttttgcgcagacgataaacgaaactttcgacattgacgcaacggcgccttacaacggtgcggaatacgacctcgttagcgggaaatgcctgtatgtcgggaaccgtcaaaagaaagaaaagaaactcggtgccgaaaaaggcggagtttccgctgtttatgcaagacttttgcaggcgggacgcagaattgcggctgttatcgaaaaacatcgtcatgcggcaaataaagacattgcaaaactgaccgaccagataaacgacctttgcaaaaaatgggaggattagaccttaaatgcaaaaagacattgcgaccttaaacgaaaaaatcagaaccgatttacccgattttgttatgaagtcggatagggaataccaagaaaagatagagagaattgcggaagacgttctcgcgcacaggcacgaaagaccgataattcttatatcgggaccgtccggctcggggaaaaccacgtccgcgctgattcttgaaaagtatctcgatgaacacgactgcgaaacgcacacgctttcgctcgacaattatttcaaaccaattctcggagaggacaaaaaacttctcgaagatggcaaaatcgaccttgaatcacccgaaagagttgactcagtgtttctcaacgagcaactgcaacgcatagtagattgcgaacccgtgcggcttccccgctttgattttaagcaaaacgaccgccttttccgcgaagaagatttcatccgaaaagacggcgaacttgttattttggagggcgttcattcgcttaatccgtccgtcataacgattcccgataacgaatgttccaaaatttacgtcagcgtcagaacccgtgtttcggacggcgattttgtgcttcacccgtcatatattcgactcatgcgcagacttatccgcgacagccagcatcggggtcgctcgtttgagcacacgataagtatgttcggaagcgtggaagacggtgcggaaaaatatattatgccgttcaaataccgcgcaacgcacaatatcgacacgtttatttcttatgagataaacgcctataagatgttcctgtccgatggattgcgcgaactgaaagaaaacgaaacagcaaaaacgctgctgcgtattctcgaccgtgccgaacccgtgcccgaacagacgataccgaaatcttctctgataagagagttcatcggcggttcttcgtttgattacaaataatcggaaaaaatactctccattcgcaaaacccgttcgtataaagaaatgttcgaaaaaaatcctgagtttttgatttacattattcggaaaagcagaaaaacaatgactgaaaaaatgcaaaagaagaggtaaaacacgaattgacagactaacagcttgaagaggtaagcggcggcgtggattatgttattccgtattccatttgtcaccattcggttcgcatagacatgttactgcggcgctcggataatgtccgaggcacgcggaaagtaaaagtaaaaatccgcatacggaatagcgcgtatccgtatgcggatttttacttttcagaatctgattttgctccattcggaaaccagcatggtttccgtttttgccgcgtttgcgggacttgtggacggcaacgcttccgcggatattccgagcgtcggaagaatatatttatcatataacttctgcgcggtctttccgttaacaaatatcttttcgacggacggaaatttgtcgagaagtccttttatattgttcaccgtcacgtttttgacggacgcatcggacgaaccctctatatcgcaactttcgatgacgtcccaaagcgcgatgcggttgcgtttaagaaagtctttcttttcctccgatgtttgaggtgtttcatcttcaaaaactgcggcgacgacccgccagaatctgttttgtttgtgtccgtagaaaaagcccgtttcacggcttttgaccgacggaaaacttccgagtatcaggattttcggtttgccttcgcagaaaggaggaatagtatgtgtctgtcgcatatacaaaagagcctttttcttttattctatcatatccgcaaatttttttcaagtaaaaagggacaagagataatatctgtcccgaaccttttttcctatcccaccaaaaggactgttgaaaaagcaaagtttcacatcattcataagaaaaagttttcatctggcggaacaacgtttttctgatatgcgtggatctctccgtcgcgtgaggcggttatcagtatcatattctccgccgacggcagattttgatttttcagagtgttttcaagccatttttcatctttgcctatcgcgcgcagatttttttcaagcacttttccgtcaatgacaacgtttgaaaatatcggagattcctgcggcgcaagcgaaagttccgaaacggttgcggggcgtgcgtcgtcacggggcataaaactgacgctgcccgtggtctcgaaaacggcgtagcgtatctgattgatgtcaaaatagccttgtcctcttgccatggtcagcaaatcgttgatgtctattctgtttttcttcatatttgcgcgaataattttgccgtttgctataagaacagacggtgttcccgtgaaaaaacgacgcagaagaatgcttttatctgtcagaaacgcaacaagcagcgtcagcaacgcatacgccgccatggctatgaccgagtaccatacgcttatgtcgtcttccaccgccattaccgccgcaatggaacctatcgttactgccgttgtgtaatcgtaaaatgtcatttgcgatatctgtcgtttccccgtcatttttgaaagaataagcaaataaatgaatgaaaatgcgcttcgcgcaagaatcgaaagataatccatacagtctctccgaaattgtatcatattcggtaggtattatttacgctttttcggaaaaaatactctttgcaaagataagacttgattttatcggagaactgtgctataatcaaaaatacaaaacaggttaaaaaatgaatgaaaggcggttttattcgatgaataaagatttttttaagggacttgccgttggtgtgggcattgcgggtcttgccgctgttgccgcaaccgctgccgtaaaggctctcaaaggctgctgctgcggagattgtgacgacgactttgagtacgagtgctgctgcggagattgcgacgacgataccgattatatggacgctcccgtcggcgagaaaaccgaagagcacgaagaaaacgaagattccgaacaggaagagaacgacggcgaataattatttttctggaaagttaacggctgcaaaaacttgtgtttttgcagccgctttaatttgtaaacagggaactcaggcttttacggtctgagtttttaatatctgttttatctgagtgacgcgatatcgtatataagacgttccgtcttttcccatccgaggcaggggtcggttatcgacttgccgtaaacgccgccgtcgggtttttgatttccgtcttcgatataagactctatcataagtcccctgaccatcttgtttatattctcggaaagacgcatactgtgcagtatctcttttgctatacgcggctgttcaaaacattgtttgcccgagtttgcgtggtttgtgtctatgataaccgcagggttctgaagccccgcgtttttctcatagagttcgcagagcagttgcaggtcttcgtagtgatagttcggaatggttctaccgtatttgtttgcggaacctctcagtatggcgtgcgcaaaggggttgcccttgctgtggacttcccaacccgaataaacaaaagtatgcgaatgctgcgccgccgttatcgagttcatcataacggaaaggtcgccgcctgtcgggtttttcattccgacgggaatgtcaagtccgctcgccgtgagtctgtgaagctggttttcgaccgatcttgcgccgaccgcaacataggaaagcacatcggaaagatactgatgattttcgggataaagcatttcgtctgcgcaggcaaagccggtctgttcaagcgcttttatatgcagtttgcgtattgcgataagccctttgagcatattgggcagaccgttcgggtcgggctggtgaagcattcccttgtatccgtcgcccgtcgttctgggcttgttggtatagattctgggaactataaatatcttgtccttgaccttttcctgcacctcgcgcaggcgggagatatagtcaagcaccgcatcttctctgtctgcggaacaggggcctataacaagcaaaaacttattgctctcaccagaaaaaatcgctttaagttcttcgtcggttttcttttttgtcagcgcagactcctcggatatggggtacatttcctttatttcgtgaagtgtgggaagtttgcgtttgaattccatattcataatttatctctccttatttgccgaaatcgtcgaaaaacttacgtctttcggttgaaagcttcatcattgctctcatcgtttccctgtcatcgttttctatgctttttttcagtttgtcaaactgtgtttcgaaaagttccatttgcgaaagcagttcacgtttgttcatcaaaaacagttcgctccacatttcgtcgtttatctttgctatgcgcgtcaggtcacggaacgagtctcccgtatattccgccatttcagccgcgtctttgcagaccatcagcgaaaccgcgatacagtgcgtcatctgcgaaagaaagcctatcatctcgtcatgtttttccgtcgagagttcggaaatcatcttaaatcccagcgctctgccgagttgtttgcaggtttcgaccgcttcctttgtattcttttcggtcggggtcacgatgtaattcgcgccgcggaatatttttgcgtccgcgtgttccacgccgctgacttcgcggcccgccatcgggtgtgctccgataaattcaaggtcggggcgaagcaagccttgcacttgttccacaacgccgcccttgacgcctgttacgtccgtcagcagcgctccgcttttgaggtattgctgattttcttttatccattctataaaaacgtgcggataaagcgcaaaaacaacaagatcgaattttttgatgtattcggggtctgcttccgtctttccgtgcttgataaaaccgtgttttaacgcaaaatctatcgaggactgttttttgtctatcgcgccgacttcgcacccccgtgcggaaagcccctgcgcgtaagaaccgccgataagtcccaagccgacaataagtatttttgcgctttcgtcaaatctcatattttgcctccgctccgagtttttcaaggtcttcgaaaaaactcggataactttttgcgacggcttccccaccgactatctttccgcccgtcacgcttgcaataacggaaagcgccatcactattcggtggtcgttgtgccccgaaagcactgttttaggctttgaaagtccgttcgaaaaaacggttgcctcgttttcggaagtttcgacccgaaccccgaattttgcaagttcctccgccataacttccgcacggtcgctttcttttatcttcaatcgtctcgttcccgtgaattttgcgccgtgttttgccgccgcaaccgcaaacagcacgggcgcgaggtcgggacagcccgaaacatctatcaccgcattcggctttcgcaacttttcgaaaagttccgtgcaaactttatccgcttgcaggctggtttccgaaagtccgttcacttttacgttgccgccgacttcgttcaacgcaaacagaaatgcggcgtttgaccaatctttttcgacttcgacatcttccgcacgatatttttgattgccttttattttgaatgtgttcggctcggtctcttcgattttgattccgaaccgttgaagcacgtcaagcgttatgtcgacgtatcctcggctttccacgggcggaacgatgtgcagttcgctgttgctttcgacaagcggcaatgcaaaaagaagtcccgtcgcaaactgactgctgacgttgcctttcatttcgtattttccgccgcgcagaacgccgctcactttcagcgacgattcgtttttttctactgttatgcctttttcgcggaaaatatcttcatatatgcctattcctctttgcataagtctttcggtgcctgtgaatattgcgggcttgccgtcaagcaatgcaagcggaagaaaaaatctcaaagtgcttccgctttcgcggcagccgaataccgctccgtcggcttttttaatgccgccttttatgtgcaatgttccgtcgttttcttttttgacggttgcgccgagcgcttttatgcaatccgttgttgcgtcgatgtcttcgctgttttcaagccctcggacaatgctttctccctcggaaagcgccgcgcagataagttgacggtgcgcgtaactttttgacggcggagcgcagatttctccgtgcgctctgtatgggctgaacgttactttcatttttcttttcttccgttctttgcaagatgatcaagtgctttcagatacccgtcaaaacccatgcccgtcaccgtcaggcacgcaacgtcgcggatataacttatccggcggaaatcttctctttttgaaacttcggaaatatggacttcaacggtcggtatgccgacgccctttaccgcgtccgctatcgctacgctggtgtgcgtgtatgccgcagggttgaaaactatgccgtcaatatggtcaaaatacgctttttgtatcgcgtccacaaggtcgccctcgtgattcgactgataaaattcgacttcgacacctatctctgcggcgtgcttttttatcagatttacaaggtcttcataactctgcctgccgtatatttcgggttcgcgaatgccgagcatattgatgttcggtccgttcagaataagaaatttcattatatatcaagttcctttcggacggcttgcgcaacagccccgatctcgtcgtttgatttcaccgttacgtccgccgctttttcatatatcggaaatctttcgttataaagtctttccaacgcctcttttgttgacgaaaggggtctgtcggaagttgccgtcagcagggaaaggtctctgtcaagaaaaaccgtaacgccgtttcgtttcatttcgcggactttttctttgcgcagtatcgctccgccgcccgtcgctatcacttttcctctttcttttgcggcttccgcaataacttcgctttctgcgtctctgaacgttttttccccgtttttgcgtatatagtccgctatcggttctccgaatcttttgacaagcaccgcatccgtgtcctcaaactctttgcctgccatctcggcaagtttttttccgacggaacttttgcccgaggacggcattccgataaggaaaatgttccgtttttcattcagtatttctttataaacttcgtcggtctttttttcgtccgcttttttgtttaagaacagcgccgacgcatagaccgcctgcgccacaagcatataaagcccgccgcttgcgattatccctctttcttgcgccgtcagtacaagttccgttcggagcgggttgaaaattgcgtcaagcaccgcttcgagtttcggaaaagcggaaaggtctatcggtgaagcgttggttttcggaaacattccgacgggcgttgtgttaattattatctgtgcgtcggaatgtttttccgccgcttcttcataggtcacggcatcttctttttttgttctcgaaacacggagaacttctcttgctccgaggtcttttgccacggcgcaagccgtttttgacgtgccgcccgtaccgagcacaagcacttttttattcttcatatccgcgccagcatgaagcgccagcgctctcattcccgcaaaatccgtgttgtcgccgaacagttttccgtttctgttgacgactgcgttgaccgcacctattgtttttgcgcgctcggatatttcatcgaggtacggaatgactgtctgcttgtaggggatggtgacattgaccgcttcaaaatcctttttgcggaacagcgcgtccaattcttcggcgttcagttcgcggagttcatattcgtaatcggcaagtcgggcatggatctcctttgaaaaactgtgtccgagtttttcgccgagcaaaccgtatttcatcttttaacatcctctgtcaaaaaaaagtccgttccgtatctttgcgcaagcatatccgccgcagcgagcgccgcaacgctgtctataacgggacatatcctgcggactattgcgggatcgtgtctgccgtgaatggtaatatctgcgttttcgccttttataaaatcaaccgttttttgttcctttgctatcgacggagtgggctttacggcacatctgaaaacaacgggcattccgtttgttatgccgccgtttatgccgccgttgttgttcgtttcgctgaccgtttttccgttttcgatgcggaacgcatcgttgcattcgcttgctctttttgccgcaaatccgaagcccagcccgaagtccacgcctttaactccgccgagactgaaaagtgcgtgcgaaagaataccttcaaaagtatcgaaccacggctctcccatacctgctggaagcccgcatatcgcagtctgcgttatacctcccacactgtcattttcggctcgtgcggcaagtattttttcggtcatctccgccccgctcttttcttcaagcgtcggaaatacgccgtttttgagcgtttcaacgtctttttcgatgtcctcaaaatcacggtcgtttactcctgcgcattgcagaatgtgcgtgcctatctttatgccgagtttttcaagcgcgggcaatacaatgccccccgccgcaacaagagccgcggttattctgcccgaaaaatgacctccgccgcgatagtcttcatatccgtgatacttgcaaaaagcggagtaatcggcgtgcgacggacgcgcaagcccgtattgataatctttactttgcgtgttttcgttcggaattattatgcagacgggagaacctgttgttttgttgttgaaaacgccgctgactatacggaaattgtcattttctctgcgcggagtgtccgccgcggaggacggacggcgacgggaaagcattctttttatgttttcttccgaaacttcgattccgggcgcaagtccgtccagaaccaccccgaccgcttcgccgtggctttctccgaatattgtcgcgcagacgctttgtccgaacgtgtttttcatcttaattctcctttttgaaaaggtcttcgggaacaacttttttgaattcgaaggtgcctatctcgggcacatataccgccgcgaccgttcccgcttccgactttttgtcgtgtttgacgaacgggagcaattcctctgcggaacactcgttctccgtcggcaggtcgtattttttcagcacggcaaggattctttcttttgcttcttttccgcacatcggaatcattccgagggcgacgcattcgccgtgaagcagccgtccatcatttgcgctttcgattgcgtgccctatcgtatgcccgaaattgagaactttgcgcaggccattttcttcggggtctttttcgacgacttttttctttatcagaagcgcacgttctattatctgcggcagatctttttgaagatcgctgcttttttcaagcagttcaaaaagtttttcgtcgcttgtcgccgccatttttatcgcttccgcaagccctgcgtgcagttggcgcgagtcaagcgttttcagcaccgtcgggtcgataacgacttttttcggctgatagaatgcgccgattgcgtttttgacgccgttgaaatcaactgcggtctttcctccgacggacgaatctatctgcgaaagaagagttgtgggaatgttgtaaaaatctattccgcgcatatagcacgccgcggcaaatccgctcaggtctccgacaacgccgccgccgaccgcaacaacacagtctttacgcgtaaaagaattttcaagcatgaaagaaagcagtttgagaaaattgtccgggttcttgctcttttcgccctgttctatcgtgaccgtaacgggttgtccgcattgcgccgcaacggtttttgcatacgcttcgggaacgcccgaatccgtaacgacaagtacttttctgtcaagattcagcaattctccgacgttttttatcgcgccgttttcgataattatataataactctgctgaccgagttcgacgggaatacgcattttgcgttcctccttatttgacgttgtttgcatagtaacttccgacaaggcggagttttgcgcagaccgccgaaagttcctgcatcatttccttgccgttgaccgtgttaacgttgccttccgcttcgatgtagaagtagtaattccattgcaggtctttcatcgggcgacttctcaggcttctcatgttgaaaccgtgcgcaccgattatgttaagcgcacccgcaagcgaacccgcttcgttgcgaaccgtgaacataagcaggaagttttcgttttcgcgcttgcctgacacggacggaacgtttcttgcacgtgagaaagaaccgaaacgcgtggtgttgttcttgctgtcgtttatttcttttgcaacgatgttcagcccgaacgtctgcgccgtgtcctcggacgctattgccgctattgtcgggtcattctgctctttgacgtattttgccgcaagcgcggtgttggaataggtctttgtctcatatccgtgctctctcagatacgtttcgcactgttggagcgcctgcggatggctgaccaccgtttttatcgtgtcttccgtcgctccttcgcaggcgacaaggtcgtggattatgggcacgtcgatgacctgatttatataaaggtcgccagaaaataccatatccataaccgtgccgacttcacccgcataactgttttcaagcggaagtaccgcacagtcgcattctccgctctcgaccgcattatatgcgcccgcaaattcgcggaaagccgcaagttccgcttccgggaacattctctttgccgccaactgcgaaaatgcgccttccgtgccgcagtaagaaacttttatgccctctatcgcctttgactgatattcacaggaaacgtctatattgttgcggagaaaacggacgtagtacggttcgagttccgcatcttcgataagacttttgtttttgtttatcaggtcttcttcccttgccgggtcgcggacggaaagaccgtgttcctttttgtaacccgctatctttgcgcagacattcattcttctttcgaacagatgtgccatctgctcgtcaatgtcgttgatctcttttctcgactgttcaagttcgttcattttatataacacctcattggttttcgggatattccccagcttttttataaaaatcaaaaagcggctccgttttcggaagccgctttgcagataactttgtatcgttgctcttttacgcagacgcgttcaaaagcattccctgcggcttcatttttccgtaaaagtaaaaataaaaaaagcagtacgaaaaaaatcgtactgcataatagcacgcggaagacgcaactttacagttgcggacagactcggacacggaatttttgatgtcggttttgcttgcattcatcatttttccgtacctccgtctcaaaatactgctttaattttaccccaatcacccgcatttgtcaagggtgtaatgaaacttttttttgaaatatggtttttttattctctaaaaacgcagtcgccgcgaaatttcgtcttcttttcggagaaaaatgcgcgtatgtacttgaaaaagcaattttcatctgttataataattaaggaaattaaaacggacgtgaaatcgtccttttttatacggaggtataatatgaaaaccctgaaaataggtatcgtcggtctcggcggaatgggaaatgtccatatgcaggcttacaagacgatgaaaaacgttgaagtcgtcgctctttgcgacatcgttgccgagaagatggacaaagccgttgaagcgtacggtttcacttctgcgaaaaaatatgagaaattctccgaccttatcgctgacgctaacgttgacgcggttgatatcgcaacccccaactatcttcactctgttatagcgatagaggctctgaacgcgggcaaacacgttttcagtgaaaaacccgactgcatgtatgcggaacagtgcgaagagatgaaagctgctgcggaaaagtccggcaaaactcttatggttatgagaaacaaccgttactatgagccgtccgtattcctcaaagattatatcaacgcgggcaaaatgggcgagatatattcgggcagatgcggctggcagagaagaagaggcattcccggcaagggcggctggttcaccaccaaagcacagtccggaggaggtcctcttatcgacctcggcgttcacatgatagaccttgcgatctggctgatgggcaacccgagagcggtagccgtaagcggctgcactttctgcaaatttgccaatgataccgcagagtccgactccgttcactcgcagttcggcgaagcggtagagaacggtactttcgacgttgaagaccttgcaatgggcttcatcaaattcgaaaacggcgcttgcttgcagatagagttctcctgggcttccaatatcgaaagcgaaaaccgctttgttgaactcagaggtgaaaaggccggttgcaaatggtggaacggcgaatccgcgcatatctataccgaagaagagggacacgcaaaagatattcatctcacttattctccctgcaagaacggtcacgccgcaaacctcgaacattttgtcgatgttgttctgaacggcacgacccccgacttcgttcccgcacagggcgttaacatgataaagattcttaacgcaatgtacgagtccgcgaagaccggcaaggaagtacgtcttgactaaatattatgcggtaaaaaacggtcgcgaggtcgggattttcacctcgtgggacgcttgccgcgcttccgttgacggctttgccggcgcggaatacaagtctttcaaaacaaaaaaagaagcactcgctttcctcggtgacggggaaagcggggcttttgcggatatttcggcaaaaccggagatgtccgatattcccgtttgccccgaaaacgaacttatcgcttttgtggacggcagttttgatgtcaaaagcggaagttacggcttcggctgcgttataatcgaccccgaacaaaaactgacgcggttgaacggaaaagccgacaaagcggaagccgcgacggctcggaacgtggcgggtgaacttcttgccactatgaccgccgtaaaatacgcggctgaacattcgtataaaaaactgaccgtttatcacgattatgagggtatagaaaagtggtataacggaaaatggaaagcgcagtcgtttgttgccgtggcataccttgaatttgtccgcaagtacagaagttttgtctccgtttcgtttgtcaaagtcgaagcgcatacgggcaatattcttaacgaagaagcggacaggcttgcaaaatctgcgctcggaataggagttcccgaaaaaaagaagaaagagaccccgtgaaaatcacggtttcttatatacaataaaaaagaaaggaggaacaggtataggacttttcggcaaaaaggcaaaggtttcaaaaccccgtgcgctggcgttcgttgattatgaacattggtatatttctcttgacaagatgtatcacacccgtcccgacatcgggaaatggataaacgatatggaaaaaacgctcgatatccgcgggatatggttcttcggcgatttttcgaagaaccagtctctgagagaagaaatgacgaagatccgcggatttacgaacaatatcatcgaaacgggcaacggcacgaacagggtgacaaaagattttaccgacttcattatgcttgaccatatttatcaggcggcaatgtccgaccgcgacgacatcgacgttttcgttatttttacgggagacggacatttcacatcggtcgcttcgtttttgaagaataaatgcaagaaagaagtcgaaatttatgccgtcaaagggggctgcagcaatcagttgagaatggctgcaaacaggacggtcgaatatcccgatgaaacggacgataaaaaacaaatattccagctgattttttccgcgctggacaagatcgaacattcaccttcttcaaaaaatatgaaacccaccttcataaaaaccgttgaagccgtaagtgtgcagaacaatttgccgcgaaagaaagttcgcgaggctgcgcaatggctcgtcgacaacggttatatcgaaagaaagaaagaaaaggcgttcggaaaaaccatagttacggtttccgcaaactggtacgaagttgcgaaa

SEQ ID NO: 23 - DNA, 32759 bp, Unknown
  16S sequences of unknown bacteria
tttcctttccatgaatatattgatctgcgagcaaaaatgcaggcagtgttatttttctttcacgagccgcagcgtgtcactccgctttcgcgtatttgtccggcacgggacgctgagtttcacccttcgggagctcgtcacgccaatccacccaatcgagccatgccgcatcctcaagattgtccgatatgctgcttttgaagatcgtaaagttctttatgtttatgccgtatttcgtcattctttcgattatgagatcataacgccgcgaaagctccgccaaacgttcggtgtcattgttgtcataggctttgaaatacgatgagtagattccctcataatacatatggcaggtaaaaagctcgcattttttgagctgtgcctcatcggcagccatgttctcggccttttcgagaagatatgttgtatattcaaattgctcctcgatgtatgcggtgtcataacggctgtatctgaacggatcgtcggcgtgatgtttaagatagataatatgtgagcccagacagtttaggctccaacatttccaacactgaccgacgagatcctgcgacttttgccagatatcgatgtattcgcggatgtagccccatccgtcgccgaattcgtttctgagaagacggtcgatcgcctcctcgtattcttcacgtgtcatgtcgggattccagttcatctctacattgagctgagccagaagataaagcatgccgagtccctcggtctcgcactcgatcatcatgcctttggcaccgcactcctgtatgaatttcatatcgtcataaaatgtttcaaagatcgtatactgctgaagagtgagatcaagagcgtaataccagacataaatgttgtccgaaagttcgcaccagccgcgaagccatgatgcaaaatcgtcatttaagtctatccggatttcgcggtcatcatggcattcttttccgtcaagcgcgtgtgcggagcacgaataatctgtgcaaaaggtaacgtaaaccctttcactcggccgggtcacacacggcttattgctgccggcgtaagcatagcacttatatattatcccttcacatccggcgcgtgtgtccatttcctcgacgagagcattcatccagcggataaccggtccggaaattgctccgttttcacgccgtacgagttcgaggcatcgtttacatgcgcagtatgcacctgagtcggactgtgccacatccaaagcctgaagttctttgccgaggcgccatccgttgagcttgaggtgatttatgtattcttcaacattatcgcatacatagtaaaatgtttcttcatccgtataacatatctgactcaaaccgttggtttcgagaaggtgatctgcatggtgcgcctcgtcgatgtagccgtaggagtagttcacgtctcctcttacatagttgtgcggcgcgcgaccgtcgttgacaaatccggctctccaatgacgcgggaagcagtagtcgaacgcgggaacctcggtcacgtcggtatcggcggaaatatcgacaagtgcggactcctgaagatggctgtttccgtaaacgagattgtcccagccgcactcgttctggaggaatcggtacacgccgtacatacagccgcgctttaccgcgccctcgatgacaaatcgcttgccctcgaagaaatagcggaatccgtcatcgcgcagctccgcattgtcggtaaagcggaattctatcgcgcgttcgcggtccgtgatcccctcggatacgggaagatcggcgccgcatgccttcttcacgagtgctttcatatcctcgacggcgagcatcatattctcgttgtgctccgccgggtactcgatcgcgtattcggaaatgtccgcgcccgcgaggcggaattcgtcgatacggtacccttcgtggtaggcgatatcgacaacggctcgtcccgcttcgatctcgtttgcgtatttgcgaacggcaaacgaaagcgcggatgcattctttcccgcgattaccgcggaagctccgtcggtgcggataacgtacccgtcgttctcgaagttcgagagatcgatcccggaatcattgccgagcgcgagataaacgctgttttcaagcgaatctccgaggcggtttgtcagccacgaagcgtaggtatccgcttcggacgaggaaacggtgatcttcggcgaatagttcttcaccggagtctgtgcgcatgatgcaaaagccgacgcggcgatcacgcagcacagcgcgagggagatgattttcttcatttgtcgttttcctttccatgaatatattgatctgcgagcaaaaatgcaggcagtgttattttctttcacgagccgcagcgtgtcactccgcgtccgcgtacttcacgggcgcgggacgctgagtttcgcccttcgggagctcgtcacgccaatccgcccaatcgagccatgccgattcttcaagcgttctgcggatcgacatatgcgaccaattgaggtcgctcgtgctcggtccgtaggtgtcgagaacctttatcatcctgttatatcgctcgtcgagcaccgcaatgcgcgcggtgtcgccctcatcgtactccttaaagtacgaggatacgcatccctcgtagatcatgtgaaccgtgagcagctcggcgttgcgctgctgacgcgcgttcagtgcaaggctgaccgccttatcgagaagccataccgaagtgtcaaacttctcggcgagaaaatcgctgtagtaacggtctcttgcctcaagcgtcatgtatccccagcagttccagcagtgacccgcaatatcctgcgacttgttccaaatgccgtcgatatattcgcgaacgtatgcccagccttcgccgtaatcctcctcgagaacctcgtcgaacgccttgtcaaactcttcttcggtcatatcggggtaccagttcattttatagacgagctccgccaaggtgtggtgcatgccgagcccgtgcgtctcctcctgtatgagaagcccgcgaacaccgcactctccaaagaacatcacatcgtcgtatattatgtcaagcatcgtatacgcctgcacatgatttgcaagagagtaataccatataacgatattgtcggagagagcgcaccattcgcgcacccatgttgcccatacgtcattgtttatgatcggcaggtcggtaactgcgtagagatcggacttttcgctgcagtccttcgtgtcgagcgcgtggttcgcgcatgttccgttcattgcaaaggtaacggaaacattgtcgttcggtgcggttttgcagggcggctgagttcccatgtacgcatatatcagatacataagcccgtcgtaggtctcgctcacctcatcctcaaggcggtttgcaaagcgcaccaccgccccggatcgcgcgccgccctcttccttgcttacattcaagcatcccgtacagcggcagtatcctgcgttgtcgccctgcgcaatgtcgataaatttgaaatcaagaccgataacggagccggcggcaagcttggcggcgatatagttttcaacgctttccttcacattttcaaacacaccctcatcggtatagcatacctgctgatacgtcgtatcgtaaccgccccaatgatgatcctgcgatccatgggaagcatagacgatactcggtccgtacgatctctgaaccttgtccgcggtatttctcgcgtcggtggcgaaatttctcaggtcatagccgaggagatacggatcgagcagatcgaacatggggaccgtttcctcctcggtgtcggcgctcacgtcaatgagctttgcctcggggagatagctgtttccgtaggtgagagagcgccagtcgagctccttctcaaggaagaaccacgcgccgtacatgcagcctcgggcgaccgcgccctcgatcacaaggcgtgagccttcgaagaagtagcggtagccgtcgtctctcagcgccgcgtcgtcggaatggcggaattcaatcgcgtgtgcacgcttcgtgatcccctcggaggaggaaagctccactccggtcgccttctttataagcatctgaaactgcgatatcgcgtagagcatgttctcgttatgctccgccgggtactcgatcgcgtattcggcaatgttcgttccggcgaggcgaagctcgtcaatgcggtttccttcgtggtacgcgatgtcgagcgcgtcggctctgcctgcatcaagctcgttcgcgtacttgcgcaccgccatgtcgagtccggatgcggtctttcccgcgatcacggtggaagctccgtcggtgcggataacgtacccgtcgttctcgaagttcgagagatcgatcccggaatcattgccgagcgcgagataaacgctgttttcaagcgaatctccgaggcggtttgtcagccacgaagcgtaggtatccgcttcggacgaggaaacggtgatcttcggcgaatagttcttcaccggagtctgtgcgcatgatgcaaaagccgacgcggcgatcatgcagcacagcgcgagggagatgattttcttcattcgtcgttttcctttcgggggaaaataaaaaatacgatgatacaattttaacagatactttttccgaatgcaacatgatttattaaaaaagtatatatttttgcaaaaaacagtgagggtctgtccgccctcactgccgaaatgcaattatttgtttttatattcgacatattcctcgaggcacatgccgcgctgcttcatctcgtaagcggcggcacgtccgacaaaacgccaatgccacggctcatacgaatatccggtgatctccgttttgtttttcgggaatctctcggtaaagccgaatttccacgcgttttcctcaagccacgaatacaccgcctcatttgcaaaagcctgatccgctccgggcaggttgtgcatatcgcagcaaagtcccgtctgatgctcgctcgtaccttcgcgcgccgaataggtgtcaacgaccgctcgcgccgcttcctcggtgagcgacggatcgcgcgacatctcggatgtgacgtagcccgcgtaaaggttcttctgctcatcgtaggagcggtacgcgctcgtcacggatacatcggtatatcccgcggcgcgcatctcattgaacatcgcctcgagagatttttccgcatattcgcgcatctttcgcgcggagcggtcgcttcttgtatcgcgcacatcgacgagatcggacggtgaaagcgacgcatcgacggtgttctgtctgttcacaagcacgaggtattcgtcagagtcggcggtcatatacttttcgtactccgatagatcggtggcaaacgtcacctcgatgtcctttttcacatttcccgttcccgcagtgtccgaggtgttatttcccgaaagctttgacggggcaagcgaggctttcagcgtaaacgtcacagccgcgtcggtgaacttgccgtccgcgtctgtctcctcggttttgttcctgcttattttaacggtccttttggcgctgtccgcttcaaccgtgatcccgtccatgtattcggtgacgaaatcagccgggacaaacacctcgcccgacgaaaaaacgcagtctcccgaaaggcgtattttcgtgccggataccgtgcagtcggcatcgttcgccttgaaggaaacgtattcctcattgcccgttccggcggagtccgatgcgccgtcggcaaggatgaatctcatctcggacgagtccccggtcttcgacatcaaagccatatcggcgatcctcgaaaacgaaacgtagagctttccgccgcggtaagcgtttttctccgacaccctgacgctttccctgccgtaggtatatttcattgaagagccgattttatcgggcgtgctgaaaaaataaaccgcaaacagcgccgcgcatattcccgcaagaagcaggaaaagcacgagaaaaagtatcagtctgccgccgagtgcggaatttcgccttcccggttcgccgcgatacccggaaggtgcgccgcgcctttcttcgtaatgccccgcgccctccggtcttgcccatccgcgttcgccgttatttccgttcatataatctctccttcgatccgaattcgccgcagctgcggtgctctcgggaaaagtttgcctcattcgatgcgattgaattcatccgtttcgcttttttgacgcttttgtttcgacgatcatgaaatacgggctgtccggcgaattcagcatacagaatttcgccgtgcagtagacgtagcgcgacagcgacgaaagaaaccgctcgatctcctcgccctcggcgcggccctcgggatgtccggggtaaacggcgatgagaagtatcgcgtcttctccgagaagggatatcgccgcctcgaccgcgggaagcgtcgtttcgcgcattgtggtaagcgctttgttcccgcttcccggcatatagccgaggttgaacattcccgcctttatcggtcggtcgatgtaatcgcgcatcaggtgatgcgacgcatggatcagcgtatagttctccgggcatccggaagaggcaaggcgctctctcgtcgagacgagcgccttctcctgtatatcaaaagcaaagacatgaccgcgctctccgaccgtcattgacagaaactgcgtatcgtgaccgtttcccatcgtgaagtcggcggcgcagtcaccctcgccgagatgtgcgagaataaattttttctgaagatcgagaagatcaaccataatgtacaataccccttacaagacaggctgcggcaaaccccgtgatgcttccgaaggcgcgcttcgaaaaacgtgcgtacggcgcgccgtaaaggtattatacaccaaaaattcctgcctgtcaattgaagagcgggcgaagctgctttccctcgcgcattgccgcaaacgatcttccgacaagcgaaaaatccgcgacaagcgaaaacggcttttcgatcggggcatcctgccgcatcggaacaaaaaacacgttctttctcataagaagcctgccgatgtttccgaggttggcggatatcgcgtcatttgaagcaagcgcgatcagaagagggcgctccgacctcatgtgtgcctttgccgccatgcataccgccgtatccgttatcccgcaggcgagcttggcgagcgtattccccgtgcagggagcgattatcatatattcaagcgcgatctccggtccgagcctctccgcttcctttaccgtgtgtattatttcgcatccggcaagctccgttacccgctttttaagctcttcgctcgttccgaagcgggtatcggtatcccatacgcattcgctcatcacggggagaacgtcccagccttccccgacgattgagccgagagcccgaaggcttttcgaatgtgtacagaaagagccgcacattgcgtatcctatcatttttcagtgaccttgcctttcttttctgctcattttacaaaaccgcggcgccgcatcggtcacagcacggcgagaatcgcatcgccgattaccgccgcggcgctctcgggaaaatactttcccggaagtccggctgcgcgctttaccgttatcccgtacctttccgcggcggcggaatcgatgccggaggatgacgcgagctccagcaccggcgtgtgaaaatccattgcggaaagaaaatcttccccgatgacgcatgcgggaacggtattgaccgcgcattccgtttcgggtgcgagagcggcgctttctccgaaggaaaaagcccgtgctccgtccgcccaagcggcggcgcgtgctttttcgctgcggcatacgacatttacgcggcttccgagaagcacaagtctgcgcgtaagaagggaggcgatcctgccgtatccgaacaccgtaacgccgaggccgagaaacggtctgcacactgccgaggatatctcgaaaagcgcgccctccgcggtgagaagcgcgtttttataaagaagctcttccgaagtataataatcgtacagcaccgccccggcgtcgcgcgcgagatcggcaatgtatctcgaacagcatccggcgaataccctcgtgccctttttaacggaggcaaacaccgtattcagcgggattttcccgccgtccggcggaaaagaaagatttgccccgtcggaggaagcgggaagcggaagcacgaggtcggtacactccgcgcactcgcgcagtgatgtgcagaaccgggcgggatcgaccccgtccgctcccgcgtctccgctgcggcgtacaaacgcccgcacggaatatcccctctccccgagataccttgcaagatacagaaagcggctgtcgccgccgagtattccgaaagaatgtgtgttcatcggcttcaccgtaccttctccggacacgctccggcaattttatttcacactatattatatgccccgttgaattttcgtgcctcgggtgatataatataataccgaagaaagcgaaattttcagagaggaagacatcctcccgaaaggaatataaatggaaagaaacaacgccgccgagcgtgccgcgtggctgcgcgctcagatcgccgaaaattcagacctgtattacaacagcgacgcgccgaagatctccgatttcgaatacgatgcgatgttcgaagagcttaggtcgatcgaggctgcttttccggagcttgattctccggattcgccgacccaccgtgtaggcggaaaagcgtcggagaaattctcgaaggtcacgcaccgcgttcccctcggaagcctcacggacgtattcgaccgcgaatcgcttgaggatttcgttcggcggatgaaggagacgctcggcgacggcgtgcgttttaccgtcgagcctaagatcgacggtctttccgtcgccgccgaataccgaggcggaaaacttatccgtgccgccacgcgcggcgacgggaaagtcggtgaggacatcaccgaaaacgcacgcacgattgcgtcgctgccgaaggaggtcgcgtacggcggaaatttctgcgtgcgcggcgaagtatacatgccgagggcgacgtttttcaggatcaacgccgaaaacgaggaaaacggtgaaaaggtattcgcaaatccgagaaatgccgcggcgggctcgctccgccagctcgatccgaaggtcacggcaaagcgcggacttgatatattcgtattcaactttcagtacggagatcgggacgaagaataccacagtgcctcaatcgacgatctgcgcgatctcggattccccgttataagctataaaatcgcgcacaccgcaaaagaggtgattgccgaggtcgagaaaatcggcgaaaagcgcgccgtgctggaatatgacattgacggggcggtcgtaaaggtggattccctcgaaaagaggaggatcgccggagaggggacgagcacgccgaaatgggcggtcgcatacaaattcccgcccgaggagaaggagaccgtgcttctcgacatcacgtttgagccggggcgcacgggcgcgctgacccccactgccgagcttgaaccggtgcgccttgcggggacaacggtatcccgtgcgacgctacacaacatcgatataatcagggagcgcgatctgaagatcggcgacacggtcgtcgtccgcaaggcgggcgacataataccggaaataatccgcagcgtcccggagaagcgcacgggtgcggagcgtgattttgcgtttcccgaaaaatgcccgtcgtgcggcgagccgctgttttacgataaggaagcggaattcgacgaggaaagcggcaacgtctctctcggtgcgctgcgctgtctgaatcccgaatgtccggctcagcgcgagcgccgcatcgagcatttcgtgtcgcgcggtgcgatgaacatcgagggcatgggcgaaaagcttgtatctcagcttatcgaaaaggggcttatatcatcggtcggggacatatactctctcagagaggaagacctcgagggacttgagcgcatgggcaagaaaagcgccgtgaacattattgcggcgataaacgaatcaaagacgcgcggcggcgcgcggctgctgttcgcgctcggcatacgccacatcggagcgggagccgccgaggcgctgatttccgaattcgggtcgatacgagcaatagcttcggcaagtgccgaagacattgccgccgtccctgatataggcgagatcaccgcggaaagcgcggcggcgtttttctcgctcccgtcctcggcagcgctgatcgatgcgcttgaggcagcgggtgtcgtcaccgaaggtgcaaagtccgagaaggtatcgcaggacttcgacggcatgacattcgttctgacgggcacgctctcctctatgacacgcgacgaagcctccgccgagataaaggcgcgcggcggaaaggtgtcgtcgagcgtatcgaaaaagacgtccgcagtgatcgcgggagcggaagcgggctcaaagctcacgaaggcgaactcgctcggcgtccgcgtaataggcgaagccgaattcctcaccatgatcgggcgctgaccttctcctttccgtacacctctccgccgtttccctgttcaaacaaaacttgacactttaactcatatggtgtataattattttgaagtgttgcgggctatttgcgcggacgcggcggcggggcttatccagatgccgccgcatcgcttcacaaacaagatatatgccgaaaggttttcataaaaatgaaagatctgctcattgtaaatttgatccttgcgatcttcttcacggtatgctacacatatcagttcatatacattctgatcgcgctgatcaaagagccgaagaaatacacctccgacaacagaaaccgttatgcggtgataatctccgcccgtaacgagcgcgacgtaatacacaatctgatcgacagcatcaaaaagcagaattaccccgccgagctgatcgacacgttcgtctgcgcggacaactgcaccgacgacacggcggagcgtgcgcgcgaagccggagccatcgtgtacgagcgtttttcgaccgaaaaggtcggaaaggggcatgcgcttaactatctcttccacaagatcttcgaagattacggaaaagagtactacaacgcctatctgatcctcgacgcggataacctgctcgacgagaactacatgacggagatgaaccacgtattctccgccgggcacaggatcatcacaagctaccgtaattcaaagaactacggtacgaactggatttcctccggatatgcgctttggttcctgcgcgaagcggtctacctcaacaatccccgcatgattctcggcacaagctgtgcggtatcgggcacgggcttcatggttcaccgcgatataatcaacaaaaacgacggctggaagcacttccttctcaccgaggacatcgaattctccgtggacaacatcataaacggagaaaagatcgcatacgctgcggacgcaatgctttacgacgaacagcccgagacgttttcgcagtcgtggaagcagcgtctcagatgggcgaagggatatcttcaggtattcatgaattacggcggacggctcatgaagagcatcggcggaaaaggcggattctccgcattcgacatgaccatgacgaccatgcccgcgatattcctctcggtgatcggattcttctacaacgtgatcaccctcatcgttgcgatctgcacaaaagacccccatgtcgggcttttctggggtgcgcttgccatgaccgtcgcggtcatgtacataatgtactttgcgatcggtgtgatcaccggagttacggagtggaacaagatcctcaccacgaaaggaagaaagataaaatcgttcttcaccttcccgctcttcatgttcacctacatcccgatatcgatcgccgctctgttccgcaaggttgagtggtctcagataaagcacaccgttgcggtgtcgataaacgacatgaatgcaggcaaagcgcaaaacggcaaggatcggagcgatgccggcaaaaaggacggcgatgccgacggcagcgccgatggaaacacaaaagataccgatgaaaaagaagaaaagaaataacagaagaaaaaagagttcttcccccgcgcttgcagcctgcgtgctctgcactgcgctcatatgtctcgcggtgcttgccgcctgccgctttgtgcactcccgcacggatgatgaaggggagagccgaacggaaagcgttccggaggtatcgcaaagcacggcggataccgaaagcacctccgacagcacatcggaggagcccgcggaaacgaccgtgcctgcggaaaccactgtccccgtcgaaactgccgatacggagactgccgaaagcacgccgccggtcacggcggggaatgaaaatccgccggagacaaacggcggcagcgaatatctcggaaagacctccaagggctacgacattgagcggatcgacggtgtgacatacgtcggcgggatactgattgcgaacaaaacgtaccctctccccgaatcctactatcccggcggacttacggacgagacgaaccgcgcgttctgggaaatgcagtccgccgctgccgcagacgggatcagcctttggtgcaaatcgggattccgctcgtacatcgatcagaagatcatctacaacgattacgtcgcgcgcgacggcgccgcgcttgccgacacatactcggcgcgtcccggacacagcgagcatcagagcggcatggcgcttgacctcaattcgctctacacctccttcggcgacacgcccgagggaaaatggcttgcggcaaactgctggaaatacggctttataataagatatatgaaggaaaaggaaagcatcaccgggtatatctatgagccgtggcacgtccggtacatcgggaaggaaaacgccaaagccgtcaccgaaagcggtctttgccttgaggaatacctcggaatcacgtcaagctataattaagaaacggacagcatccgtgaaggatcggcggcattgaccgcccggatcctccggaatttgctgtccgttttttgtaccgcagtttgcagattgcgcgaaatgcgctcgccgccttcacgcggtatcaaagctcgtgcaccgtgaccatgccgagcgtctcctcgatcttttcgcgggatgcaagccatacggagcgcgccgtggcagtgccgcaggcggcggcaaggcgaagagattccgcctcgccgagtccggaatcaaatccgccgagaaatccgccgagcgtgctgtctcccgcgccgatcgttgcaatgacctcacccgacggaaccgatgcatgatatgctctgtcccccggggcaaagagatacgcgccgtcggcacccgccgtgacgagcacatactcgcttcccatccgctgaagctcccgtgcggcgcggcatatctccgcctcgccgtttacgctccgcccgagcgtctcctcaagctcggcgacattcggctttatgacgaacaaactgcggctcagcgcgccgcggagaagagctcccgccgcgtcggcgcagaatctcacgccgcgtccctcaagcgacgcgaatatctccgaatacacgttcgttccgacatctgaaggaacgctgcccgaaagcacgagcgtatccccgctcccgagcaccgaaagccgagcgtacagcttccgcatcccatcctcgccgatcggcgcgcccggcgcgttgatctcggtctccgagccgtcgggggctttcagtttgacatttattctcgtgcatccttcggcgagcctgataacgtcgagcggaacgtccggggaaagcacgcgctcggtctcgcttccggtgaatccgccgacgaacgtgatcgccgaggttgccgctccgaggcggtggagcaccgtggagacgttgattccctttccgctgaagaaaaattcttcctttgacgcgcgattaagaccgccgaacttcacatcgccgatgtgaagtatgcagtccaccgacggattaaatgtaaccgtatatatcatcatatcctccgacgcgcccgtgacggcgcgctttttctttatccgaaattcgttcttcccttactgcgccgattatcctccggcagtcctcttcgcaaagaccgcgaaggtatgcgatgcgttcgcgcggcacgctctccgaaagttcgggcagcgacgcgagcatttcctccgaagtgactgtaaatgcggaaagaggcgcgggcagtccgaggtacgcgcacgccgcgtcgatcttcggatcgtaagataccgcgagcaccggagtgccgacgcacgcggaatatataatcgaatgaagcctcatgccgacagtgaaggctgctcccgcaaacagcgccgcaatgctgtcggcatccgaaaacggagccgtataagccgacccgaccgacaacgcgcatattctctcgcaaagcgctctgtcctcgccgccctgcatcgggactatcacgggtgacagcccggtctttatcgagacatcacgcaccgcgcgggaaatacggctgtcgaaatctcccccgcagccgccgagcggacggagcgagaccgcaaaatatccctctccgcggcgaagcccgattctttctccgaccgatgcgaccgatgcctcatccgggggcatcatcataaaagagccgtcggcgccgagcctgaagcgatccttttcaagtccgatctcggaaagaaccgacgcgctcagtccatcgcgcacgcttatatcttcggctccgccgagcgcgcgcatcacgctttgccgcgagccgcggcgctcaagcggtcctatcccgttcgcgtaaacgaaggtgcggcaccgctttgatgccgccgaaagaacgtgcgtgtaatagcgtaggctgcggcggctcgtggcatcctgcagaagtccaccgccgccgaaaacgaaaaccccggctctccgtatctcgcgcatgaccgaaaagaatgacatacggtcaacggcgcgcactccgaagcgttcggaaaattctgcgggagaggatgcaagcaccgtcagcctcgcgtcggggatctcgcgccgcaccgccgagatcaggcattcgagcgacgattcatccccgagattgccgtagccgtaatatccgcagaacagaatgtcggaatgcgaaaactccgtcggaaagccgagcttcccgatgcacgaaagatagacttccgcaatctccgcaaagatttccccgaccgcgttttccgtaaaaagcttcctcggggatgacataaagcacaccgcgtctgcgggaagcacatcgatcttatcatatgacacacagcggcataacgcaagacggtccgcatcatctgcggacatgacgaccgtgcgttccccgcataccgttttccgcgaaggcgtgaacgcggtcgtgacgaagcgaaaatccgtatgatctttaagccgcgcgagcacgcggtcaaggcactcgtcaaagctgcacaccgcatcgaaatcgccgtccgtgataagcgctttgagcgtccgatactcactgccgttctgaatcctaacaatatgcacgccgctttttgaaatctcatcgggcacgccgcccgaaaatgccgcgcacgccgtgtgacccgccgatgaaagggcgcacaaaagcccgacggtgaacaaacgcacgccgtcgggcgcttcccccgacactgccgcaagaattctcattgaaagctccgctttgccgcgaacagggaacgcgtgagaccgtgatgattgaaaatccgccaaaacgcgatccaccttacgcaaggtgcgcggaggattgtcaggcggatcagatatccgcctgagccatgtaccgttcggcgttttcggcgataaatctctttctcgattcgagatcgtctccgaggagcgtttcaaacatcgtcgcggtatccgccgcgtctgcggtcgttatctttatgagacgtctcgtcgcgggattcatggtcgttttccacatcatctcgggctcgttttcgccgagtcccttcgaacgctgaagtgtgtactttctgtctccgagcgacgctatgatctgctgcttctcctgctcgttgtatgcgaagtagatatcgtcctttgccgtgatctcaaacaacggagattcggcgataaacaccctctccttctcgatcagcgtcgggagaaggcggtagaacattgtaagaagcagcgtgcgtatctggaatccgtcctcgtcggcatccgtacatattattattttagaccaacggagcgcgtcataatcgaatttcatgatatcgcccttgatttttgagggaagctccactccgcagccgataacgcggagcagatcgacgatgatctcgcttttgaaaatcttgtcgtagctgctcttcaggcagttcagcgtctttccgcgcacgggaattatcgcctgaaattccgcgtcacgtccgagcttgcaggaggtcattgcggaatctccttcgacgatatacagctcgcgccgctccgggtcctttgagcggcagccgacaaatttctcaacccgcgacgaaatatccgacgggtttgcgttgagcttcgcctttatgtttattctcgcggattccgcctgctctctcgagcgcttgttgataagcacctgagtgagaagcttgtccgcctcctgcggcttctcggtaaagtatatctcaagctgctcacgcaggaatgcggtcatcgcctcggcgataaaggagttggttaccgccttcttcgtctgatcggagaaggacgcgaccgtggaaaatccgttcgacacgaagcagagacagtcctcgacatcctgaaaaacgatcttcgattcgttcttgttgtaccgtccgagagcgcgcagacgcttgtctatcgcgtatgtgaaagcgttcttcacagccttttccggagcgccgccgtgctcgagccagctcgaattgtggaaatactcaagcatatggaccgtcctcgatacgcagaacacataatcgacgcgaagcttgtactcctgcttatccgcgcggtcctttcccgatgtctccatcgtccagcggacggtctccgtcagcgccgtatctccgaccgcgttttctatataatcggatatgccgttcggatacagtatctcggactgatcgaacgtgccgtccgcattctcgaatcggaggacaaatttcagtcccgcattcacgaccgcctgcttttcgaggatcagcgtatagtaatcccgcgggattgcgatatccgtaaaaacctcgagatcgggacgccagcgtgtcaccgttcccgtgcgccgctcgcgccgctcgagatctctcacggtgagctcacggtcgacctcaccctttttgaaatgtatttccgagacgcgctcgccgtcatacgaatacacgtccatgtactcggaagcgtactgcgtcgcgcacgcgccgagtccgttcattccgagagaatattcgtaagccgcctcgcccgagttgttgtcgtacttgcctccggcgtaaagctcgcagtacacaagctcccaattgtagcgctcctccgcctcgttgtatccgagcggaacgccgcgtccgcggtcgtcaacctcgatcgcgttgtcggaaaatacggttacggttataacgtcgccgaagccctcgcgcgcttcatcgacggagttcgaaattatttcgaaaacggactgttcgcagccgtcaagcccgtcggagccgaaaatgaccgacgggcgcttgcggactctgtccgcacccttgagagaaacgatcgactgttcggtgtagctttgttttttctttggcattgatattgtgaccgtacctttctttatgtttgttccggcttcgggagccgcgataatattcgtaaaattctcacgatccccgtttgcgggagcgtgacccgtgatgcgcgatcatacggcagcgcgggagttgcagataagcatcgccgcccgagcatgggatatatccatgcggtcaacggcgtttcgaatattttgcgaaaagcttacattccgtaagcatatatgatttcgaatataaagaatgccgtatggcattttcattctataagcatcgcatcgccgaagctgaagaagcggtagcccgcctcgaccgcgatgcggtaatcctcgagcatacgctcgcgtcccgcgaaagccgagacaagcatgagaagcgtgctctcgggcaggtggaaattcgttataagcgcatccgtgatcttgaatttgtatcccggatatatgaatatccccgtgtcgtcggacattgcgtgaagtatcccgttttcgtcggatgccgattcgagcgttctgcacgaggtcgtaccgaccgcgatcacgcgcccgcctgcggctcggcgcccgttgatcagatcggcgctctcggggctcaccgagaaaaactccgaatgcattctgtgatcctttatttgcttttccttgacggggcggaaggttccgagcccgacgtgaagcagaacgggcgcgatcgcagttccattctcccggatgcggtcgagaagctccggcgtaaagtgaagccccgccgtcggcgccgccgccgatccttcctcgcgcgaatagaccgtctggtaccgttcgctgtcctcaagcttttccgtgatgtacggcggaagcggcatcgttccgaccctatgcagtgcatcgtaaacggtctgcgcgtcctttcccgccgtaaaatgcacaaggcggttgccgtccggcatcaccgattttatctccgcgcggagtatgccgtctccgaattcgaggatatcccccgtcattgcacgcttgcccggtccggcaagagtctcccattcatcgcagccgcgctgtctcagaagaagcagctcgaccgaagttttcgcaggggcggaaaggtctcccgccccagcctgcgccgcgttgaacacgcggtgtccgattatacgcgcgggaagcactctcgtgtcgtttatgaccagcacgtcctccggacgtatgtattccgttatatcgcggaagatccgatgctcgacgccctgtttcgcgcggtcgatcaccataaggcgcgaggaatccctcggttcgaccggatgctgcgctatccgttccttcgggagggcgtatgcgaaatctttaagtgaaagcgatgtttccgcaaggtcgtttttaatcatgtaagctttgcctttcgttaacccgcagatcggtgcgggaatattatgatacgggaaatatacgcggccaagcgccgcggcaaaaagaaaggaatttccgttttgaaaagtaaatatctgttccgcggtgcctccaccgcgataataactccgtttttcgacgggaaggcggattttaaatcgtttgcccgtctgatcgaccgccagcttgacggcggcatatccgcgctgatcgtatgcggaaccacgggtgaaagctccacgatgaccgacgacgagcagcgcgcgctcatatcgtttgccgccgagagagtcggcggtcggatcccggttctgagcggagcttcatcgaattcaacgcgccacgcagtaatgcgcgcaaagaacgcctttaccgagggtgccgacggcgtactttgcgtgaccccgtactacaacaaggcaagcgaggacggcatggtcgcgcactatgaggcgatcgcgtccgccgttcccggcgacgtgatcgtatacaacgtcccgtcgcgcaccggctgtcccgtcacgctgaatgtgctcgagcggctgtccgtcatacctaacataagcggaataaaggaagcgtccggcaaggtctcgttcacgaaggaaataatcgacgccttcggcgatcgcttcgccgtatattcgggctgcgacgaaataaatcttcagatactcgaggcgggcggcgcgggctgcgtatccgtcctgtcgaatatactgccgcgcaccgtgagcgaagccgccgatgctttcctgcgcggggagcgcgaacggtcgcggtcgctcttcgattccgtatccgaaatcgcgtccgcgctgttctgcgaggtgaacccgatcccggtcaaagccgttctcgccgacatggggctttgcagggaggaataccgtctgccgctctgccccctgagcggagaaaaacgcgggatgctccgtgagatcgcaggctcggtcagggaataagctcagccgtccgtcatggggaatgcggtctgcagcgcgcgttcgcacgacgatgcgtaaagtctgatcatctcgccgatcgtggattcgccgaggatcgcatttctgacggcataatacgttgcgttcggggtgtcgctgtacatcgtaccggcggtatatgcgaagtcgtagcgaagctcgttcttcattattatactgagcatattcgcggattcgttgtcgcgcagcatggagttctgcgtgtaatcgacaaatgccgaaggtatgtttccgtacgatgccgcaaacatcgcctgaagtatgagcgacgtgcgttcgtctgcggataccgtcgccggaactccgaagaagagcgacgacggggacgccgccgaaatatagctttcctgatcggcgctcgccttcggcatcgggactattccccaccgctcggcggaatccgccatcgtataaagcgagcccatcgtgtctatcatgaatacgcaggaggtaaatgcgccgtgaccgccgctctcccccgtaagagctccatccgctttgaagatacgcgacagcatatcgataatcgcgtttgagttgtcctcggtaagcgccacggtcggatacttcatcgcacccgccgaaataagctttccgcctgcggaaaagaacgcacagtcaagtgcgaaatcccccgtatcacccgtacagaccgtgccgtatccggcaccgagcgcagccgtgcagtatgagtagaattcatcccacgtccacgttcccgccttcgccgatttgtacggaagctcaagccccgcggcgttcagcttatcgaccgaaaagaagacggcggggaaagaatacggtgagtacgtcgcctcgcccgccacggcaagaattcggtagcccgcgctcgccgcctcgacggcgctttgattgaaataaggcgtgtcgagcttcattccgggcatggaacgaaggttgtaaagcattcccgccgcggcaagcgacggtatagtgctctgcgggaagttcagcatatcggcgtaatacattccggatttgagcgaagcggaaagctcggcgtacatcgtcgcggaatccgcggaggcggtgacaagggagatgttgtatttctcttccaccgccgcatttctttctttgacggcgcgtgagattatctccggtgcgctgtcctcgcccgtaagctcgggagaggtcgagactatcttgatgaccgcaccgccgcagtcgatgcccgccactccgtcaagatactccttcgcctgtgcggagaaatcctccgtcactccgtggtacggcggctcggtctcgggcgcggttgtctgctcgatctctgatgtctgagaatcggcgctctcccccccgggacggtttataactataaagccgcatgacgaaagcattgcggcgactgtacataataaaagcactacggctgcaatccgctcaggtttcatttgttcccccggtgtgttcgcacaaaaatacattataattataatccccgccgggaagaaaatcaatccgtaaatgtgaattttaacggtttcggatgaatattcaaggaataataaggcaaacatggtaatccatatattgtgtgttgaatgcatttcccggatgtggtaaaataaactcatcccgcacatcgccggatcgacgtacggcatacggcgcatcatcggacaggcgggggacgaaaccgtttttctccggagcacggtatacggaaaaatcaagacgggcgctgcccgcataaaacggaggtttactatgtttttcgaaaggataagaaaaaagaattttatacgaagtacggcggcggcgacggcagcggcggcaatgatcgcatcggggattttcttcaccggagcatccgatgttgcgattcaaaacgatgtgctcagccgccgaacgctgaacgctgccgtcgaagccgagcttgaaagccgcggtctgcgggcatatccgaatcaggcggtcacggtctacgttgacggcgagcagtacgagggaaccacgcttctcatagacgggacgaccttcgtcggcatacgcgaattcacgatgctctgcgaggacgcgaccgtcgagtgggtcggagcggagaaagccgtatatgtgaccaatccgcgcgttgcgatcaaggcggtgaattcaaccgaatacattatgtcaaacggaagatacttctggggcgtgaaggaaaacttcatagaaagcgggaccatgtacgttccgatccgtgcgatcgcttcggcgttcggcatgacggtaagctggaatgacggcgaatttgcggcatatgtcagccgcggggacggcaccgtcacacagtggtacgaatactacaacggcgatgaggtgtactggctttcaaagataatcgaggcggaaagccgcggcgaaccgatgcgcggcaagatcgcggtcggaaacgtggtgctcaaccgcgtccgctctccggaatttccggacacgatatactcggtcatatttgacagaaagtacggcgtacagttctctcccgtggcggacggttcgatcggacgcgacgcctcggcggaatcggtgatcgccgccaagctgtgtctcgagggctgcagcgtatccgacagcgttctgtattttataaacgcatcggcagcgcaggatttctgggtgccgaggcacagaccgtacgtcacgacgatcggcaatcacgacttctacgcatgacggcggcggtcggagcacatcgtgctccgaccgcttttttcgcctccgcaatattttatacgaaaaatacttgacattacaagtattcctattgtataataatatctgcctatgcgcacgacggaattattgttccgaaaaactgataaaatcgtaaatattcaaggaggtgctaagcatgcttagaacatatcagcccaagaagcgtcaccgcagcaaggtccacggcttcagaaagagaatggctaccgctgacggaagaaaggttctcaagagaagacgtcagaagggcagagcaagactcacccactgagcgcaagtttaatatgaccggcctccggatttgcttaccttacagtatgcttttcggaggtttatcactaaagcggcattttttcgtatcggaggttttcggtgaagcagagtgcaatttgtgaaaatcacctttttcagaaagcttataaaaacggaaaacgcgcgtcgtcgcgttccgtgaccgtttacgttctcaaggatcgccgcgccgctctgctcagaaagcagaatccggaaaaaaagtttttaaaccgtgtcgggatatcagcctcaaaaaaaatcggaggcgccgtcgcacgaaaccgcgcaaagcgcgtcgtgcgtgaagcataccgtcttatcgatgcagagcactgcgtgcgcaaaggctggctctgtgtcatagtctgccgggaaagcgcgacggttctcaaaatgcaggacgtaaaacgtgatttgcagtactgcctgtcaaagacgggtctcatccccgacgcaaaggaaaactgaatatggcacgcctttttatatttctgatctccctctaccgaaagtatatctctccgctgaagagccgtccgagctgccgctttacaccgacctgctcgcaatacgcgatcgaggcgctcggcgaatggggctttatcagaggcagcgcgctcgccgtatggcgcatactgcgctgcaatcctttcggcaagggcggatacgatcccgtacccgtgagaaagaaaaagcgccgccgcacacaaaaggagaaaggatcgctttgccaagcaaagcacactgaactatgagtgcaatttaccgcttcttcggaagcatactgcagtttctcgataagataacgggcaactacatgatcgcccttgcgctgttcgcgcttattatccagatactgatgctgccccttgcaatcaagcagcagaaaaactcgatcaagcaggcgtcgctcgcgccgaaggtcgccgcactgcgcaagaagtacgcaggacgcacggacaaagccacacagcagaagcttcagcaggaaacgatggatctctatcagaaggaaggcttcaaccccgcaggcggatgcctccccctcctcatacagcttccgataatcatgcttctttatcaggtcataatcaagccgctctcctacgtttcgggattttccgccgatgtgataaacgcaatcggtgaaaagctcgtttctctcagaaaatatgcggatactgccgcatacactgccgcaatgaagtcgtccgaaataagcgtcatcggcaagatccacgaaaacgccgccgagctttcgtcgatcgagggcttctcgatcgatgccgtaccgaacttcacggtcggtccgttcaatctttcgactaccccgaaattcgcaatatccgacggcggctggcattgggattggctcattctcattccgatcgtaacgctagtcataatgtatctgacccagaagataacccgcaaattcatgtaccagcctccggaggctcaggatcagcagaacgcgatgtccatgaagatcatgaacctcacgatgccgcttttctccgcgtacattgcgtatatatggccggcggctatcggtatctattggataatccgcaatatttatcaggtaattcagcagatcgcaatcgcaaagatcatgcccccgccgaagttcaccgaagaggattacagggcggcggagcgtgagtttgcgggaaaagcccccaagaaggtcaagaagagcgaaagagcgggaacggtgcgttcgctgcaccatatagacgacgatgacgacgacagcgctgccgtacaggctcctgcggcaaaggagaacagcggttctcccgattctcacgtcggaaaatccccgctgaaggacgaaaacgacagaaaaaaagctacagagcaggaagatgagtccgaagatgagtaatgaagaaataatcataacagcaaagacggtcgacgaggctctctcgaaagccgaagcggaatacggttcgcagggcgatatatcgtacgaaatactcgaaatgccgaagaagggctttttcggcatcggaagcgcgcccgcaaagatcaaggtcacaataaaccgtgagcaggagagcattctcagcgagataaattcggatcggaaaaatgccccgaagccgaaaaacactcagccgcgcagagacggcgcagaccgtgcgaagaatcagccgaagccgcaggagacgaagaagaatgctcccgcgcgcgacgcaaaggacgcgcagccgaaatctcaggataagccgcaaaacaagcagaaggatcagtcaaagcaggacggcggaatcgccgctcaggacagaaacggcgcacaggacaagcagaaggcgccgaagaaccaaaacagggattcgggtgcgaagaaggctccgaaggagcccgatactcagaagcaaactgcgtcggaaaacaccgaaaagaagccgcagaagggcacgttcgttgagaaggaacgtccgaacatcgtcatcaccgaaaaggagatggagcttgctctcggatttatcaacacccttctccgcaacatggagtccgaggcgcatgccgaagccgcagtcgctcccgagggcgcggtgttcgagggagtgtaccccaagatcgagatcgtcggagaccgttcgggaattctcatcggtcatcacggtgaaacgctcgacgcgatacagttcctcgcaaatctctgcgtaaaccgcaagaccggaacctccggcaaggactttgtgaagataacggtcgatatcgaaaactaccgcgaaaagcgcgaggcaacgctccgcgcactcgcgcgccgcatggctcagaaggcgataaagtacaagcgcaacatggtgcttgagccgatgaatccttacgaaagacgcataatccactccgagcttcagacctttgagaatgtcgatacacattccgtgggaagcgacgaaaaccgcaaggtcgttatcacctacgagggtgcggataaggcggagcagaagcgctcgcagaagaaccgccgcaattcctcatcaaagcagggcggcgcgcagaaggaaagcgcaaaatccgctcccgtaagaaggatctccgaagaggagtccgcgaagattcaggaaacctatgcggcttaccaggaggaaaaggcgggacgcgagcgtccgcgccgcgcttcctcgatcgacgagatactcggctcctacgacgagcccgacgagcctgtcggactctgatcccactcaaattccggcgatgagagaagaagaaaaaatcgacgcggggcttttgttcgacccctccgatccggagctgcgggcgatcaaaagaaaaacgcacgatctcaacacggagtacaacgccacgcttgaaggcgaaaccgaacggcgcgcggaaattctcggagaaattctcggagaattcggcgagggcggtttcattcagggaccgatcttcttccactacggcaagcacacgaagatcggaaagcgtctcttcggaaacttcaatctgacggtgcaggacgacgcacgggtgacgatcggggactgctgcaatttcggtccgaacacgacgatcgtcactccgcttcatccgatgatcgccgaggagcggaatgcgttcactctcccgaacggagagacgaagcgtctctgttatgcgaagcccgtcaaaatcggaaacaactgttggttcggtgcaggcgtcaccgtctgccccggagtgacggtcggggacaactgtgtgatcggcgcgggcagcgtcgtaacgcacgacattcccgaaaacagctttgccgcgggagttccgtgcagagttatacgcgagatatcggaaagcgacagtctgaagtacaagcccgagcttatgccgtaaggcggtgcgcggcaatacagcggttcgttttcccgatcggcaggcgaaacgacagcttaaggagtacggatgcgcgctgttggctcggtctgtaaatttccgtcagaccgatcttcgccgtggtcgtgagccgcagattcgcgcgggtaaggcagagttgtcgcagtatcttcatcacaacaaaaacagctccttcatatgataagatcatatgaaggagccttttattttgtgcttttaccgttaccggaagccgacacgaagaacgctgcatctgtcgaagccgtggcggtgatttcggtgcgcattgagcggaacggcagcgttagcggcacggtaaacctattcggataagatcggtgcagccgtgatagcacgcaggctctgtgtctcgcgcccgcgcactgcccctctgccgttcccaatcggaagcctaaaatccggagcgcagttactcccagccctcaagatacgccttctgctcgggtgagaggctgtcgatctcgattcccgcagattcgagcttgattcgcgcgacccgcgtatccgtttcggcggacacgggatatacgccgggagcgaggtctttaccgctctttgtaaggtactccattccgagcgcctgaagcgcaaagctcatgtccatgatctccgcgggatgtccgtttcccgccgcaaggttgacgagtcttccctcggcaaggagattgaggattcttccgtccttcatacggtatcccgtgatattgggcttgcgctccgtgatctcttcgctcatatccgaaagtgcggtcttatcgatctcgacatcaaagtgtccgctgtttgcaagaagcactccgtccttcatcacctcgaaatgctcgcgtctgataacgtcgcggcagcctgtcagcgtgatgaaaagatcgccgtactttgcggcttcatccatcgtggtaacggtgaatccgtccatgaccgcctcgatcgcctttacggggtcaatctcggtgacggtgacgaccgcgcccattccgcgcgcgcgcatcgccgctccgcgtccgcaccagccgtatcccgcgataactacattcttgcccgcgattatgagatttgtcgtattcattatgccgtcaagtgtggactgtcccgtaccgtagcggttatcgaaaagatgcttgcaatcggcatcgtttatgtcgatcatcgggaaatagagctttcccgccgcagcgcgcgcaagcaggcggtgtattcccgtggtggtctcctcggcaccgccgatcaggttctcgcagaggtcgcgccgctctccgcaaagcagattcgtaaaatctccgccgtcgtcgattataaggtgaggcttgttctcaagcgccatgagaagatggcggcggtatccctcttcatcaactccgtgacgggcgaaaacctcgactccgtcggtcatggaaagcgccgccgcaacgtcgtcctgcgttgaaagcgggttgcatcccgtggcgaacacctgtgctccgcccgctgccagagtttcggcaaggtatgcggtctttgcttccatgtgaatcgacatcgatattctcagtcccgcaaagggcttgttttccgaaaactcacggcgtatccttccgagcacgggcatatacgacgcgacccaatctatcttctttcttcccgacttagcaagggaaatatccgcaatctcactcatttcaaattctcccgttcttcatttcagtctatctgcgcaatccgaatatcgtgatccgatataccgtagcttcttccgtccgcagcatcgtatcttcctatgtaaacagagttctcgtcaaaaccgtcattgattcgtctttcgtagctttcaccgaaataaacgtaactcatgccgttgttaatgctgagctcgaatgtgggatcggcgaagtaattctcaccgtcggcggtaaatacaacccacgcatgaggtcctgtggtatactctccgccgactatcgaacactttaccccgacctgtgtgagaagcaccgcatacgccttcgcaaatgtagtgcagattccgcgattcagtttgaatgcataatagggttccgaatgcactctcgtttccagaacatcgaaatcgtatgtcatcttcggagagaaattgtggtacaccttctgtgcctttacggcatcgctgtcggacggctttacgttgttcatatatgattcggcaagagttttgaattcttcgacggtcgagtcgtgttccgcctttccgaccttatacttccatgtcagcgtctttgtttcaatgtcatagtccgaaaactcggcatccgcggcgaacacggggaattcatagtagacaacgttctgaataaagtctccgtagtgaatgtccgttccgtagccgtccgaagcaggcgttgtcgggcagacgatttcggtttcgtaattgagatatgctttcacaaaatcaacatacatatcggcgaaaacatttccgtatttgttcagagcctcttcggacagcgcgaagaaattgtaggaatacactccgttttccgtattcggcgccatctcggcgggaagcgcgtccgcatcgtatccgccgttttcgggcagatatgccggcggctgaagatcgggtgcggcgcagctgccgtctgcggttctgccgaattccaccttatacggaatcagataaaggattcccgcgctgcgcggattggttatcagaccggaaacggtaaccgtcattccctcatattccaccttgcggatgccgtctccgtcggtgccgagcattcggaatttcgttacgccgtcaaaaacctccgcgttatcttctccgtaatatgtaagccgaagattaaccgtctgctccggagtgaagaaccatccgtcgtcatcgcgtccgatgattccgataacgatcgccgttcccgaagtctcgatatcaacgggtccctccggaatttcttcacggttatccgtgctctccgtgctctccgttatcttctcgctttcggcggatgcgtcggttataacccgggtatcggtgacaccggtcgtctccgagggtgttccgactgcggagcatccagcaaaaatcattgatgcggcaagaagcgccgctgccgtacagataaactttctcatattctttcctttcgcccgcgcgccgaaacgacgcggtgtccggtcagcgcgcagctccgccgagtgctttttcgagcgccgccattattccgagccgcgcgctctcgtatgtaagtccgccctgcatgaacgccgtgtacggctcgcgcatcggtccgtcagccgaaagctcaatcgacgcaccgccgacaaacgctcccgccgccatgaccacgggatcggcgtatccgggcatcgcccacggctccggcgaaacatgggagtccacgggagacgccgactgaatgccccgacagaagccgacaagcgcatcccccgagccgagcgttatcgcctgaattatgtcgtatctcgtctcgaacggcgcgggatttacggaaaaacccgcttcactgaacaggtacgcggcgaggtgcgcggtcttgagcgcttcggcaaccgtatggggcgcgtagaaaaagcccttcagtatgttcctcgtctgtccgagtgatgcccccgcctcaagcccgacgccggggcagctcaggcggtatccgcaaagctcgacggcatcgtgcgtacccgcgatatatcctccgatatccgccattccgccgcccgcgttcttgataagcgagccgacaatgatatccgcgccgagcgagcacggctcggcagtctcggtaaattcgccgtagcagttatcgacaaaggtaaaggtgcgcggtgcgcggctgttctcctttacgaatcggcacgcctcgccgatctcctcggcggaaagcgttctgcgcgaagcgtatcccttggagcgctggaatgcaacgaccttaacgcgctcgccgtactcgtcgagcttgtccgcaagtgcggaaagattgacaaagccttcaggggtaaggtctacctcgtcgtatgtgacaccgaactcgcgcaggcttcccatgttttcgccttcgatcccgatcacggggcgaagcgtatcgtacggcgttcccgtcgcgtatataaggacatctcccggacgaagcagcccaaacagcgctaccgtcagcgcatgggttcccgatatgatctgcgggcggcagaacgccgcctccgcgccgaacacgcgcgcggtgatgaaatctgtcgtatcgcgtccgaaatcgccgtatccgtacccggtcgagggggcgaacatcgcctccgaaacacggtattcggaaaaagcgtcaagcacgcgctccgtgcatatccgcgataccctttcgatatcggcaaacacctctccgagggcgctttccgcatcttccgcagcgtcccttatttcctttgatatattcatttcttttccatcctgttttccgttttgaccgcttttgcttattacattatattttatcacccgaagagaaaaaagtaaatagaccttttggaaaaattgacaccgcatacgatgattatatatgcgctcttcgcggtataataactgcggaaagtttttgcgccgccgctccgcgcgccgcgcagagcggcggcgcaccgcagtttatatatagatcggaaaggaataaagccatggcggtatacaaaagcgaaaacggaggaacggtcgagatgccggtcgaaatggcgctcatgatcgcgggcgacagcggagcgtgcgaagcgttcgcatctctcagcgaggaaagaaagtgcgaatacatccggcgcgcaaagtccgcgggcacaagcctgcgcatgaaagaaataataagagacatcaaaaccatagggtaaaaatcgggagacaaacgaccgaaaaacgtccgtttcggaaaatacggtgaaaaaatgaaaattagctattgcattttaagatcatgtgtgatacaataattaagcattgtgactatctgcgcttatttttattatcgtatagattacggaggttaaaatgtcaacatctgatttcgttctcggcgggatacttattgccgtttccgtttttcttatagtggcggtacttctccagcacggtaaatcccacggtctttccggaacaatcgccggaggtgccgaaactttcttcggaaagagcaaggctaaaacgcttgacaagaagctttccgttgtcactgccgttgtcgccgtgattttcgtcgctcttgtcctcacagtttatctcaagcaggatattaccgacgtaagcggaacccattccgattatgttgcagctcagacgactgccgcagcggacaacgcggacaccaccgcagctcccgccgaaagcacttccgcggtgaccgataccgccgcaaactgaggaaaataacaatgtgatatcaaacgaagccgccggaatttcagccgtggcttcgttttgttttctccgaaaaataaaggcatgaaaaagagaggagagagcggcgcaaaagccgcccgcaatatgaaaaggaaaaataaaaaatcgggtaagaagaatattgcaaagcgcatcccccgcaccgcatcgcggcgcggacgttccgcggctgcgcaaagccgccccgcaaaaagaaacttcaccctcgtcggtgaagcctttcgcggaacattccgctcaagcgggcgcggatacggcttcataacgaccgatgtctcggatacggacttttttgtcccgccggatttcac

SEQ ID NO: 24 - DNA, 32759 bp, Unknown
  16S sequences of unknown bacteria
tgtagcacacctctggagagaggtctataaatactactcttatataatacgaggcatgaaaatgaaaaagtggcttgtgctgtttcgaaccgaagcggttttgtattgccgggacgtattcagcgcgttctttacgttcgccttcccggttttgatgctcgtgctgttcggcagcatttacgggaacgcgcccacggcgtattttgatgggctggggagcatcgacgtatcggtgccggcatattgcgccatgatcctggcggtggtgggcattatggctttcccgctcacgctggcgcagtataaagagcggaaaatctataagcgcttcgacgcgacgccccttggcaagggcgccgtcatcgcggtgcagggtgcggtaagcttcagcatggccgtgttgggctttttgctgctgtttgccgtaggattcttggcgtatggtttgcgcgtggccggaaactgggcgctcatcgcggcccttttgctgctgtgcatggcttcgatcttcgcccttggcttctttttcaccgccattgcgcccacagaacggatttgccagctgctgtgctacatcgcctattttctgatgctctttctctccggcgcttcgtttccacaggaaatgctgccggaggccgtgcgcaagatttccgcctttttaccgcttacgcacgcggtgaatgtgctgcgcggtgcgttccgcggcgcgccatgggaagaataccaggccagcgttttcgtcctgtgcggcgtggggctcgcctgtgccctggcgggcgcgctgctataccgcaaaaagagctgggcgtaaaccgtgcgacggtggcgggcattgagcgaagggcaacgaattttccgccggctctctgtccgcagcgctcatcatccgctattgttggccttgctccttgttttcattgccccaagtacataactggtccaacacccgcattagcgaatggccccgctctgtcagcgtatattccacccgcggcggtatttccggatacattttccgatgaatcagcccatcccgttccagttctttcagcgtcgcactcagcgttttatccgcaattttgcccaaatatcgctgcagcgcgttgaacctcacaggttcgtactccatcaagcagtataaaatcacgggcttgtatttgccagaaattagagacaaagtatagctatatcctgtctgcgaaaaatccgcgtcctcaatgcgcttggacactgtgcttccctccaagtaagtaccttacaaatatgttggtacttgtttttcctgcggctctatggtatcataaatctgccaaaaaggcaataccgtaaaattgaggaggttgaatctcgatgaagaaaaatctcggaattgtgcaggctgtctacccgatgcccgtgctgatcgtggcggcatacgacgaaaatggcaaagtcaacgccatgaatgcggcgtgggggatgatttgcaaccaagaccggattgcgctgttcattgacgaggatcataagacaacgcaaaatattctcaagtctcgcgcctttaccgtaagccttgcggatcgcgcgcacatggatgtggccgacttcttcggcattgctacaggcaacaaaatggaggacaaatttgaacgcactggctaccatgccgtcaaaagcacttttgtcaacgcgccgatcatcgaagaattccccgtggttatggaatgcgaattggcggaagtgagcagcacggagagcttttatgccatcgtcggcaagattgtcaatacagcggcggaagaaagcgtgctttctgcaaatggcaaagtggatcccgaaaaattggatgcgctgatcttcgaccaattccagcacggatattatgtttctggcgaacgggtaggcaaagcctggaatgccggcgcgggatggatgaaaaagtgacgatgcctttttccgcaatatcttcaacaggcggcagcgcgcaagctgccgcctgttgacctttgtgaaaagccaaaaaaccttcgcgcgctttaaacgcgcctggcggcgcgcacaaaagacgcgaacaggcgctgggcatgttcgtcctccggaaagcgttccggatgccactccacaccgaaaatccagcggtcttcccccgcccactccacggcttcgttgatctccccgcacatggccgctgcgcgcaggggcggcgcgactttttccacggattggtggtggaagctgttcaccataaggctatccgcctgcaaaatcgccgccagacgcgaatccggcgcgaagcgcacttcgtgcatcacatcgtaatgcgaaacgccatgtgcgtctggaatgtgctggcacagcgtgccgcccagcgctacattgatcacctgatgtcctcggcagatccccagcatgggcagcttggcggaaaacgctatctcgaatagggccatctccatttcgtcgcgctgcgcgtcgattacggtcttgggatgcacctgcgcttcgccaaagcgccacggcgcgatatccggcccaccggaaaaaagcacgccatccagctcgtttaccagcgcgcgcagcaccgcaggagacgcgtcgaaaggaatacggcgcacttcgccgcctgcgcgctcgatggcctgaatgtattcttggggaaagaactgctcgccttctttatttcggttggcggtgaggccgatttgcggcttgtagggcgcgccgcaggaaagccgcccttccggacaggcgccacgaacccggcacgccgggccatactgcccgaacaattccggcgcatgctcccgcaactggcgcaagagctggtgggccaggccgcgaatttcccactgggcgcggttgcaagcgcgcaattccataaagtgcaaaatttcgcgcgcgttcatggccaccagcgcgtccaccgtgttgcccgccagcgcgcaataatgcgcccattctttgtgcgcggccgcgtaagcactcgcgcgggcaaacgccgcgcaataccgttccagcgcttccgcgttttcccgcacgctcgtgggcacgatataggcgccccgggcaacggcctgcgcgctgccttgcaccaggagagaaagcattctgtgccgggcgaggtgcgtgagccccgccagcgaaagatccgaaaaagaaaagagataggaaagcgtttccagttcgcgggggcgcgcgtcgcgcaccaggtcgcgcacggcgagatcgcggcctgcaaagcgccccgccaggcgcaatgtctccaagggatgcgcgggagcctgcagcagcgcggcgctcccctgcgcttcgtgcggcgcggcaaattcttctatggcggcgggcagcgcggtctccacgcgctcgcgttccaccaagccgggatagagcgcgtccaactgctctttgagcatatcgcccagataagagatttccggatagaccgcgccgcggccgcgcgtcatctccgcggccaggcgcaacagcgtgcgcacgttggccgtcatataaaaatgcccgcggaaggcatagggcaatacaaagcgcgcgtcttccttggggatgcccaattccagcaagcgcgcgtaatccgcaaaaaaggattccatgtgcgcgcgccagtcttcgcctgcaccatccggcacgacaaagcccgcgccggaaaaatccacatagcgccgggatttcaccatatacgacgccaaccggtgctcgatcatgaactgctctacgaaaacgctcgccccatcaaaagccagcgtcatcgtatggtgttccaacgcggccatatgcccggaaagcgccactttatggatcagcttccggtcggcttcgtctgccgtatttttcgcaaaaatttctatcgcgccgccctgcgtggtggaaatgcgcccgcaggaggcattcatatggacgccatgctccgtctgcgtgagaatggccacccttccctttcgcatctgcgcgccctccaattttgatcttttgcccgccgcccagtggcgcaaagcttctccattgtaggcttttttgctcgcttcgtcaagcgcgcggaggttatttgtctgaagcgaatctccagagcaggaaattcctcgcacacgtagaaattaaccattgggaggtgtatcactgcatgaaaccgtttcttctcaacgatctccattgccattcccacctttcgtcctgctgccgcgacgagagcatgacccccgaagccatcctggaacacgccgcgcggcaaggatacagcgccgtctgccttacagaccatctgtgggatcgcgccattcccggggcctccagctggtacgcgccgcaggacatcgatcatgtgtgccagtccctgcctctgccgcaaagcgaaagcgtgccctttttcttcggctgtgaaaccgagttgccggcaaacaacattcccgcgctggcgcgcgagcatttcgctcgcttcgattttgtggcaatccccgtcaaccatatgcacatgaagggcctcgtgcggccggacggcgtggatacgccggaaaaaatggcagagctggtgcaaacccgcctggagcgcttgctggaacaggatctgccctttgccaaaatcggcctcgcgcatttaacgtgcagcctgatgttttccgaaggttcggtagcggatgtcgtgcgctgcatgaatgagaaccgtttgctcgccatcttccgcggctatgcccaggctggtgcggggatcgaattgaacgcccaggctttctccgaatgggaggcgcgcaaagaggatttgctcctgatttaccgcgcggccaaagaggccggctgcaaattttatggcagcagcgacgcgcacagccgtgctgcgctccagggcgtgccggaagttctgccccaagttatcgcggcattgggcctggatgcttcgcaccaatacagcgttccccaggcgcgataactatgccagaggtttttaacatattacaattgtttttcgccccagcgaaaaaatgttggaaagcactcctgcccccttgcgcccggcgagaaagtatgctaaaatacagtccgcagtgcaggtgtacatatgtcagaaatatgaattcgaacatatgtttaaaattttaatccacaatatgatgtgttgacattttcctccatacactatataatgtatacatcataaaaaggcgggtgccaaacccgccttttgcctggaggtaagcatgatcgacacgattatcaagcgcgacggacgggaattgccttttgacgaggacaaaatcacccaggccattctaaaagctttccacgccagcggcagcgccaaatcggaaaagacggcggaaaggctcgcggaccaagtcgtcgcagaactggaaaaaagcgaatccatcgaagtgcccacagttgaacaggtgcaggacacggttgaaaaaattttgattgaaaacggctttgtacgcactgccaaaagctatattctctatcgcgccgaacgcagccgcgtgcgcgaagtcaacacgcgcttgatgcaaatttatgaagacatcaccttcagcgctgccaaaaattctgacctcaagcgcgaaaacgccaacattgacggcgacaccgccatgggcgccatgctaaagtacggttcggaaggcgcaaagcaatttaaccttttgcgcgtgatcaagcccgaacacgcccaggcgcaccgcgatggcgatatccacatccacgatatggatttcctcaccctcaccacgacctgctgccagatcgatctgctcagcctgttcaaaaacggtttctccacaggaaagggctatttgcgcgaaccgcgggacatctacagctattccgcgctcgcctgcatcgccatccaagccaaccaaaacgaccagcacggcgggcagagcatcgtgaacttcgattattccatggccgaaggcgtgcgcaagacctttgtgaagcgctacgcggacaacgtggtgcgcgcgctggaactgctttgcgggatggacaacccgcgtccaaacgtcagcgcttatctttcgttggacacgatcctgcccggcacgccgcgccccacgctggtgcaaaacgatgaattcgtcgcccgggagcgcgaaaagctggcggagctgggcgtaagcgaagcggatattgcgcgcgtgcaggcgttcgcgcacaaaaaggccgtggaagaaaccgatcgcgccacctatcaggcgatggaagcgctggtgcacaatctgaataccatgaattcccgcgcgggcgcgcaagtgccgttttcctcgctcaactacggcatggacacctcgcccgagggccgcatggccgtgcgcaacctgctgctggccaccgaaagcgggctgggccatggggaaacccccatcttccccatccagattttccgcgtgaaggaaggcgtaaatttcaaccccggcgagccgaactatgatttgttccaactggccatgcgcgtttccgccaagcggctattccccaatttctctttccaggacgcgccctataacctgcaatactacaaagagggccatccagaaaccgaaatcgcctacatgggctgccgcacgcgcgtgatcggcaacgtatacgacaaaacccgcgaaatctccaatggccgcggcaatttgagctttacctccatcaatctgccgcgcatcgccatcaaagcgaatcacaacatcgatcagttctttaccgagctggatcgtctgatcactctcgtgatcgatcaattgtttgatcgatttgaaattcaggcgcgcaagcacgtctacaattaccccttcctgatgggcgaaggcgtgtggctggatagcgaaaagctctcctggaacgacgaagtgcgcgaagtgctcaagcacggcacgctttccatcggttttatcggcctggccgaggcgctcaagtgcctgatcggcgcgcaccacggcgagagcgagcacgcgcagaatctgggcctggaaatcattgcgcacatgcgcgcccgctgcgacgaggccagccagaaaacgggcatgaacgtaacgctcctggccacgcccgcggaggggctttccggccgctttgtgcgcatcgaccgcgaaaaatacggcgtgatcgagggcgtaaccgaccgggaatattacaccaacagcttccacgtgccggtgtactaccccatcagcgcattcgacaagattcgcctggaagcgccttaccacgcgctcaccaacgcaggccacatctcttatgtggaattggacggcgacccaacggaaaacctcgaagccttcgagaaaatcctgcgctatatgaaggcttgtggcatcggctatggctccatcaaccatccggtggatcgcgacccgctgtgtggctacaacggcatcatcggcgaccactgccccaactgcggccgcggggaggacgatatgccctttgagcgcattcgccgcatcaccggctacctggtgggcacgctgaaccgttttaacgacgccaagcgcgccgaagaacacgatagggtgaaacacaacgtatgaacatgcgcattgcgggaatcgtgaacgattccatcgtggatgggccagggctgcggctggccatcttcgcacagggctgtccgcaccattgccccggttgccacaatcccgaatcgcacgattttgcgggcggttcagacatggacacggagaaaatcatcgcgcgcatggacgccaatcccctgctcgacggcatcacgctcacgggtggggagccgttcgagcagccggaagcgtgccgcattctggcggacgcggcgcacgcgcgcgggctgaatgtgtgggcttacagcggatacacgtttgaacagctgtgcgccgttcccgaaaagcgccgcctgctggaagcctgcgacgtgctggtggacggaccgtttttgctggaggagcgctcgctcgatttgcgctttcgcggctcgaaaaaccagcgcgttctcaaagtcgccgaactgttggccggcggcgagtgaccgttccccattttttgcaaaggaggcaaagcggcgtgagcattttggaaatcgataccgtttctttcgatgaagcgacgcgcgaactcgtcatcatcgatcaaacgctcctgcccggcaggctggaactgatgcgcctgagcgacgcggcgtccatccgcgaagccattcgccgcctgtgcgtgcgcggcgcgccggccatcggcgtggctgcggcgctgggcctgtacgcctgtgccgtgcgcatcgcgcccgaagcggatttcgcggcggaattcgcgcgctgcgcggagcagatcgagaccgcgcgccccacggccgtgaacctttcctgggcggtgaaacgcatgcgcaaagcggcttgcgcgccccagcccctggaggcgttgcgcgcggaagcctttgccatccgcgatgaggacatccgggtgtgccagagcattggcgaaaatggccttgccctgatccgggatggagacggcatcctcacccattgcaacgcgggccagctggcgaccgtgcgctatggcacggcgctcgcgcccatccatgtgggcgcgcggcgcggcatgcattttcgcgtgtatacggatgaaacgcggccgctcctgcagggcgcgcggctttccgcctacgaaatggtggaggcgggcatggagaccaccgtgctgtgcgacaacatggccgccagcctgatgcagtccggcgtggtgcaggcggtgttcgtcggctgcgaccgcgtggcccgaaacggcgataccgcgaacaaaattggcacgctgggcgtggccatcctggccaggcacttttccctgcccttctacgtatgcgcgcccttctccaccatcgatatggcctgccccacgggcgcggacatcgaaattgaaaaccgcgcggcggacgaagtgacggaaatgtggtacaaggagcgcatggcgccccaaggcgtaaaggtgtacaaccctgcgttcgacgtaaccccagctagcctgatcaccgcttttgtcaccgaacgcggcgtaatccgcgatcccaaagacttcgaaaaatattgggaggaaaaatatcatggataaggcggaaatggcgcaggccaactttctcaaaggatacaattgcgcgcagtccgtgctcctcgccttcgcgccggaatgcggcctttccgaggaaaccgcggccaaactcgcgtcttcctttggtggaggcgtcgcgcggctgcgcgaagtgtgcggcgcggtgagcggcatggccatggccgcgggcctgatcaggggctacgccgaccccgccgaccggcaagccaaaatcgaccattacgcgctggtgcaggccatggccgccgagttccgcgcggaattcggcaccatcctttgccgggagcttttaaaggacatcgccaccacggcgggtggggaacccgagccgcgcaccccggaatactacgaaaagcgccgccgctgcggcctgtgcatcgcccgtgcggccgccatcgcgcaaaagtacctgctcgcttccgacgggaaaaacgcataaaaattatagctttgcacgtagcgcggcggaacgcttccgccgcgccttgccaatgtcatccaaattgcaggattgccttgaattgctattgctgtgccataataatatatttggcatctctcataagcaaaatatgataaaatttaatcatcttccattcccaaatattctttagtgcgaaaacttggatagcaaatcttgcttctaatcgcgcctattaaaaacttttttgcatcgatgttttctggtattagtattttaggaacagcttgcctaagggcatcaatcagttcggattccgttaattgctctggccatatatcgtatcgcattttgtcggaatccccaatggatagtccaaacgatcctcgcaaatccgtattacatgtagtatcacatggtctgtcatttatttccctgataatatatccatactcaaaccaataataattatcgtagttcgacttcacaggttcgattataattacaatatttccacactttttttgcatatgatctctttactttttcaaaaccgaatccagaaaaacattttgcgcacgccatcgtaaactctttcttattcatataaatctccccttcaccgctactccgacgaatggtgtgcaaaattgcgaatgcttccaccgcgccttattcctttaccctgtaccaccgcgcaatcttatttccttcataggaaaagacatatttccctataagatatgtgtagtacgccgtttcgtcctccgctcgatttggatcggagaaatactcggtcattgtgcacagccattcctgagcggaaatcttgtgataaatttccagatcaatggtatgccccagtttttctccggtataccggtccacataccaatagtcctgtatcatcgcctgcaaatggctttcgtcatcatagctggcaatgaggatgtgctccggcgtcggctgttccgtaaccaagtagccatgatagccgataaacagcactacgggacccagcgcgatacgataggtagcgacattcatattcggacataaaatgcgcagcaaatgtccgtctccatcgtattcatagatatagtcgctggcgtccagcttattttcccgcaccagacgtccccttttcacattgtccgtgacggctatcctaatatccgagggataataatacccacacacgcccgtcaaatacgttcctttgctgtatttctgctgtactacttgcgtgtccgccgctttcttgagcgcgctatattccagcgaatcgcagacttcctcctcaaagcgaacgatcgcaggaatggattgtgaatttgcgttttcgcgcagccaggcgcaaaacgccgccaaggtttccgccgttaccatacccagttctcctttcgcatgctttggatgaacgctgaacttttgttcataccaatatcggcattttaccacagggtcttgccttcgtcaacccaacctcagcttgcccatagaccctgtttttgcaaaatttggggcaattgtatggcttccgcgtaaaatacacacgcacaatcgacagaagaaatttacgcgcatggctttcattttccacaggattcctgtataatagtagtatcgatacattggatagcgataaattcgatcaaaggagtgtttttcaatgattcaggcaattgtgggccgcaagggcagcggcaaaaccaagcgccttttggacatggcaaacgaggctttgaaagtggagcacggccacatcgtgtttgtggacgacgataagcgctatatgtacgacctgcggcacgaaatccgctttgtggacgccagcgaatatatgcccaaagagcaccgctctcccgatgcgctcatcgccctgctgggcggcatgctggccgcggattacgacatcacgctgatttgcgtggacgctttccatcgcctggccaacgcggattggaccaatatgcaatccctgttcgagcggctggacgctctgggaaatacgcacaactgcacattcctgctcagcctttcggcggatagcagcgaattgccggaattcattttgaaatacgcggtgtagcatcatgaaatttttgtccacacgaaattccgccgtgcgctatagcgcggcgcaggccatattgcaaggcatatcgccggatggcggcctgtttgtgccggaaacttttcctgtcctagattaccgcgcgctgcttccgctttcttatgcggagcgcgcggccaaggtcttggctgcttttatcgacgatatgagcgaagacgcgcttttgcaaatgacgcgcgcggcatacgcgcgctttggcgcgccgctcaaagatggcgtgctggagttgtatcacggccccacgttggcctttaaggatatggcgttgcaaatcctgccccacctgatgcgcgcttcctgccgtgcggtgggtgaaacgcgcgaaatcctcatcctggttgccacttccggcgatacgggcaaagcggcgctggagggttttgccgggcaaagcggcacgcgcgtgatcgtcttttatccggacggcggcgtaagcgaagcgcaaaagttgcaaatggtcacccaggaaggtgacaatgtgcgcgttgtggccgttgaggggaattttgacgacgcgcagacgggcgtaaagcgcattttcacttcgcaaacggtgcgcgaacagctcaacgcgcgcggaatcgtactctccagcgccaattccatcaaccttggccgcctgctgccgcagatcgcctattacttctccgcctatgcggacagcgttttgcagggcgttattgcgccgggcgaaccactgaacgtctgcgtgcctacggggaatttcggcaacatcctggccgccgcctatgcgcgccgcatgggactgccactgggcaggttaatttgcgcttccaaccggaaccacatcctcacggattttatccgcacggggatttacgaccggcggcgtgaattttatactacttcttcgccttcgatggatatcctgatttcttctaacctggaacgcatgctctttgagttgtcgggacgcgacgatatgtgcgtgtgcgaatggatggattccttgcgggaaaacggcatatacgccctgcacggcggcgcgctgcgcactttgcaagaagaattctttggcggctgggccagcgaaagcgctactgaggcggccatcgccaagactttccgcgaaaaagggcgcgtggtagatccgcataccgccgtggccatcagcgtactggaggattaccgcgcacaaaccggggatgagcgcccctgcgtggttgtatccaccgccagcccttacaaatttggccgcgccgtatatcgcgcgctgggcggcgatgtggccgcgctggacgatttcgcctgctgcgaggccattgcggcgctgtcgggcgaaagcatcccgcagtccatcctcgatttgccgcacaagcccatcctgcacaccgcgaaatgcgcgccgcaggatatggcgagcgttgtattgcacggataatttttcatagcactccggctttcctgagggcaagccggagtgtttttgcaaggaggataccttatggatcttctcaatcgctatatggaagacatcgaatcccgcattcagccggaggaagaacaaagcatttgggcggcgtggatggaattcgcccagggcgcatgcaaaagcggcccatttgttcctcccgcgcgcacgccacgcccttccgccatagaatggatgcccattgccatcaacgacgccattgaaaatgaagaaagcatgctgctttcccagctttcgttcctaaatgagcaattgagaacggccaatgggcttcctttgcatatccgcgcgaattatggcgtgggcaatctgcccagcatgtttggcgcggaacgctttctgatgccgccagaaaccaatacattgcccaacgtgcgccctttgcctggcggcttggcagccattgaaaagctcgtggaagcgccattgccagcgcccacagcaggcaacgggcgcgccatcgcagccattgggcagaaatttatggcgctgcgcgcgcaatatcccaaattcgcccgctatgtgatcatcgaccatccggatcttcaggggccgatggacgtatgcgagttgctggtgggcagcgacttgttttacgcgctctacgacgaacccgccctcattcacgcgctgctcgccaaaatcacggcgcaataccaacgcgccatggagttctggctttccatcgtacccaacgcgcccgaaggatatgccagctattttggcgaactgtcgctgggcaaaatcgtcctgcgcaacgacagcgccatgaacctttctccggagatgtacgaagaattcatccgtccctacgatgcgcaactgctgcggtactttggcggcggaacggtgcatttttgcgggcgcggcgagcattttatcgatgccatgagccgcattcccgatctgcacggcatcaacatgtcccagccccacctgaacgacatgggcaaaatcctttcttgcaccgtggaccgcgggattccgttgcgctgcgcaaagggcgattatgatttcagcgggcacaacgctcgcctgctctaccaattttagtgcttgtttacaacaaaccccggagttgctcccttggcaaagcaactccggggcttttttgcttttctttctatgaatgcgccagttccatgccttccctgcgcagcagcttgcgtttgatcacaagatagcaaacaaaatgcaccgccgcggtgatcacccacgaaaccggatacgaaagatacagcatgaacaacgtgtggtcggcggcgaatatcgtgtaaatccacaaaatccgcagcccgcaggcacccagcatggaaaccaccatgggcaacagcgatgtgcccatgccgcgcagcgagccgacgagcacatccatcacgccgcaaatcgcgtatgtcgtgctgacgatggacaagcgctcaatgccctgctcaatcaccgccgggtcggcggaataaatggaaaccaacgcatgcccgaacaaataggccagattgcccgtcaccaagccgacgatggataccaggatgatgcatgcaccaaggatgcggccaatcgcgtcgaacttgcgcgcacccacgttctggctcgtaaaggccaggcacgattgatagaaggtgttcatcgccgtgtacacaaagccttcgatgttagacgccgcgccgttgcccgccatggcgatggagccgaaggaattgatcgaggactgaatgagcacgttcgaaatggagaagatcgcgccctggaaaccggcgggcaggccgatgcgcgccaattctgccagcttatcgcgatagatgcgaatcttgcgccaatcgaggtgaatcacgctgctggaacggatcaagcagatcattaccagcaccatggagatggcctgggaaatgatcgtcgcccaggcgacgcccgccactcccatgtggaaaacggtgacaaagatcacattcaaaatcacgttcacgatgcccgcgatggtgaggtaatacagcggcctgcgcgtatcgcccacagcgcgcaggatggccgcgccaaagttatacagcatgttggggatcatgccggcgaaatagatgcgcacatacaccgtggcctggtccagcacatccggcggggaatccatccagatgagcagctcgcgcgcggctgtcatgccgaaaatcattacgattacgccgcacaccaggctaacgccaatggaagtgtgcaccgttttgctcacattcgccgcatcgcccgcgccataatagcgcgcgacgatcacgcttgtgcccacagacaggcccataaacacgttcacaatcaggttgatcagcgaacccgtcgagctgacggcggccagcgccgtatcgcccacgaagcgccccaccacgatgatatccgccgcattgtacaaaagctgcaggatacccgtgagcatcagaggcagagaatagcggatgatcttgggcaccagcgggccggtacacatatccatctcgtaattggcgtgtccgcgcttcaaacgcaacatgcagcaccatccctttgcgcaggaattttgccccgcggcaaaccttgcacggcaagtatatgccgcggcggagggcgaaaaccggcgcgtacctatatctcatgggcgtaaaaaagcggccatccgaccgttaacgcttagtttacatccataaaatacattttaagacacctatgtatatcgcccttttactatactctactatacaggaaaaatggaaacctgtcaagcaaatccgcgaaaattcacgaaaacgcttcatttgccgccacagaatccaccagaacccatggccgcgcgtttgccaaaccctgcccaatctgttacaatcatctttgcaccaaaatgcgaggagggatttacatgccaatcgtttgggccgaaggattgaaaaaggaatataccatcaagaccaaggcagggccgctgcgccgcaaatcggtgcgccgtgaagcgctgcgcggggtttccttttcgctggaagcgggagaactcgtgggatacatcggccccaacggcgcgggcaaatccaccaccatcaaaattctctccggcatcctcacgccggacggcggagaatgccgcgtgctgggccgcacgccctggaaagagcgcgcgcggcacgtgcgccacattggcgtggtgttcggccagcgcagccagctttggtgggatctgccagtggcggattccttcgcgctcctgcgcgacatctaccgcctttccgaagcggaataccgctgcacgctaaaggagcttacggacgcgctcgacctcgcgccactccttgccacgccggtgcgccagctttcgctggggcagcgcatgcgctgcgagctggccgcgtcgctgttgcacgagccggagcttttgttcctggacgagccgaccattggcctggacgcggccaccaagctcagcgtgcgcgatttcatcctgcgcatgaaccgcgaaaaaggcaccaccgtaatcctcaccacgcacgatatggacgatgtagaagcgctctgccgccgcgtaatggtgatcggcgaagggaggctgttgctcgatggagacgtcgccgccctgcgcggggacgatgaggaacgcattctcacctgcgaattggcctgcccggcacgcgaagcaacgctcccctatcccctgctctcgcgcgaggaggatcgcaatcgcctgaccttgcgcttcagccccgcgcgcgtacatgccgctacactgatctccgccctcaacgaatacggcctgcgcgacgttaccatcgagcacacgcccattgagcgcgtcgtcgcgcggctctacgagcggctagaaaaggcgggtgaaggcgcatgaggccctactgggcatttttccgcacgcgctttctcgcgctattgcaataccgcgcggcggccatcgcgggcattggtacgcaatggctctttggcttcgtgcgcgtgatggcgctgtgggctttttaccaatccgccggaacggcgcagcccatggccttcgagcaagctgccgcttacacctggctggggcaggccatgctgggcatgctgccctggaacatcgaacgcgaaatcggcgaatccgtgcgcacgggttcggtggcttacgagctctcccgcccgctggacctgtacgccatgtggttcgcgcgctgcatggcactgcgtagcgcgcccacgctgctgcgcgcggtgccgcaatttttgatttcgatctttctcatccccgcgccgtttggcatgcgctttggcggcccggagttcgcgggctggctggcggcgctccccggcgccctgctgctctccagcgcggtgaccgcattgatgaacgcttctctattttggacggtcacgggcgacggcgtcatccggctggggccggtgctggtgctgattttttccggcatgaccgtgccgctcaagctgctgcccgactgggcgcagacgtttcttttcttccagccttttatggggctggtggacgggcccgcgcaaattctcgcgggcagcatgccgctcgcgcgcctgcccctgctcatcgcgctgcaatggggctgggccgccgccttcatcgccgcagggcggctggttctgcgcaagggcctgacgcggctagaagtggcgggaggataaacctatgaacgcgatccgcttgtattttcgcctagtgcgcgtgtcgctgcgcacgcaaatggcctatcgcgccagcttcagcgtgcaaatgctcgccaacatcgccacgacgcttgccgacttttttgcggtgttcgcctttttccagcgcttcggagcgctggggcactggtcttttgcgcaggtagcggtgttttatggcatggcgaacgcctccctggccctttcggaattgtggttgcgcggctttgacatcttcgagcggcacgtgcaatccggggatttcgaccgctatctcattcgcccgcgtagcgcctttttgcaggtgctgggcgcagacttccagcttttgcgcctggggcgcaccggcgtgggcctggttacgagcttttggggcttgagccaactcgcgcccggttggcaggccagcgaatgggcgctgttcttcctggccattttgggcggcaatttcttttatggcggcgtggtgctggtgcgcgccatggtatccgtgtggacggtgcagtcgctggaattgttcaacatgatcacctatggcggagtggaaaccgcgcaatatccactggacatctacacgggctttttgcgccgtttcttcttcggcatcgtgccgctcgccgccacgaactactggccgctgagctatctgttccatcggccggaagcgtccgccccgctggcctggctctcgccactcatttgcctgggcgtgttcctgctgggatgggtcgcctggcacattggcgtaaagcactatcgctcgactggcagctgaggaagcggcctaccgcgccagatattcctccagcgtgaggcccaggcgcgtgatctcctccgctgccgcgcggcccacatagcggaagtgccacggctcgtaatcgatgccggtaatctcctccttgcccctggggtagcgcaggataaagccgtatttccagcaattttcgcgcaaccagatgttttccggcgtttcttcctgcgcttcttccaggcgctggttgtccagcgacacgatatccagcgccaggcccgtttcgtgctcgctgcagcccggcggcatggtggtgcgcgtggcttcgcgataagcttcatcgcgcgagtaacccgcgctcgccaggatcgccatgtcctcttccaacaggccctgctggtattcccggtcgcgataggcggaggccaccacaaagcgcaggccttcttccgtgcccgcggtcagcatggcgctcaaatcttcgtaaatgtccgcgcgcacgcggttgaggccgttgttcagccaggtaagctgcggggcatagtcctcgggcaggggattgtcccggttgaccagaatcaggaaagaatcctcgctccggccacgggatggactggcggtaggctgggaaatggccggaaaagcggcggattcgctgacggcgcggaaccccgccagcaaaagtacggcaagcaataaaaacaaacccatttttttcatcgatcagcgctccttttccgggggcgcttttgcgccccgctgtatagtatcgtacagcggggcggcatccaatctttatccattttgcatccgatttgcatcaaattgccgggagcagcgcaaacaccagcgcgccatcctgcgccttgagatgaacctcatagcggttttccgcatccacaaatacaatgggcatatcccacgcgtccagcgcgttttcccactcgcccagaatcaaaaacgcatccgacgcggactgcacggcattctccccggagaattggggcgcttccgcggaaaaagaatcccccgctatggcgtagtttgcctccccattcccatcgctttgcgcttccgccggaaaggccgccgcgtccgccgtctgcgcggagaggcccgcctggccgagcaacagcgccgcctccgtgccatccagatagcgcccgaattccagccccagcacgtcgcacgccgccgtccacaaaaattgcctcgtacccctaccgccttcgtccgcggcgatggcatccttttccgcctgcgcgagcgcgttgtacgattccaccatggagaataaccgctccgcaaaattctgcgtatccttggattcccactccgcgcgcgcgattgtgccgctctgcgcgctggcgtagatccggcaaacccgctccgcgtcgcgatacgtgaacacgtcgtattcctcctccacagcgagtccttcccattcgccgcgcaggacgccgtgctcaaccgccagcacaccatcctgccgcgcatcctgcagaatgaggagaaaaagcgcctcgaccgccgtgggaagttccggcgcattttccgcgttgccgtgcgaaagcgtcgccgcgccgccgctgcgcgcttcgtccagcaaaaacagctgcgccccttcccgccattcgcgggcgcgatagcccgtccagctgaagggttcctcatgcgcctgccgcagcagcgccccatctcccagccgcgcgagcgtatccggcaaatacaggctcaacaggacggcggaaagcgcgagaaccgcggacaggccataggcaagcgccctttgggaaaaccgccgctttatcatcttcgccttctcctcccgccctcgcccgcaaagggcacgcgcaccgtgaccgtggtgcccgcgcccagcgcgctggcaaattccatcgtgccgccatgcagcttcacgatcctgtcgcacagcgccagtcccagccccgcgccgttttgcgcgcgggagcgggatttatccaccatgtaaaacgcttccgtgattttgcccagctccgcttccggaatgccgcggccctcgtcccgcacggaaaagcaataggaatctccctccgcgcggcccagaagcgcgatcgagccgccatcctcgctggctttgcgcgcgttatcgaccaaattgatgagcagggtttggaacaggtcgggctccagcaaaagaaccgcgtcctgcacatcgagcgcgagcgccatattccgctgcgcaagcggcacctgcaccgctgcgcgcacagcctgcgccaattgcgcgctgctggtttttctgcgcaaaaaattctgacgcccggccacgatcagatccaacagcttgagggaaagcgcttccagccgctttccctcggtgaaaatataattggcggccacaaaggccttttccggtgtgagcgcctgcgcgcgcaaaagatcggcatagccaatgatggaagtgagcggcgtcttgatttcgtgggcaaaattggctacaaattcctcctgccgctgcgccgattgcgtgatcttttccacgttgccctgcacgctttgcgccatcgcgttgaagctgcccgccagcgcgctcagttcatccccacccgtttgcggcacgcgcacggcgtagtcgcccttttgcatgcgctgcgcggcaagctgcaagcggcgcacggggcgcgtaaaaagatgcgtaaacagcagcgtggccagggcggccgcagtgagaatgcaggtgttgtaaagccgggaagcggaaaactgttccgcgcgcgccgcgaaaaccgcctgcaccgaatgctccgtgagaaaggaaaaggccaccccattcgtttccagcgatgtggccacctgcactacattgccagccgcggtggagcacaattgccagcgccgcgttccttccactggcagggcgattgccggccgcatggtgctatacaacacggcgccctgcgcgtccgcgagatagaggttcgcgctggtaccttcctggatctggcgcataatggtcaggatcgtctccttctccacgctctccccttctccgagttccatggcgtacgccaggtcgaaggcctgcgcgagcagcaggttttcttccagcgcgcgccgcgtttcccgcgcgagcgacgattgaaaggacgattggatcagaaagaagctgcccaccgccaacgcgcacgcgacgagcacaaccgtggataaaagcagcttccatgaaatgcgcatttatacctccaggcgatagccaaccttgtacaccgccgtgatgcgctcgtcccagcccagctttttgcgcaggcgctgcacgtgcagatctacggtgcgcgtatcgcccatgtaattggattcccatacctgttcaaagatcgtttcccgaaacagggcgatgttcggattgcgcgcgaacaaaagcaaaagcgcgtattccttattcgtcagggaaacgggcctgccgttttgcgtgacggtgcgcgatagcgtatcgatgcacacgtccaaaatggcgatgcgctgcgcgcccttgttgtagcggcgcagcacggtttccacgcgcgccgccagttccaccatttcaaagggcttgacgatataatcgtccgccccttcccgtaggccgcgcacgcggtcgctcaccgcgccgcgcgccgtcagaaaaatcacgggcatgttcagcgggcgaatgtattccagcagttcaaagccgtccgcgcccggcagcatcacatccagcaaaatcagatcaaagcgcttttccaccagcagatccgcggcggctgcgccatcgtacacgcaggtgcattgatagccccgggcggtgaggctcatatcgatcagatccgcgatgggcttttcgtcctcaacgatcagaatcttcattttctcccctccgcccggtattctaccactcaattgcatccaagttgtatcatcgcaaaaggagcttttccatgcggaaattggtgagcgccacgccatgccgctccacgcgctgctcgcgcaccaggcgatacccgcgcccgagaaaaaagggttttgccgtgatggaagcgtccgtatatacgagcggcacggacagcgcaccttccagcgcgccctccagcgcggtcgccacgcccctgccctgaaagtctttgtgtacgtacaggcgatccagatagcccgaggaaacgtcgatatcgccaaagccgacgatttgcccttccagctgcgcgacgagcgtccggtgcgcgagaaacgaggcgttccacgcgcacagatcgaccgttcccgtggcccacgcgtcaagctgcgcgggcgcgtaatcccgggcgttcaccgcgtgtaccgtatcgtaaaacagttgggccagcgccgggcagtcctccggccggtacgcgcgcaacagcatgccgtccatcctcattcgtcaatggtggaaacgcccatggtgatttcttccagcacgtccagcagcacgcccacggtatcgagcgaagtgaagatggtgacgttgttttctacggcgaagcggcggatcaaaaaaccgtcctgacggtgggtatcgccgctggtttcgctgagcgtgttgatcacataggtcacgtgccccatcttgagcgattcctggatttcgtcgctgccctcgctgatcttctttttcacgcgggtgcggatgccgttttcgcgcaggaaacgcgcggtgcccgccgtggcctcgatgttgaagcccagctgatagaaccggcggattagcggcagggcgcgcggtttatccgcgtccgcaatggttacgaaaaccgtgccgtaattggccacgcgcatgttcgccgcctgcagcgccttgtaaagcgcgcgcgtgagcgtatcgtcatagccgatggcctcgccggtagatttcatttccggcgaaaggtaggtgtccacgccgcggatcttggcaaaggagaacaccggcgccttgacgtaccagcgttttttctccggcgcgacggcggtgccaaagccctgctgcttgagcgattgccccagcgcgaccttcgtggccatattcgccaggttcacgcccgtggacttggaaaggaagggcacggtgcgcgaggagcgcgggttcacctcgatcacgtacacccggtcgttttcatcgacgatgaactgaatgttgtacggcccgcggatgccgatgcccaaccccaggcgcacggtgtaatccagaatggtttcccgcgcgtgcgcgctcagagagaagggcgggtacacgctgatggaatcgcccgaatgcacgcccgtgcgctccacgtgctgcatgatgccggggatgtacacgtcttccccatcgcacaccgcgtccacttccagttctttgccgctgatgtagcgatcgaccagcacgggctgatcctcgctgaccagcacggcagattgcagatagtgccgcagcgcgagctcgtcatacacgatctgcatggcgcggccgcccagcacataggaagggcgcaccagcaccggatagccgatgcgagcggcggcggcgacgccatcctcgatcttcgtcaccgcgcaaccctccggctgggggatattcaggcggcgcatggtcttttcgaagctgtcgcggttctccgcgcgctcgatggcctccacgtccgtgccgatgatgggcacgcccagctgcgaaagccggcctgccagattgatggcggtctgcccgcctagcgacacgatgaccccataggggcgctccatatcgatgatgttcatcacgtcttccacggtgagcggctcgaaatagagcttatcgctgaccgtgtaatccgtggaaacggtttcggggttgttgttgatgatgatggcctcataccccgcctcgcgaatggcccagatggcgtgcacagtggaataatcgaattccacgccctgcccaatgcggatggggcccgcgcccagcaccaccaccgagggcttgtccgtcaccacggactcgttctcttcctcgtaggtggagtagaaatacggaatgtaggaatcgaactcgctggcgcaggtgtcgatcattttgtacacgggcaggatgccgttggcgcggcgcagggcgtacacttccgattcgctcatgccccaccacttgccgatgtagccgtccgaaaagcccatgcgcttggccctgcgcaacgtggccaaatcgcgcggatgggccttcacttccttctcaaaggcgatgatcgactggatcttcgtgataaagaagaaatcgatgcgggtgatgtcgcaaatcacgatgggatccacgccgcggcgcagcaattcgccgatggcgtacagccgctcgtccgtggggtttttgatttcctcaaagagcgcctcgtccgaataggtatcgaactttttcagccagatgtgcgtcaccccggattccagggagcgcacggccttgagcaggctctcctccatggtgcggccaatggccatcacctcgcccgtggccttcatctgcgtggacagttcgcgcgaagccttatcgaatttgtcaaaggggaagcgcgcgatcttacacaccacgtagtccagcgtcggctcgaagctggcgggcgtgttggcgatggggatctcgtccagcgtaaggcccacggcgatgagcgcgctcacgcgcgcgatgggatagccgctggccttgctggccagggcggacgagcgcgaaacgcgcgggttgacctcgatcacatagtagttcatggaaaacgggtcgagcgcgaactgcacgttgcagccgccttcaatcttcagcgcgcggatgaggcgcagcgccgcgtcgcgcagcatgtggtattcgcggttggtgagcgtttgcgaggggcagaccacgatggaatccccggtatgcacgcccacgggatccatgttttccatgttgcagatggccagcgcggtgtcgttgcggtcgcgcatcacttcatattcgatttctttataaccgcggatggatttctccaccagcacctgattgaccggcgaaaggcgcagcgcgttttccgcgcgcaggagcagttcttcctcatcgtccgcgaaaccgccgcccgtgccgcccagcgtgaacgcggggcgcagcaccaccgggaagccgatcctgcgggcgatggccagcgcctcttccaccgtgcccgccacgtcggaggcaatgaccggctcgccgatttccaggcacagttccttgaatttttcgcggtcttccgccttttcaatgcaatcgaagcccgtgcccaggatttcacactggcactccttcaaaacgccctttttgtgcagctgcatggccaggttcagccccgtttgcccgcccagcgtgggcaggagcgcgtccggccgctccttgcggatgatcttggccgtgtattccagcgtgagcggctccatatacaccttgtccgcgatgtgggtgtccgtcatgatggtggcggggttggaattgagcaggatcaccgtgtacccctgttccttgagcgccatgcaggcctgcgtgcccgaataatcgaattccgccgcctggccgatgacgatggggccggaaccgatgaccaggattttctgaatgtccgtgcgcttaggcatgcctgcgtccctcctccatggtggcgatgaagcggtcgaaaagataatcgctgtcctgcgggccgggcgcgctctccggatggtactgcacgctgaagacgcgcttttccgggcaggcgaggccctcgacggtctgatcgagcaaattgatgtgcgtggcgtgcagccctgtgcccgcgaggctggccggatccaccgcgaacgaatggttctgtgaggtgatctccaccttgcccgtggccaattccttcacgggatggttgccgccccggtgaccgaacttcatcttataggtctttgcgccaaaggcgagcgcgatcatctgatgtccgaggcagatgccgaaaatgggcagctgcccgcacaggcggcgcaccagttcgatcacgggcgtcacgtcctcggggtcgccggggccgttggaaaggaacagcgcgtccggcttgaagccgaggatcgtctccgccggggtatcgtagggcaccacgatgatgttgcagccttttttgttgagccgccgcacgatgttcagcttgatgccgcagtccacggccaccacgttgtagcggtaattggccgtgcgcgagaaccacacgcttttgccgctcacgcgcgcaacctggtcgtgcggcacggccgtagcgcgcagggtttccagcgcctcttcgcgcggccgctccgtcaaaatcgcgcgcatgctgccctcgtcgcgcagcatgcgggtgattgcgcgcgtgtccacgccttcgatgcccggaatgttgttctcccgcatcacatccgccagcgtgcgggtgtaacggtagttggagggcttatcgttgtattcccgcacgatgaagccgccgattttgggcacgcgggtttcgtagtcctcatcggtgaggccgtagttgccgatcagcggataggtcatattcaccatctgcgcgcaatagctggggtcggataaaatctcctggtacccaaccatggaagtgttgaacaccacttcgcacaccgcttcgcagggcgcgccgaaactccgccccgcaaattcgcgcccgttttcaaagatcagctttcgattgtccattcgcatcctcccacaagcgtcataccttcaaacggcgtacttcttccctcggcttccaccgtccacggccgcgtgtgcagcgcctggaattgcgccttcgcgccctcgcgcagcgccacattgcccatgcccaaaatgcgggcaggcgcgtcgatcatggcgcgcagcaccacgctcagcggcaaatatcgcaaactggccgcaaaggcggtggcaaagcccgaaaccccgaagagcgaaccagccagcccccggcccttttccgcgggcgtgtgcggcgcgtggtcggtggcaatggcgtcaatcgtgccgtccagcacgcccacgaccagcgcttcgcgatccgcgcgcgtgcccagtggcggattcatcttgaagcggccgctgtcctcgataatatcctcgtcgcacaggcaaagctggtgcggcgtgacctcgcacgtcaccggaaggccgcgcctcttggccgcgcgaatggcttccacgctctcccccgcggaaatgtggcacatgtgatagcgcacgcccgtcttttccaccagcgcaagatcgcgaaggagctgccgcgtttcggattcgggcggaataccgggcacgccaaagcgctgggaagccacgccctcgcgcacgctaccgcccttcggcacgaggctggcatcttccacgtgcgcggccagatagcgccccgtcctggcaatggcgcgcatggcccgctccatcagcgcgtcgtcctgcacgccgctcccatcgtcgctatagccgcacaccaggggcgcgaggccttcgatatccgccagttcgcgcccggcacggcccttggtaatcgtgccatagatgcgcgtgtccacccgcgcgccccgcgcgattgcctcaagctccacccgcgccgtctcgggcgcgtctggcgcggggttcaggttcggcatggcgcacacggtttggaaaccgctgcgtttggccagcgccgtaccggaagcgatggtttccttttcttcaaagcccggctcgcgcaaatgggcgtgcaaatcgataaagcccggcgcgaggatcaatcccgcgcagtccacgcgttcttgcccttcgcccacgatgcgaggggcaatgcggcggataattccgccttccaccaaaatgtccgcctgcctcaagcggcccgcgccggtgtacacgcggccgccagcatacacccggccgcccatcagccttccaccgcccgccgcacggccgccatgcgcacgaacacgccgttttccacttggcggaaaatgcgcgatttttcgcactccaccacttcatcggcgatttccacgccgcggttgaagggcgcggggtgcaggatgatggcgttcttcttcatccgcttcacgcgcgcggcggtgaggccataggccgcgtgatactgctccgtggtgaagcgctgccacagcgtttgcctctccttctggatgcgcagcatcatcaccacgtccgaggtggaaatcgccgtgtccacgggctcgtcgatgtacgcgggcgtgaggaaatccgacggtcccgcgatcaccacttccatgcccagccggcgcatcacctcgtaattcgtgcgcgccacgcgcgaatagcgcacatcgccgatgatggcgactttcagcccctccagcttgccgaactcctgccggatggtcaaaaggtcgagcagactctgcgtgggatggttgcccgtaccgtcgccgccgttgatgatcggcgcgcgcacgtgccccagcagcgcgcggtaatactcgttctcctggtgccggattaccagcgcgtccacgccgaagctgtcgaacgtcttcactgtatcataaaacgattcgcccttgttcatcgaagagctttccggatgaaaagaaacgacccgcattcccatccggttctgtgcaatacagaaactgtactgggtgcgagtcgacggttcaaaaaacaaattgcacgcgatttttccctctaaatggggaaaaataccgctatcccgaaaatactgggcttcttccaaaatagaaaggatttcctgcacgcccaaatcgctgagtgcaagcagatttttcggcaaaatattcaccccttcgcgattgttcaatttggtattatatcatatagaattccgctgacgcaaggggttttccaaaactctacattcggcctttttttcgcgcgccaaagaaaaattctttcaagaaaattccgaaaagctcttgccggtttgctatgagaagggtataatactactgtgaatggagggaaatgcgtgccgaagctggaaccctatcgcaaggaactttcttatagttatgcgctgggaattttcccggccatgcacctgctggaaacgcggcccgaagtggcgacgcgcctgcttttgcatcccgccggcctaaaaagcgaaggcgtaaacaagctgcgcgaaaaatgcgcggccctgggcattcgcgaggaagaggcggagcgcgtgctgcgccgcgaatccaagaaggacaactgctttgccgcgctcgtgtttgaaaaatacgaagaccctttgccgccggaaaactgcgctgtgttctgccagatttccgacgcgggcaatttgggcaccgcgctgcgcgcgctattgggatttggcctgcattccgtggcgttgatccggccctgtgtggaccgctttgatccgcacgtggtgcgcgcgtccatgggcgcgttgttccacctaaagaccgcgacattcgccacctttgcggcctatcgcgaagccaatcccgcgcaggcgctctatccctttatgctggatggagcgatccctctggcgcaagccgcggcgcaaaagcgcgaaccctatgccctgattttcggcaacgagcaagcgggcttgccaaaggaatttgccagcatcggccaaagcgtgtacatccctcaatcgaaggaagtggattccttcaatctcgccatcgcggccagcgttgccgcatatgcgtttacacagtaaggagaggaacgatatgtcttccaacattcgcgtcggcgtaatcggcgcaggcaacatatccggcgctcacctgccggttctttccgccctggacgggattgcgctcacctgcatttgcgacattcgccccgaacgcgcaaaagccgccgcagaaaaatacgggtgcgaatacacgaccgactgggaggcgctcgtcgcgcgcgaggatatcgatagcgtgcatgtccttacgccgcattacctccacgcacgcatggccattgcctgcctggaagcggggaaacacgcgctcaccgaaaagcccatggcctctgaattggccgacgcgcgccgcatgatcgccgtttcccgcgaacatccagaattgaaacttggcgtgatctttcaaaatcgctacaatcccgccacggtagaactgaaaaagatcatcgattccggcgaacaaggcgccttcctcggcgcgcgcgcggaagtgacttggcggcgcgaagccccttattaccaggaaagcggttggcgcggcgcctgggccacggaaggcggcggagcgctgatcaaccaggccatccacacgctggatctgctctcttacctgggcggccccatcgcccgcgtgaagggccatgtggacaccatcgaattgcagggcgtgattgaggtggaagacaacgcctgcgccgtcatcgaatacgcgggcgggcagcgcggcgtgctgcacgcgtccaccaattatgtgacagacgcgcccattctgctggaagttgtgctggaaaaggccacgtatcaaatcctgggcgataagctcatgcgcgtggaaaaaggcgtgcccatcgagttgcagggcggcgtcgcccccactgtgcaggccaaagcctactggggcggcgggcatgcggcgcaaatcgccgatttctacgattgcgtgcgcagcggaaaaccgctcgccatcgacgccagcgcaggctatcccgccctcaacctggtgaaggccatttacgcgtcttccgcacgcggggaatgggtcgctttgaatacactttaggagcgaaattcatgatatatgagcaaacaaaggctgcctgtttggaattgatccgcctggaacgggcggatgtgcgtcccgtgcgcctgctggtgatcggcgcttcttccagcgaagtgggcggcgggcaaattggcaaggcttcccagccgcagttggggggcgaaatcgctcgtgccgcgctggacgcggcgcgcgaatttggcgtggatgtggcattccaatgctgcgagcacttaaaccgcgcgctcgtggtggagcgccgcgtggcggaaaaatacggtttggagcccgtatgcgtggtgccctatcccaaggcgggcggctcggtagcttccgccgcgtaccgcatgatggatgagcccgtggtggtggaatccctccaggcggatgcggggatcgacatcggcgataccctgatcggcatgcacttaaagcccgtggccgtgcccgtgcgccttgccgcaaatctcgtgggcgaagcgcgcgtggtggcggcgcgcacgcgggccaaattgatcggcggagaacgcgccaaatacaatctatgatctttttgcgttcgctcgccttgcgccagcggggcggagcgggatatcccttcttgcccaagctgctcaccctggaggcaatggcttttgccgcgccggtaacggtgtttgtgggcgaaaacggcagcgggaaatccacgcttttggaggcgttggcctgtgcgctgcgcctgcccgccatcggcgcggacgatacggcgcaggacgcgacgctcgccagcgtgcgtcctctggccgacgcgttaaagcttacattttcccgcaaagcccggcacggatttttcctgcgcgcggaagattttttcggcttcacgcgccgaatttcccagatgcagcgggatctgcgcgcggagctcgctcgcgtggaggaagaataccgggatcgcagcgcgtttacccaaggccaggccaaaatggccttcgcctcttcgctggcagagctgaacgcgcgctatggcgtggatccggacgcgcgctcgcacggcgaaagttttctctcgctgttcgcctcgcgcattcagccgggcggcctttatttgctggacgagccggagtctccgctctcgcccaccagccagctcgcgctgatggccatgctgatggatcgcgaaagcgattgccagtttatcctggcgacgcattcccccattttgatggcgtatcccggcgcgcaaatttggagctttgatgcggagccgccgcaaattgtgccatacgaagatttggagaacatccaattgatgcgcgattttttgaaccaacccgatcgctatattgcgcggctgcgcaattgcgaataatgccaaaggaggattttgccatgacaaagtttaccgttggagcgcaaatgtattccgtccgtacccttttgcagaccgaagaggatatgaaagccgcgttcgcccagctcaaggccatgggatacaacgaagtgcagatgtctggctacaatttccagattccgccggagcgcattgccgcgctgctggaagaggcggggctgcactgcggcgccacgcacgtttccttcgattgga

SEQ ID NO: 25 - DNA, 4586 bp, Unknown
  16S sequences of unknown bacteria
tttttgtccccgccgtttcccgcgaggcccatcattatccaatgcgttttgggtatctcatcccccggctgcgccttacggaacgcaccgctgtgcgcggccgcaaagctgcccgcattcacgcccgccaccacggcggccaacaaagccagcgctgccagccgctcccgcagctttgggaacgagatcatccaatccagcaccacggcgatgaccatgatgacgacggtcactttaagcagcgtccccaaaacgcccagcacaaaaacagccgccagcgggccccggcccggccgcccctcccgtcgggccgcgcgcaggcgcagccagcagtacaatatggcaatgggaatgggcgcggtgacggtatccgtataatagacgggcgcatacagcaaaaacggcgctgtggccgcacccagcagcagcgccagcgcgccggcccgacggcccagcagacgcgcggcgcataggtacagaaagaacagtgcaagctgcagcagcaccgcgccgaagcgcatgccccaaaccagcagctcatactcctccgtcacaccacaggcccgcagcagacggaacaaccctgccaacagcagcatgagcggctggttgttggggaaattgttgaaataaatgccgccctgcgcaccgtctgccgcaaagtccagcgcggcgcgcagcacgatgccgaaatcccagtctccggtggcacccaccaccagcgccctgcccacacgggcctgcgccaaaaagcacagcgtgaaaaacgccgccagcagcgtccggcgcagccttttgcccggggcgggcagcaggcgcagcagccacgcggcgcacagcacgcccacagccagcgccagccccccggccagcaggctccgcgggctttgcgtgccgaacacgttctggttgcagaaaaccgcacacagcacgatgatggcgaacagcagcgcaaacgcgcctgtaaacgcccgtttgagtttttcacccgcttcgtccatggcttcctcctgctttccagcgtccctgtgggcacacgctctttcttcgaaaaaggcctttcagccttccccttccgcccgccatcccttgcagacatccacccatgcatcgaaacgggaatactgttccagctccgagatggtcagttcaatggcactgttgctgctgccgcaggcggggaacactgtttcaaaccgccgcagagaagcatccagatatatttttacgcccgggttgacagcaaaggggcatacgccgcccacagcgtggcccaccatcgcctccacttcgccgggggtgagcatctttgccttggtgtgaaactgcgccttgaagcgtggattgtccaccttggcgtcgcccgccgccaccaccagcgcacaaccgccgtccaccaggaacgacagcgtttttgcgatgcgctcgggtgcgcagcccagcgcctgcgcggccaattccaccgtggcgctggatacatcaaattcccggatgcgcgcagcggcgccgaaactttcaaaatattcccgtaccttttcaattgccacgttccctctccccttctgtgcggcagagcagatcttttccgccgcagctataaaactgaacccattgtaacaaataaccgtcagaaatgcaaaaatttgtttggtcgtcccggctgcgggcagcctgaaaaaggggtggtgactgcgcccgcaggcgcgtgccggagcggtgcgaagcctcccttgcggacaaccgcgctgaaagcgcggctcttagcgcgcagatgccccttttttatttaaaataaccccgcgacgtcccgcagggccagtgccgaggcgtgtagagcgaagcgaccgccgaaaaccgccgtgcgcagcgaacggggccaaaggccctgtccgcaggcagcttggcgggaaagcgcagctttttcgacaagccaaaaggcggcgcagcaaaactgaacagcaccccatttgttaggcagtatggtaaactactaacgaatggggtgttgttttatgccaaaaggggttcctaaatacgatggagcatttaagaaacagatagtagaggaaatgcgagagaaaggattaagctaccgagaaattgcacgacagtacgaaatcaggggagctcactctgtagcggattgggaaaggatatatcttgaagaaggtcctgatgggctgtttattgagcgccgcggcaggggaagcaaaggatggccaccgaagaagctaaagctggaggtagaagaagacctcctggcggaagtatagcggttgagggctgagaacgcatacctaaaaaattgaatgccttggttgccgagagggtacggcaagagaaaaagcaaaagtaatatgggaactgaggtatgaacacaaactgtcgctgttgccggacgtcgccggtctccctcgcagcacatactattactacaccagaaagcagaaggacccggacaaatacgcggagttaaaagaggaaatctgctctattgtgactgaacacaagggcaggtacggttaccgcagagtaacgcaggaactgcaaaaccgaggttttcatcacaaccacaagcttgtgatgaaactgatgaagaagctggggttaacaagcaaggtgcggatgaagaagtaccattcctacaagggcgaagttggaaagattgctcctaatctcttggatagggacttctatgctgagcagccagaccagaaatgggtcacagacgtgacagagttctccttgttcggcgagaagctgtacctgtctccaattctcgatctgtgcagcgaggatcttgtaagctacacgatctcggagcatccgatgctcagtatggtcacttccatgttggagaaagcttttgacacaatcccagacggtacgggactgattcttcattccgatcaaggctggcaataccagcacaagcattaccaaaagatgttggaagacaagggcgtccggcagagcatgagccggaaaggcaactgcttggacaatgccgtgatggagaacttcttcggcttgctcaaaacagaactgctttaccttcaagatttcgactccctggaacacttcaaagccgagctcattgactatctctactactacaataaccgcagaatcaagctaaagctaaagggcctgacacctgctcaacacagataccagacccttcaggtcgcttaattacatattttgtctaacttttggggggcacttcataaaagcagctcccgttttggttttctatacactcgttttttatgcagacggggctgccgcagacacgtggtccgctccctctccggacgactccccccgtaggaaacggtccagtctgtcggcctcggcggcaaaatcgcacccgatcaatgagctttgcaggccggatgagatggaccacgtctcctcgcgttcgggcactgtcatctgctgtgcctgctttcccagcagcacgggcatcttaaacaaaagctgccacagctcaccgttggtaaggttcgtttcgatgcggggcagcagcttgtttgcgatgaggtccagcttgggcaggctcagcgtggccacctggtccgccgcagcctgcacaacttcacgctggcgctccacacgctcccagtcgctgtccagcttgcgcatgcgcgcatacaccaacgcggtggggccatccagccgcgccgtgcccgccgtccatttctgctccccggcaatgccgttcatataatcggcctccgcctggctcatatccaccaccacgccgccaatgtcggtaatggcggtctcaaacagggaaaaatcgatcttcacataccggctcacatccactttgaaatactcctgcagcgttttcatcagcaggttcgcgccgccgtaggcgtaggtatgcgtcagccagtcgtcaccgcggttcggaatggaaacgcccacgccgcgctcgaaggataccagctcccatgtgttctttctgctgtccaccgaaagcatcatgatggagtccgcgcgggcgctgccgtcggcgctgttttcccgttcgtcggagccgatcagcagaacgttgatgacgccgctgttgatgttaaccccgccctccggcggcgcgatgctgccgccgttttccatcacgtcgatgccgctcagatccatgccgtcaaaggagagcactgcatctccggggtccgttccgctctggctgctgccgccctgtcccgccaaagggcgggacagcaggtccatttttccgctgatataagcggctcccgccgcgccggccaaaaatacaaccagcacgacccccgccgttaccgataagaatatcttttttctgcgtgaaaagctgtgcttcactgtaatgcctccccgcgccgggcgcgttgtttcctttgtagactgatactagcacagaaatataaaaaaattgtggaatttccggataaaatttttccgcaaggtaccgaagagctcgaaagtcctccatttgtcttttgccatttattttatattccccgcattttggattgatttcacaaatttttgttttataattaaattaatttagcgttttagcatcaatataaagg

SEQ ID NO: 26 - DNA, 2421 bp, Unknown
  16S sequences of unknown bacteria
cacttcatatcgaaattccaaatgagtatagataactgcaaataacagtttgtaggggagttctgatactcccctataaaaatggctatttatcaactgtttgttgtgacatagcctaaaagaaaaacagggacgatttttcatcgtccctgtttttttgcggcttatcgggaaagggaagggcgttgttctttctttttggccatatggcggaaaaagatcaggatcagagcaaacagcacgactccccggagaatactggtgatggaaatgctccaccagatgccattgagccccagcgctgtgcaggaaaggaccatggccagagggatacgggaagttacgagaagtgtggaggccagggaagggggcagtgtgtggccaaatccggcaaaagcaccggcggtgatgatgtccacacacatgggcatttgggagacacccaggatcaccagataatccacgcccaaaggcaagacagattcctgagggataaagatgcggaaaataggagcggcgcagaaaatcaacaaaagggaagagatgattccccagcccacaatggtgatgagactggtccaatagcctttttttgcccgctggaggttgcctgcgccatagttttgccccacaaaggagctgacagcggcagaaaagccatcggccgtcatccaggagatactttcaatctggctgcctactttttgcacggccaccgccgcatcgccccagggggcaatcaaccgggcaatgaccatggacaccagagtaaagagcatactctgcatggcagaaggcaggccgatgcgcagcagttcccgcagaaggggaagttccggccggcggcgtatctgaacatggcagaacaaatgggtgtcccgacgggcgtagagaagaaagatcacaaccaccagcatctgtgccagaacagtggcggccgcggcgccgcctacgcccatggcgggaatggggcccaggccgaagatcagcagagggtccagcacaatgttgagcaaaagccccaataccgtggcgataaacggggttttactgttgcccgtggcagtgatcagcccggtaaacaccaaaagggtcactgaggaaacaatgcccagggagactaccaccagataggtgcgggcatcccgcaccaccgtgggatcgttcaggttaaaaaagccgatcaagggtttgttgaaaaccagcataatcagggtaaaaatggtggagagcaaaagtcccaactggagggaattctgagcaaatcgcccggccaatggagcatctccagctcccaggctctgggctactttcacctggccgcccatgcgggccagcacggcaattccctgggacagccacatatacataccggccgcacccacggcagcaactgctcccggtcctacccggccaatccagatcatatcggtcatgttataggccatgttgacaagggaagtggccatgatgggcagagccagtctggtgagagaagaaagaatattcccctccagaagattcacacgctttgacatggtttcctccaaaaagtgaaatttcggtgaacactaacaatggatagtatatcctgtctgcattcttttggcaagagtggaaggaaggaggaggggggaaagggcttgcgctggcaggggaattctgatatactataccccggcatattgccaaaataaagagaaagggaatgggaaaagaaaatgaatagcatgaagctgaaaagactggctgcattgttgctggcggccggtatggttctgaccctggcaggctgtaataaggatgacgccggtaccgatgataagggtacaaacagcagccagacaggggaaaaggataccgattctaagaacgaaaacaacgaagaacagaacaacgaagaggacgacaagcaggacaccggcagcgaaaccctgacagaagaggaatacaaggccaagatcacagagatcggcaacaaggtgggcgagctgactcaggatgtcactgccgctcagagccaggccaccgaagatcctcagggtgctttggccagcctgactgagacagtcaaccagatgcggcctctgtatgaagagctggccaacctgcctgctccggaagtctttgccgaggcccaggccaagatcaaggaaggttctgaggccagcatcgagatcctggatctgactctggagatgatggaactggcttccaaccccgacaccatggaagaggctcaggaaaagatgacagagctgaccgagaagatgaattcttactccgatcaggccagcaagctcaccgaaggcctgaccgaagtgttgggttcgtaacaaaaacatacaaaaaagagccggacaatctgaactgcaccccatttgttagacagtatgatatactggataacaagtggggtgc

SEQ ID NO: 27 - DNA, 2796 bp, Unknown
  16S sequences of unknown bacteria
gctgttcgtgcgggcccatcgctttgaggtgaaccgccggttcggccgaaatctcaatgtgatcgcgctggatcagctcatcacggtctcgtattattacatggaagaattcatgcgccgtttttcgatcccgctggaaaaatgctgtgtgatcaataatttcatcgacatgaagaactatgagcggccgaagcgggaagatgcgcagttccatatcgcgctgatcggcgcgctgccgaagcgcaaaggactggcccgcgcagtcgagctgatcaagctgctgcgccgtcatgattcccgctatgtcctgcatgtgccgggaaagcggccggaggaattcgccaatacgtggaacgtccctgaggaacgcgcttattatgagcgcatctatcagcagatcaaggaggaacacctggaggatgcggtcatcttcgacggatgggtggatgtgcctgctttcctgagcaagatcggctatgtgctgtcgatgagcgatgccaagcagccggagagctttcatgtgacgccgtttgaaggtctggcatcccgcgccatggcgctggcgctgccatgggaaggcatcgaatatctgtatccgaaggcctgtgttgtcgagacggtggagcgcatggccgcacgcatcctgttctatcaggatcatctgcggcagcttcaggaagatatcgaggcatgccgggcatatgcggcggaaaactatgacattgaagtgatctggcagagcatctcgcgtctgctcagacatggaggcaatgatgaagaagtggctcattaagatcgcaaagaaaaatgcggtcctctatcggatcgccaagaagctgtatcgcagcgtgcgtccggctgcgccgacgctgtaccgcagtcaggactatttcatggtctatcagctgcatgcgctggaagagatggatgacatcctgcagcattacgcgcaggtgcggcgggacaatacccgcatcgtcgtcgtggtgcatggccatacgctggacatccatcgattgatgcgcgttcatccgggcgtgcggttcctttcgctggattattatgaacgttatcatcgaaagctcacgctgaagaacatcgtgctcatggactggcggtgcccggcggaaaaaatgctgaactacatatagatgggggcatggttatgattcaaaaagtatggcggcatctgaaacggtataatccgtattctgtctatgccgcgaaatcagagctgaagagcgaggtcagcgcgtcttatctgacctggatctggtggatcctggatccggtgctgttcatgctcgtctatgtgttcatcacggtcgtggtgttccgtacggaaggagaatatctgccggtggtggtcatcatcggactgacggtatggaacttcttcaacaagaacgtgtcgatctcggtcaagatcgtcaatacgttcaagggcatcgtctctaagatctacatacccaaatacatgctcatcttagaaaagatgtatgtgaatttcttcaagatgatgatctccttcgggatcgtggccgggttcatgatcgcgtatgggatcccgtttcgcctgcagctgctctattgcatcccgctgcttgtgctcgtcttcatcctgacgctggcctgcagcgtgatcgtggcgcatttcggcgtctatgtgaacgatctgtacaatatcgttcaggtcatcctgcggttcatgttctatctgtccggtgtcttttatgacatcggcgatcgattgggcaaccggatcttcatggggatcgacatcggctggctcatgacccatgtcaacccggtggcgtatctgatcaacgagttccgccagatcatcatttacggggaagcgctgcggccgatgatgttcctttactggctggcgttctctgtcgtgctgctgggcatcggactgtttctcatgtaccgtcatgagaacaattatgtaaaggtggtgtaagacatgaacgaacctgcgatcgaggtcaaggacgtccatgtgcgttaccgcagcatgaagtcgttctcgctgcgcaagagcctggggcagatccggcagcgccgtgacagctatgaggcgctgcgcggcgtgagcttcacggtgcccaaggggaagatcatcgggatcatcggcaagaacggaagcggaaaatccacgctgctgaagacgatcgccggcgtgttctcgccggatgagggcacgatcgataccttcggtaaccggctttcgctgctcgccatcggcatcggctttcagacgacgctgagcggctatgagaacatcttcttgtccgggctgctgctgggatttacggagaaggagatccgcgcgcggctgccggagatcatcgagttttcagagctgggcgattttatctataagccggtgcagacgtattccagcggcatgcattccaagctggcgttctctatcacggcatttctggacacagagatcatcctgatcgatgaagtgctcagcgtgggcgacatgagctttcgggagaagagctatgccaagatgaaggagatcatctcgcataaggacaagaccgtcatgatcgtctctcacagcaatgccagcatccttgagctctgtgacgatgtgctgtggatccatgatggcctggtgaaggaatatggtcctgccgcggaagtggtggaaaactatgaaggattcatgcgccgttatcggaaacggcatgaaaacgacggcaaacgatagccgggaggaagatgggatgagcgagaccacgatcctgatcgttgcgcttgcattcgggctgc

SEQ ID NO: 28 - DNA, 13340 bp, Unknown
  16S sequences of unknown bacteria
cgatgccacgacatcagaagtcaccgaagccatcacgaacctgagcaatgcgatcgccggactggaaagcatcacgttagatacgagcgcgctcgaatatgagatcgagctcgttaccgaaatgctcgctaacctcgatgactatatcgcaagcagcgtagaaggactgcaggagaagctggatgccgcgaaggaaacgctggaaaacgcgacgagccaggcagagatcgatgaagcgacgaagacgctgagagaggcacgcctgaatgcgagaacgaaggcagacgtcagcgccctggaagagctgatcgcgtatgcgaagagccttgacctgagcgcatacacgacagaaagcgcacaggctgtcattcagacccttgcgcgtgcagaacagatgaccaacgatcctgagatcacccaggaagaagtaaatgacatggtcaaggagctgcaggcatcggtagacgagctgatcgaggtcaacgagagcgcaaacgctgcagacacgacgaatacggcggcgatgaacacggtgaacatgatgtttatcctgatgctcgcagccggtgcagcggcagcaatggcataccgcagaaagagaagctgatcactcagctgatcaacggacaaagagcgaagacacagaaatgcatgccttcgcttttctattgagacagtgagatccatcatcctggtgtatgcagttctgttcacgatgatcggccgaatcatgatacgatgatatctgtgatatgtcttcatttctatattgacgttcttttgaacgagcgagtataatgctttgtgtaagcggatacatttccgaagtgtgaataggtctaagttttaagaaggagtgagatgatgaacaagaaaagcatgaaaaagctatggatgtctgcactttgtgcgggactgtgcctgggcgtgatgcctttgcaggcaaaagtgatcgagcaggaatccccgtcggatatcctgcgcccgtatacctttgggtttggcagcgcgcaggatgaggatgaaggcgcaactgccatgatcgaggaaacggggatggaacatctgacattcactgattctacaggatattccatcaattactgggcgtatatccctaaggatgaacagggcaagccgatcgagaatcttccggtgttcgtgtatatgcatggatattcagacggtggaggagataataatatcgccgtgcgttaccataacgcgatcgtattccgtctgctgcagctgcgcgacgatccggaacatcaggcggtcatcctggtgccgcagaccccgaatgcgatcaatcccgaaggggaaaccgattatttcaaggatcagtgggtcggcatccagggcgaagataaatggtcgcagtggaacattccgacctgggatatctctgagactccgcgcacagccaatctgaatgcggtcgtggaactgatcaaggccacacagaaagaaacgaatgccgatgtggaccgcgcttatgtcagcggcatctccatgggcggatgtacggtctgggatctgatttcccgcgatgattcagatctgtttgcagcggctgtgccgatttgcggcgtaggtgacccagatcagctgatgaacgccatcgatgtgccgatccggatgtatcatggcgcagtggatgatacgatcaatgtcacctcttcacgcatcatgtatgacgctatgcgcaaatatggcaacgtgacttataccgaatacagcgcagaggctcatccatcctggaactctgcatacagcccggagctggatgatgatggagacggcttgaacaatctggatgatctgatcgactggatgttcaatcagagccgcaacggcacgctggatggcagcgtcgatacagatccgctggccggagtgatctgggatgtccagcagcaagaagaagcagattacagcgaatcccgttggacgcagctgcaggcagagagccaaagagcagaaaaactgcttgatgagggagatgaggagcagctcaaagagagcatctggctgatggatgcgttgatgaatgacggcgctgctgagcagaccggtgtagagtggacgctgaatcgagccatgctgcgcgcacagcggatgctggagtgtgaatcgatgagcgataccgcatatgcggccttggatgaagtgatgaccaaggctgcgcaggcaacagaggaaaaagcgatgatccaggcttatgtacagatggaaaaagcgatgcaggatgctggagacaccagagatcaaatggaactgcagcggctgagcgaagatcttagccagcttgatctgtccgggtatgccgatgatgccgcaaaagatctgcaggacgcgctcgcacaggcacaagatgtcttacaagatgagcaggcttcatcttcagcaatcgaaagcgcttatgcaaacgtgctggacgctttgcagggtctgacagagacgagcgaaggggatgccggacaaaatgtcgatgacgcagacacagcggtagcgatcccgtttgcacagatctcaggcatgctcctgacttccgcaggcgccttatttgcactgagacgtaaaaaataatcagtttgtctgatctatgatccactgaaacagacacacggaataaacaaacgtgtttctatggaggtgggatcttttctatatggaaaaaaaaccaaaattgtctgctgaacaaaaagcagctattcgaaaccctcgtcatcttggcggagcgtcttgccgtttctgtgcaataggacctgacatcttaggtcagaattttttgacaaagaaatcaaattgatattggatcggatacttgcttttcatgcgatatccctttgacgacagaagaaaattggaaaaacagagaaaaccgttaaattgatcgattaaatggaaaacgtctatcttctttatatgcattccgctgtggatttccttcgcttctataaattctgccttgcgatagatcatagacaacggaccaaaccgtatcttttccggccgctctatcatattgacataaaaatccatgaccgccagataatagcttctttgaaaattccacatctttccgcgtgctttggtcacgaaaagcattgagcatggtctgataacgtctttcagcgaaccagtcatcaattttagggttattatagatcagcatagcgggatgatggaaaatgttggttgcacagacataagggatttcctcatttatcgaatggatgatttctgtgcgctttgcattacattctatgaccgcaatatggccgtcagcatcagctaaagtaaatgtctgcgcagatgaaatcggcaaaaagtccaagcatgagatcacatcctgtatatttttgcatttttcaagaaagtatctgagtagcagacctgcattgaatccagcgaccctgtcacacggataaacagaggtcgatcccacagccaagccatgttcattaacgccatcttccatttcgatgaaagcagtcgtgttgcccgtaaaagaataagaatccgcatcaaatctataaatgacatttagattgagcttttccatatcggtcaagaaatcgctgtttcttcctaacatgatccgatgatcatttttgatcgcaaaacacgagcaatgacaggctgggggcatcgcatacatgctgaatagaatagcttgaagcagttgaacgtcgcacttttgaccctctactatgccctgaatctcatcaaggatatctggaaaatatttttgaacgatcggaatgcacggtaaagcaaaatcgatccgctcttgtgttatttcaaaagggatgttatccaaaatgatgcttttgtgtcttaacagtagaggaccccaccgaaagccgatctcaccgtgtgttcctctgaaatgggaatgatacatttttacacgctccttatcgtcatataaagagctaccggtaactctaggtaaagagtaaatgaataaaaattttaagtcaatcactttacgaaaagttatgcggtgaaaaaatattcttggtgatcttgaaagaaatctccatcccgacagggattgtcagtgtttcagagaagaatggcaagtgcagggagaaaagaaaaaaggatcctgcagccggcaggctgttggattcccgtttttcacttttagactttatcgctttccctcaagatcgaattttgactgcctaggttataaggacaaatatctctgcatctatgacaggttatttccaaacctgctcttcttcatcatctccaaatgcaaaatcccaacaggatcgctgcttgatttctggatcttctaaagcgttcaccgggcagatatcaacacataagttgcaatgattacaaagaggttctttcagtttatccggctcaagttcctgttcgcataatactgcacctaaccagaccatgtttccaaattctggcgtgatcaacaaagaatgccgtccgatcgtccccaatcccgccgcttgagctatatgcttttgcgaaacgatagaccgccatctgccggtcttattatcccattggttttcatttgtaggaatagggacgcatactatctgatttttttccatttcaatacaaaaatccagagctatcgcatccatttttggcgtaatagaatttcttatcctcgtatagggaatatccgacttgcagttaagtattcctactgggaatctgcatccaaaagaaattaccgacctgcatgtcggaagcacatctaaaggatgatagcctttcggtgcatcgtcaaatctgtctatgcttgctatgccacacagatctgcacctagcgaaaacatgatttcctttatccttttgctgtccatcatatcatctccttttcgtagattcccattggtcttttcctcattataccttttctgacaaccattgagaagatatcttcattattcctgaccaaatatctgtattgactgaataaggaagtgaagcctggcagccggtgaaggttagcagattcttgccctttatccctttggtctggcaaaattttgtgaattcagctgaacgagtgatgacaactacgcatttattcatccggtgtgcgctttcttttaagatttctgtaatatcacggggaagatcgtccatacagatctgattgttttaaatccgtccgatcggccataatcaagccatcaagaatatgtgcaaacttgataccatatgttaagatggtgtcaaatgataacgagaggagggagtgatgtcatgatcgatttaaattcgttgaaaaaactggtcagagaaaatggttatctctatacgaaagacgtgaccgacgctaccgtatcagtatttcgattatcgcaatatggatgctgctgtcagcaggcgaatgcttgatcgcgttatcgatcaggttgatccagacctgctccaaaagcgaagcggactgcttccagccaagaaagccgcaaagaaagacccggtcatcgcgctttggatagagtaacaaaaatggcggccatatgggagatcggtcatgctggatttggagggatccggcaggcggagaggagaaaattggtttgtcctgttttctgatcgctatatgccatcttttttcaagaactgccaaacacgccggaccatcctgaatgaagatccgcccagcggcagcgattccgtttgcgcagatctcgggcatggttcggacatccgcaggcgctttgtttatatggagatgcaaaaaaataatcattttgtcgaatagatcaagatctttttattccaaagggtgaagaggtctttttgtttgatttcagactgtttgccagtacaggacagcgttgagtttaagacagaaaaagggagatcgcacaaatgaggttctccctgaatcttattcgcctgtgatcgtcgtttcatccgtaactgtcggcagattcgtcccggcgctgtcaagatctggaacgctgaacaagatcatgatcaaaagattgatcaggatgatcgatgcaagcaggatgacgatcgctttccagatccggcgcgaacggcggtttctgatcgcaagctgctcattgatcctggatagctgttctgccacattgccggccgtgttttcttttgctatgtttgtccccagcaattcgctgacggagacttccagtatttcagccagccggatcagcgtatccgcatccggaacggagaggttcttctcccatttggagatcgtctgtctgacgacatgaagcctgccggccaattcttcttgtgagaatcccttttgttttctgagggtctttagattttcgctgaacatgatgtgcaacactcctttatttgttcgggcaagccaaccatagcatgaacgctgcggtgtggcaagcaacgcagatcgacatctgcgcaactgccttctatgcgcagagcgttcagaaagaatgagatcatgtaatcgcttcaaaatgacaaaataatgcaacataatgcaaaatattaccatcgagtttgtgttaagatgatgatggaaagttttgtatttcgctggagataacgatggattctggtgaaaacaaactggaaaggaggagtcagcgaaagtaagcgtgaaacggccgcaggggagatcttctgcctgagatcatatcaaaaaggcaaagaagcaggcggcatggatcaccctgcataggagcactgaagacaaaggagggatgagctgaaaaaacgacaaaccataagcggacagaaataaagaaaagagatgaaccacagcacttaaaccacaaatcctggtgcgcgatacgaattcaaagactcatctaactaatcattattttggaataaggcgtggtaagaacctttctgaagtagtcaaagccacaaggagaaatacaaatccacattcacatatttcaatattctacaaacgaaccttaccgttttcaacccacggttataagaggttgatagaaaggaaaaggtatattgtagtgaccgctagatgagtcttttacaatataccaggagaaaaaggatgatcaagagaattatgaaaggcctgctggcagtgtgctgcgcgctgacgatggtatccatccagggtgtatatgcggctgaaggtgagcctgtaatcatcgacgatacagatgagcgtttcgtttattcagaaggagatgccaatcacggcggatggggatctgccgatggcagcgatccggcagccagtgagcactggagcaacacgcctggagcgacgctggaaatcagctttgaaggaaatgtgctggagatctatggcataaaagcaccaaaccatctgatgtttactgtttccatcgatggcggagaagctgtggaatgtgatggatacggaccttctcgtaccgatggcaatcagttgctttattccagcgaggatgctggcatagagctggagaatacggcacatacggcattgctcaccgtattggatcagtcgaatgaggcggcagtcaatgcgcagggcattagcattacttacgcgaaggtgtacggcggagaggtgagcgaaccagaagaaccggaattcccgggatacagcgatgttgatgatgctacgagcacttcttcaggtgagctgttcaagatccagtatgagcctgcggcagaatggaatgccgagtctggatatccgaacctgttcctgaatggaacggatcattacagcaccagtggcgaaggatcagaaggacagtattatacgatgaagttcatcggtaccggcattgagatctatgccagcaagaacaccgcgcatgcggattttgatgtatatatcgatgatgaattcgccggtacaggcgaagccaacctcgaatctggcaacacgcagcatcagcagctgctgttcaaggcagaggggctggacaatgcagagcatacgctcagagtggagaagacccctggcgatacggcaactaaggccatgcagatcgatatgatccgcgtctatcatgaagaaatggcgccgacgagcatcacgctggatcgcagcgaggtcacgatgatcccaggcggaagcacgacgctcaacgcttctgttgaaccttgggtagcgacaaatgatgacatcatctggaccagcagcaacgacgctgtcgtatctgtagaggatggcgtgctcaccgcagcggaagtggagaccaaggaaacggtcatcatcaccgcgatggcagccgcagatgaaagcgtctatgcgcaggcgacgatcaccgtcgatccatcattggctgtcatgaacgcgtatgtcggcaatgaaaagctgctcgacatcgcagaagactatgatgaactggcagtcggaagtgatccgacatatgaaggcaccgcatggagaggagatcagctcaactccaaggtcgtcgttgccacgatgggacgcgacgtcaccaacgtacaggtcactgcttttgatttcaccaacgaacagggtgcagtgctgtccgcggacaacttcgacatcaagtggctcaaggagatcgacgccaacatcggccgcggtaactccagcgcgccggtgaaggaattcccggacatgatccacaagggcggagcgaaggacatcgcagccaacgatgtgcagtttgcctggatcaagatcaatgtgccggaagaaacacaggcaggcacttacaccggaacgatcacggtgagcgcggatgagctgagcgagccgttcgtgctgcgctatacgatcgaagtgatcgatctggtgcagccggaagcaggcgcgacagacatccagatctggcagcacccgttctccgtagcgaactattatctggggctcggctcagagccgacgggcggtatctcctatgacctggcagaagacttctacttcacagaagaacacttcaacctgatgagagcatcgatggaagaatatgtggagatgggcggccatgacgcggtagccaatatcgtggaagaagcatggaaccaccagtcctactacagcgatccgtcaatggtgaagtggacgaagaaggcagacggcagctgggaatttgattacacctggtatgacgcatggatcgagttcatgatcgagtgcggcgtgctggatccggaaaacggcatcggacagatcaagtgctacagcatcgtgccgtggaacaaccagatcgcatattatgatgaagcaagcggagagaccgtaagagaatcacattcaccgggcagcgactcctggaaggcaatgtgggaaccgttcctggaagatttcatccagcattccaaggagaagggctggttcgagatcacctacatctcgatggatgagcgcgggctgagcgagctggagccggccgtagagatgatcgagagcgtaacggatgaagaaggcaatcacttcaagatctcatccgcactgaactatgcggcaccagaatattatgatttcaccgaccgcatcgatgatatttcgatcaacctgggcaatgcgtccaatgtgcagcagatgaaggatctcagcgaacaccgcagagaactgggactgaacacgacgttctacacctgcacaggggattacccgagcaacttcacgatcagcgacccgggcgacaactattgggacgtatggtatacgatgacgctgggcaccgatggctacatgagatgggcatgggataacttcgtctatgacatgcacggtgatatcacgtatcgatattgggaaccgggagacggctggttcttctacccgctggaaagagaagaagcagacatgagcgagacagtaggcttctacagcacaccgcgctatgagctgttcaagcagggcgtcagagacgtggccaaggcgaagtacctgctggagagcgaagacgtgagcgaagagcagaaggaagaactgaggtcagtagtagaaaacctgtccagaccgtcaggaacgacaagctatggcagccgggtaccggcaaatgaagagcagcggatgctcgtacacagtgaaacggaaagagcgcttgaggcaacgaacgccctggcaagggaagtagcgggaagcgcgagcgaagaagaaccggcaagcgaagcagcgctgcaggcactgcaggcgatggtcgaaaaggctgttgcgcttggttctgacgatgctgttctgcaggcagcgatcgaaaccgcacaggcactgttggcagatgctgagaacgccacttctactgcagttgtcagcgcactgctcaacctgagcgaagcaatggcagacctcaatacgggaggctccagcgataagctcagagaagatctgaaagcaacgatcgattatatcaacgcttatgttctgaccaatgtggacaatgtccgcccggccaaggtcacagagctgaagacagcagtcgcagaggcatatcaggtttatatgaatgaggatgcgacagcggatgagatcagaactgcgatcaggaccttgagcgaaaaagctcaggagctgtggctgatcgtatccaaggcagaactgaatgcgttgatcgaatctgcagaagcaatcagcgcagatggctacacagatctgacctatcgcgcgctgcaggcagcgatcatggcagcgaagagcgcagcggcaaatgacaacgcgacgacttctgaagtgacacaggccatcactgacctggcaagcgcgatcgcaggtctggaaacgatcacgctggacacttccgcgctcgaacacgagatcgaactggcagaatcgatcctggccaacatcgatgattatgtgccttctacggtagaaggactgcaggagaaggtcgacgcagctaaggcagcattgagcgcagcgacccaggcagagatcgatgccgcaacgaagaccttgcgtgaagcaagactgacagcacgtacaaaggcggatgtgagcgcactggaagagatcatcgcgtatgcgaacagccttgatctgagcggttacagccgtgcatccgtactggcattgaatcagacgatcgcgcagagcaagctgctgtttggcgatgaagaagtcagccaggaaacggtcaacgcggcagtcgaagatatccagaatgctatcgacgccctggaaccggcaagcgtgacgacgccagacaatggcaatagcggcacaactgcaggatcgacgaatactgcggcagcgacgcagaccggcatgatgcttgcgctgctggcagctgcgggcgcagcggcagcgatcgcataccgcagaaagagaagctgaaactgttgaacaacacaaaagcgaagacacagcgcgtgccttcgcttttacaatgccaaagtcatggcaaaagggcaaatcatgatcctgaaggatgtccgtgatgtgcttagcgtatcaagcggagatcgggtcattcctgttctgacagagaaagatatgtcgaaacacacatcagagatgccaatgatcgtcttattttgcggacagccatcaaagcgaaaagcagattggcgataagattttcttagcgtatggtttgaaaaatcgagcaatgatgacaccagcagagtttttgaatgcctaagagctgcttggcaagttgctcatcgcaggcatgatgatgaccatggcatattgtcgcaagagaacagagtaaatgacagaaaaggtggtgaggctcaaaagcatttgcttttttgacttaagcgtgtcatattatggtttagacaatgtgcggcgatcatgcggcacaaagaagcggaggcggcatatggataaatatatggtcttgaagcgtcattttggtcactctcggtttcgtcaaggacaggaacagctcatcgacgcgatcttatccgggcatgatgtcctgggcgtcatgccgaccggcggcggaaagtcggtatgttatcaggttcccgcattgatgatgccagggatgacgctggtcgtctctcctttgatctcgctgatgaaagatcaggttgcggctttgaaaagggccggtgctgccgctggattcatcaatagttccttatctggcgaacagctgaaactggtctatgagcgggcgcggcaaggtgcttatcggatcttgtacatcgcgccggagcggctggagacagaaggatttgtgacgctgacaaaaagcatgccgatatcgctggtggcagtggatgaagcgcactgcatctcgcaatggggacaggatttccggccgagctatcgaaagatctcacattttatcgagctgctgccgcgccgtccggtcgtcgcggcatttactgccacggcgacttcggaagtccgccgtgatatcatcgagcttcttcaattgaaagatccaatctgcagcatcaccggttttgaccgccccaacttgtattttgacgtccagcatccgaaaaacaagatggcgtccctgctcgcgctgatcagtgagcgtgaggacaggagcgggatcatctactgcgcgacccgcacagccgtggaaaaggtctgtcagacgctctgtcagcgcgggatcgcggccacgcgttaccacgccggtctgagcaaggaggaacggcaggaaaaccaggatgactttcagtttgaccgcagacaggtgatggtcgccaccaatgcgtttggcatgggcatcgacaagtccaatgtcagctatgtcatccactacaacatgcccaagagcctggaggcgtattatcaggaagccggcagagcaggccgggatggcacgcctgcagaatgtatcctgttgttttcgcccggcgatgtgcagacggcccggtttttgatcgaacacagcgggaatgaggaactctcagaagctgagcaggacctgatccgcaagcgggatgcagagcggctggatgagatgatcggctattgcaagacggcgcgctgtctgagaggctatatcctggattatttcggccagcggcatgaggagacctgtgaaaactgcggaaactgcaagggcagtcatcaaatgatggaggtgacggtccacgcgcagatgatcctttcctgcgtgctgcgcatcagggaaaagctgggctatgccgtgggcaagacattgctggtcaagacgctgcgcggcagcaaggatcaaaacgtgctgcgtctcggtctggaccgcatatccacctatggattgatggacaagctgtctgcggggcaggtgcgcgcacggatcgatttcctcttgctggaaggatatctgcagatcgatgcccagcatgccgtccttgagccgacgcctgccgcatcgccattgctgcgcgggcagaaaaagctcctcatgccggtccgtctggaatccaggacagctgcgcctgcacgccgtcatcgaggcagagcgtttgcggcgggaacagag

SEQ ID NO: 29 - DNA, 3677 bp, Unknown
  16S sequences of unknown bacteria
aaaatgattccgactttatttgcgccgtgcgcggcgcaaactctgcgaggctttttgaaagtgtgataaattaaaagtggctttgccgttgcaggagctggcgcatccagcgtaggtcgccggggcgcagtgcgcggcttagccagagcaggaagacgagcagtgtcaggtatccgccgccgcccagcagcacggcgggcaggcagcccaagtgacgcagcgcagtccggcaggccagggcgcacagcgcggcgcagcccagcattttcccggcaaagacccagtccggcgtttgcccggtgtgtcggagcagccgaccgatgctgaggcagaaattcacactgtgggagacggcgaaggcccaataatagccgtcgatgccccagcggggcagcagcacgagcaacagaagaatatccagccctgcagtaatgcagttgtagcagacggaggcgacctgttgacccaagcccttgagcatggcgtccacgatcgcgtccagatatagcagcaccagcagcggcgcgaacagctgcagatagtgccccgtctgggtgccgggatagagcagctctgccaggggcttggccaggcaaaaggcggccccggcgatcgtacaggcatatccggcccccagatgcaggcagcggcctgttaggtaatggacccgccgctcacttccggcggctgtacaccgggccagctccgggacaagaaggtcggagaaggcgtagagcagcgtcgctgggaacatcatcacgggaaagaccatcccgtggatcgtgccataggcggccagggcgtttccgtgggccaggccgtaggcggccaggccccggggaatgagcaggtgctccgtcgtgctcaggcttgagcgcagcaggtcgctcagccccagcggcacacagagccgcagcagcttgcgccagaggccgggcgtcttttcaagctgggccgtccgctggctgcgccggtagagcaggcctaagattaggcatagggccacatcgcccagcccgttgaccgttagcagaatgcggcagcattgtacgctgccgctggcactggacagcaggaagatattaaccccaaagagaagcacctggagcagcagctcgaccgctgtcagctgcttgatcttgacacaggcggtaaaccagccgcccagcaccgcaccgatgcacccggcaggcaaaaaggtggccaaaatacgcagcggcccggcggcctccggcgcctggagccaatggccgctgatccacggcgctgcggcaaagagcgcggccccggccaggcagctgagtgcggcgccatagcacaggcagcaggcggtgacggtccgggtggaggcatggcggccccgggcgtcggcgatcagatacatcgcgccgacccggacacctgcggtgcccagcgtcgcggcgaggatcccgacggtgccaatcagctgcactaggccgatgcctgctgcgccaatgtgcccggacagccagatctgaaacagcatcccgatggtccgcatccagatactggcgacgcttaaaaacagtgtgtgacgcaccagggtactgcgaatcggcaaacgaacaccccctgtcccagtgtatgggcagggggtgtggattagcactggggatcccggcgcggctcaaaattcgcctgtggcgtagagcagggcagacagggcgcaaagcggcgctgtctcgcagcgcagaatccgggggcccagggtgcagatctgcaggccggcctgctgggcggtttgaatctcctccgaggtaaagccgccctccgggccggtcatcaatgcagcggaggcaaaggtagcgtccccgatggcttcccggaaggtgcggcgctgttcgttttcgtaaaacagcaccggcagctctgcctgggcagcctgcgccaaagctgcgtcaaaactggccgcggctgtgacagcgggaatgcggccccggccggattgggctgcggcggaagcggcgatcttattccaacgcgccagctttttggtcagcgcgcctacgtccggcgttgagacgcagcgcttagacgggaagacgatgacctccgccgcgccgagctccgtggccttctggaccacgtgctccagtttatctgccttggcaaaggccagaaaaatccggacagcgcatttggcctccgccgcagtcggtgcgctgtgccggacaacgaggctgacctggccctggctgagatctgagatggtgcaggtatgatcagtcccgttgccgtcgcagacggtgacggtgtcgccaggtttgagccgcaggaccttggcatgggcggcgttttccccggtgagggtcaaaaacgcgggctgcagctcggcgacgggcatgaaaaatttaggcataacgattcgctcctgtttaggctgagatttgcggggcattgccactgagccggcgctccagcggcgactgcagcaggcggacaaagcgttttaccaccagccccgtcagcagggcggtgagaatggtcccctcccgggtgccgatgatctttccttggaaaaatagcagcgacaacagcagtgccagcaccacacagcagacgtcaaaggcaatcttgagatcgccaaaatttttcccgctgacgtcagagatggccgtgacaaaggcttcgccggaattcaaaatcacattggcgatgacggacagactgatgccgaagccgaggaggataatgccgcatagtaccagcagcagacgcaccggatagttgggcacggggatggcggccacacaggccatgccgaggtccgtgaaccacccgaagagcagcgagagcggcagctgcagcagctgtatcggctgaaactgcctgcgcaggatcaggatctgcccgaggatcaaaacgcaattccaaagaatcagccagatgcccagggacagggcggtgaacttgcagctcaggacattggccgtcgacgagatcggcgagacgccgagctctgcgtgttttgttacagcgacgccgaaggcggcaaagagcagactgacgatgaataaaagatagcgttttacgacttccgtgggtttcatgtgattcctgactttctaatttgcagatcaatgccgtatggttccgcggccttattatagcatatctggcttcgaatgcatagcttttaacgtgaaaagctaagacatccgggatcgtgcacgacattgctttatcgctggcgcgttgcattcaccccggcggtatgatacacctgaccgagaccactttgccgccggctgaggtcatgttcaaccccactcttggttggaatgcctttgtgatcccagtcatcgtgatcgcggggctcaccgctattttgggcgcgctcatcaaccgcagacgcaagcgcgtcgatatgctggaggcgctgaagtctgtcgattaaaaagcataggaatgccgcaccgggaaacggggcggcattggtacttttcatggcgcattttgaaaaagcgccggagggatgcaggcaagaacagaaaaaaggcgatgcagcaaatgctgcaccgccgcatactgtcaaaaaagcctcgcagagtttgcgcccgcaggcgcaaataaagtcaaaattattttctccggcggcgtgtacgtcggggaaaatacatttcgccctgcaagtgtggaatttctgcgctgaaagc

SEQ ID NO: 30 - DNA, 30123 bp, Unknown
  16S sequences of unknown bacteria
aataggcaggcgccgactcttcgccgcccctccggtttatccggagggccttttttttggctccctgattacagtcggggggccgattcctttttctgtaggctttttaggactttccagctgtttaaggaatcggaaaaccatattatgaactgttgagttcatgaataagaaaacagagatctaaattccaagaacattctataaaattgacaaaacacagaaccataatagggatagacacggtaaaacatccaattttgatttttgagacatatgaacaaagggattaacaagtctcagaatttccaaaaatcaacagcaacacacacaatatattacacaattacatgggtatatttttaacttttgaatttgtgattggctgttatacataaattaatcaaaaatacaaagcaaattttagttgacaatatctattatatgactatactgaacctatatggttcagtaatttcagtttgttctcttcgtgggaaaggagtagacatgcagatccccatatctcctgagaattatccgatattcaacagcctggcatcaccaacacggctccagatcctcaatctgctggccgaggggccgagcaatatccattccctcgcacaggctgtgggaattacgccgacgatggcagtcaaacacattcggcaattggaggcggccggcttggtcgtcagcgagacgttgccgggcaagcgggggatgcagaaactctgccgcctgaaagacacgcatctggtccttacctttactacgcgggaggagtcggccaactgctgctcctattcaatgccggtagggatgtacgttgactgtgatgtcaaagcgccttgcggactggccaccacctcatcgattatccgcctggccgatgatccggccttttttatggcgccggaacatgccgatgcggcgttggtctggttctcggaagggtggatcgaatacgcattgccgaactatctgtccgaaaatatgcggctcaggcagcttcgcctgagttttgagatctgttccgaggccaagggattccgggaggactggccttccgacatccatttcacgatcaatcagaaatttatcggcttttggcgctctcctggggatttcggggctgtgcggggggcctttacccccaaatggtggaactttggcacccaatatggaatacgcaagactatcacagtcaacgaacggggaacctttatagatgggttgccggccggagagccgggctgtaccctggcggatttcgcattcgaacccaaaaagcctatccgcttccggatcgcctcaccgcccgaggccaggcatccgggaggagtcaacctgttcggcaagggattcggtaactacgaccaagatatcctggtctatctcgattatgagacggagtaaaaaccgccggtaggtccggcgccgatatagtgcaaatgggttagtgggaaaggagccgagaacatgagcaaaaaacagggacgaaacgtcaagcgggcggtacgctacggcctgtccgtgctatgctgtgcggccatggtgtgcgggctgccggtatctgcgggaatcaacccgcagatcagcgacaggcagccggtgcagaagaacgggcagttcgaggggcaggtagagtggatccggaagacgctgagggagggggatgcccagcgggtctatcagggagagacgttatcaaacgtcaatttccccctggcggggatggggaccggcatcgtgtatttcaacggcaacctggtgccttatgcctgggacgtcgggcagttggagtccgagagcctgatgtcggagaatagcctgtttgccgtatttaccgaaatggagggcgaaacggacagccggatcctgcgcaacaatattccgctcaataaccgcaacgccttcaaggacatgccggcgaattccaccgtcaagggcggacagagcaagcagggcacctattttatcaattccagcctggttgcgccaggctacacctcgtataatgattccctcaaaggggaaatgcgcagcgggagctttcgacttccggcggaggcgacggcgctggcggcactcgtgggaggaggaaatgacgacacgatcgaatacctcggcctggccgatgcgcaaaccggtgaggtgctggttaaactgaccggtgacagaaatgaggtcatgacccaaaagagcaccccgatcccagccgcggcctatgaccgggatctggtggtgaccattaccgacatgggctcgaccggctggggtcatatcaacgtcgacgacatccggttcgaaaacgaggcgggcgaacgggtgccggtagacgggtttgtcaatggggactttgaaaatcagatggagggctggcacatcgtgggccatgaatccaatccctatggcctgccgctctgtacggcggatgaggtccgtgccgttatggaatacccgttcggctattatgacttcgataccgcgttgccggtggatgtccagctgcagatgttcagccccatggtccccctcaatgaacgggattccgtgattcccgcaggggtctttcagatcgtgctgaccaacacctcgagtaaagaggtgaccgcctcggtcctttccaccctggccaacggactggagggggaccgttccaaccgggtggtgacggatgcgtccggcacctatatcctgctggaaaacgatcgggaggatgttagcctcggcaacggcagcctcgcgctctggtctccttcgggcgatgcgggatataccgcgggagggcagacagtccgggcgctcttcgaccagatggaggcggatggtgagctcgacggcaaacagacggcagccggcaccgatgcggtggccggcctgagcgagagcgtccggcttcagccgggggaaaccaaggtcgtgcgtttcgcctatacatggtatttccctcatttcttcgccgacaatctgtggggcaaggaccacaccgatatcgggcggcgctacgcggccttttatgagaatgtagaggacgtggtggccgacctcgccgcccgttatgaggagctgcacagtaacaccaaggcctatcatgacagcttgtacgacacctctctgccgtattatctcgtcgacgcggcggcgtccacgatggatgtgctgcgttctcccactttctacattgccaaggacgggacgccttatggctgggagggcagcgacggccgtctgggagaaggcaactgcgagggcaactgccagcatgtctggagctatgcggagggcttttttgatctatatcccgaaattgctgcccgctggaagaaacaggattttacggcgcagcagcagccgggcggactgctctacaaccggctgggaaatatcccggccgacactaccggaaccttcccagccatggatgggatgttcgcgagcgtgatgctggcgtatcggctcaatcagaatatgcccgataccgcctggattgcctcgatctggccgaacatcgaaaagatgatggaggcctgtatccggaattacgatcccaaccaggacggcgtctgcgaaaaggcctcggtccggatgacctatgaccgggcgatggacggcacgacggtgcgcatcggagcgatgtatctcggtgccttgaaggcggcggagcggatcgcgtgcctgctcggcgacacccaggcggcggagcgctatgccggtatttacgataaaggggctcctgccctggacgctgccacctggaacggggaatattatgagcagatcggcggcgggacgggggtcagcgacgcccgtaccaccaacgaggggatcctgaccgataccctcctcggccagacccatatgtatctgtacgggctcggtgattccctggacacgtcgcatatgcggtcccagaccaacgccgcgttcaagtacaacttcttttacccggtcgggagccggtatcgggcgcagggcaacaaccttgaccgcgtgtacgctaaggcggatgatccggccaccctggtctgtacctggcccaagggcggcagcgggaccctgatgtaccaaggggaagcctggtccggcgctgaatacagcaatgccatcaacctgctttatgccggcaatatcgataaagccctcgccacggtgtgggcggtccgttcccgttatgacggcaaggatttcgatcccctcaacgagcgggagctcggcagctattacgcccggtcgatgatggcttacggccttttggaggcggcgagcggcattgaaaaagacagacaggccggcttgctcggcttccagcccaacatcgattctgaggatttccgcggcttttatgcgagtggggacagcttcggcactgccacccagaagcgtacagtggacggcaccagcttccggcagaccaacaccgtcgaggtccgttacggcaaactcgggctcaagacattccggatgtatctgccggaggagcttgcggaatccgccgatgggctggagttaaaagtcgctgttgacggcagagcggtcggcgcctcttggaagcgggaggggagctgcgtatcggtttcctttgaagaaggtacggaggtggaaacgggaagcgtggtttcctgcgcggtgacggctcaaatttcccgcatcttcaccttcgacgagacgtttgcatacggagatcagaccgcttgggatacgataagcgggctggccgtcatcaatgataccggcctggtgacaagcaaagaggacggccggaccctgctggcccggcggtatctccagctccacgagcagaagaccacccttgaggcggagcttgcggaaaatgcgtcggcgggctggatctggggcgccgcagaggacggcaccggcggatatgccctgaccctggacggcagcggcgcggtgacgctggaaaaggacggccggaccgtcgggacagcggccgccgccctcacggaaggttcgcaaaccctggtgatcctggtggaagaggggacgattacggtatccctcaacggcagaaaggtgctctctgccgcggacactatgacaaaagccggtacggccgctttggtcatggaaggcgacgccaaggtcggcggcgtgcgggtacaaaggccgggggacgaggatgtgccgggcggcagcggttccggcggctcttcggatatcgagaatcccaacacgtcggccaggctcccgctgtatgtgactctggttctggcggctgcggggtcggccggggtgatcgggctggctgcatacaaggccatgcggcggaaacggcgcggctaattcccatcgctctctcttcattttgggcacacgggacaggcggaagccggtcccgtgtgcctgctttataccccgaaaagtatttgcgggacggcgaagagcgggaattgacgcagcagcgaaaaagcggtatagttatgctatgggcggaagagggcttttccgccgaaatttgacgttggaaacgaggggccgttcatgaacctgcttgtacaaaccgaccggattttggccaattaccgtattctcaacaaacaggcgggcgggacgccgcttatccctgtgctggaggccaacgcctatgggctgggcgacgtagcggtggcgaaactgctcgccggcgagggcgtgcggctgatggcggtttcccggctggacgaagccgtccgggtttcggaggctgtccggggcgtggacgtgatgctcctgacgccgtatgccaatgaggaggacatcgccaccatcctgcagcacgatatcatcggggccgtcggctccaacgacagcgccgtgctttacagctccctgagccgcaagctccgtacccgggcccgggtgcagctgtgctttgactttggtaccgggcggttcgggttcgagccgcaggaggcagccaaggccgcgcagaccattaagcatctggaaaacgtggaactcaccggcgtgttcaccattttgccgtcgggcgcgaagcccaaggcaaaggtccaggagcagcagcttaaggatttccagaaggtgattaccgccattgagcgggagggacttcagcccggcatcacccatatggcggatacggcccaggcggccctctgcccgcggatgcggctgggcgccgtgcgcaccggcgcggacctgctcgggcgggggccgcagggggaccggcacaatctgcgtccggtcggccgctgtgtgtccgaggtgtgtgacatcaaatggttggccgccggcagcacggtcggggtggacggacgccgcaagatccgaaaggccacccgggtggcgatcgttccggcgggattgtgtgacggcctgtttgtctcgccgccggacaagcggggctttttcttccggaaaaaagaggtctgtgaaatcaacggcaagcgcctcaatgtgatcgggcgggcggggctgaccgccctgacggtggatgtgaccacggcggaatgtgcgccgggggacatcgtctcctttgatgcgaacccgctgcatgtcagcgccctgacccggcgtgattatgtctgagccggagatggtcccgcttctcgacgcgctgaggcggcatgccgcccgtgggacggcctctttccatacgcccgggcacaaggggcgcctggagcccggctgtgcggcggcgttcgacctgaccgagctgcccgataccggcagcctgtacgacggtggggctgcgatcgaagcgtcggagcgcctttgcgccgaggccttcggagcgggcgattccttctacagcgcgggagggtgcaccctgtgtatccagaccatgctgcttctcgcctgcggcggggcaggcggacggatcctgatggcgcgcaacgcccatcgcagtgcggtgaataccgctgttttgctggggctggagccggtctggctgtggccggaatttggcgacggccttggctgccggctggcagtggaaaacttggacgaaaagttgaaaacaaacaacgatatacgtgccgtatatattacaagcccggattacaccgggcggctggccgatgttgctgggatggcggccctctgccacggccggggcatcccgcttctggtggataacgcgcacggcagccatcttggggcgttcggcctccatcctttgatgctcggcgcggatatgacggcggattcctggcacaagaccctgccggtgctcaccggcggggcggtgctgcatctctccggcggatggagggggcaaacggaggcccccctgctccgccgccgggccaagacggtgatggcgctgttcggctctacgtcgccctcctttccggttctcgcctctatcgatcaggcgcaggcttggtggcggcgggaagggccggacgcctatcggactacggcacagcggctctcggctctccgccgcaccgcggaggccgcgggtttcctggcaccgggcggggacggcttcgacccggcccgcctgaccctgggtaccgtgggactcgggctctcaggtatccgggcggcggaggcgttccggcgctgcggatgcgaaccggaacacgcggacgcccgcatggtggtgtttatcgtgacccctttcaatacggaggaggatatccggcggctggacaaagcgatccggcgggttccggagctgtgtattcgggaaacggatccggaggtgtttgacccgtttggatgcggcatcccggcaaaacggatgcggttgcggcaggcggcgctgatggaaaccgacgagatcccgtctggagaagccgccggccggatcgcggcccggagcatctgcccctgcccgcccggcattgcggcggtggttccgggggaggagatcgggccggagctggcccgacgactgccgggctggggcatccccaccgtcacggtggtgcgggaaaccggatgacggccaggggaaccggttggcccggatggaatgcaggatggacgccgcatttgaatcgtatttgtacagggggaaggccatatggaaatcgaacgcaagtaccggatcgaccgtttcccgggtgaggaggaaggctggccgctcgtgaaggaagcggtggtttgtcagggctacctcgccacgtcgccgacggtgcggatccgggcggcggaggcccgtcgcccggagaggagaaccacgtacacccttaccttcaagggggagggaaccctggtgcggcaggaaatcgaactgccgctcgaggaggcgacctttttgcagcttcgggagctcctgcccgcccctatgatccgtaaggactaccgcgtctacgccctgcccgacggccaccggctggagtgcagcctggtggatggggaggaaccgggcgggttctattacgcggaggtggaattcgggtcggtggaggaatcggaggcgtttgtccctcccgcgtttctcggcccggaggtgacggaggatccgtctttccacatgagtgaatattggcagacaaaaattcaacgtataaaacaggtgtgacagtatgaccgcccacccccgaggccgccgcccttatgtataatgttgcgcatcccggccgtgaaaaacgccgactgtgccgccgcacagctcatcggatgacaggaggagacctatgaagaaatgccgttgtccctggtgcgggacggaatgcatccccgcgatcgacaaggtgttccagaggcgccgctggcaaggagatgccggcgtttgtcccgcctgtcaccgttcctactgctccaaacagaaggagagtgccttcccgatcctttacgtcttggccgttctcctgctgtgtgttcctgccttcctgacgcgggagccgctgtggctgatggcgatgggggctggcgtcgtttccatccctttcgctgttttgctgtacgggctgcctcgcgctgtgctggtgcggtatgaaaacggcgtggaattgccagtggattcctattttcgggcggatttggccccgctgccggacagggaacgggtcccacggctgctggacggcgacgtattggctttgtgttttgacccttccggcagacagccggactccgccgtctacccttgtatcctccaggagatccgtgccgggaagaatgggaacagcggagcgggaatcgcgttcctccagataaaggacatccctccccgattcctctgcgtggggcagggctttaccctcatccggcaaggcaacccggtcgcgcgggggacctttgtacgacggctggacgaacaggagtagcgcccaggaccccgaatataagaaaccggcgtccgctcgaacggacgccggtttctttatgttcggggcttaatgtcaaagcgtcacgatcatgccgtcgtaggccacctcgaagccgtccttggcggctttggcctcgagctcctcgtgcaagtcgccacagttgtgggaaaaatggttgagaaccagccgggtatccggacggatgcacccctctgcccggaggcgggcggctacctgacggcattccggcattcccatatggccgtaaaagccgcctgaaccgctgccattgcagcagtcaaaggagacaaaatccaagctttttccctgcaggaagggataatcctcttccgggaacaagccggtgtcgtgagcgtaaaggatacggcgggatccatcttcgacgaggaagatgcaggcgttttcccctttggcgtggctggcgggcagaggggtgaacaccaggccgttcggaagccggagcggttcaaagtaggtcagcggtgaaaaatcgagataagggcgggtgtccatcccagcctttttgagcgaccgctcgacaccgtcgttgccgtgtacccgcaagggcggcgcgtcctcgccgaggtggcagaacaggccgttttgacgcatggacagttcatccacgtcgaagtggtcctcatgggaatgggtcacaaccaaatcggtgaccgacccgaggtccaggccgaattcgagagagagagcgtaaatatcgggtgggaaatcgatcagggtggtgtcgttgaccaccatgccggagcggcggcggatgtttttaccgccgagtttccgagccttctgacaagtttcgcagtgacagaagacgccagggaaagcctccgcagcggccgtgccgagatattgcagtttcaaccggatcaaacccctttccttgcgttgtctccattgtaaggagaatgtacgggaaatgcaagaggaaatgaaaaaaatcccgggaaacggtttcaaccgttcccgggatagcgtatgtgagaatcgatatgcggccctggcgatacgttctgtcagcggattgctgccgcagtggagaccggagccttgccatctgaaaaaaggcgctcgaggcggaggcgcagccggctgcggaagaagagccagtagaggggcagctccaaaagcagcgccgcggcgacatcgaggatcgaatgctgtttaatcagcatcgtcgaggcgcagaccaacaccgtggcaaccaaggacgcggccttgattccccgccggttttggaggcggcggctgtggcagatccccgcgtgtacggccagctggtttaagacatggatactcgggcagcagttggtgttggtatcgttggcataaatgacgtcccggatgaacacgctgaaggggtcggtgccggtcacggccggccggagcggctgtccatggggaaacaccgcgtagatcagcagggcgatcgccataccggcacatagcagaaaaattgtaggaacaaaggtctctttatcccacagacacaggaaaacgagccctactccgacatacagaaaccaaaatacatatggtacaacaaacacaggaataaacggtatgtattggtcaagcgaacattccacccagaaacgcgggaccaccgtctgttccaacacattgaacagctgtacgatcaataaaaatatcaaaaacagggcggcatgccgataggcatacagccgggacgtcaggcgattggggcgctgcagaggacgttgcatgatgagatctcctaattctctggattggccggggaaaatcccaccttggcctactatcgtcattatacgcaggcatgggggcaaaaacaagcccttcaacgggatcttcgccgtatcttaagccaatcttcacttttgaggaaaacccaggaaaccggccagcggcgccacctcacaagcaccgtcatggccggcgggcggacagttcccggtaattccctaaaaatgtaaagaccggcatgtcttccgataaggcgcaaagcaggtccactgtagcggcacggccgagattcccctcaaaatccagataaaaagcatattcaaattccccatttttcaccgggcggctttccagcttggtgaggttgagcccctgcatggcaaaacgggcaagggtccggtagagagacccggttatatggggaagcgtgaaaatgaggctgatgcggtccgcgtcggggggcagggtcaggcgggaggagatggctagaaaacgggtggtgttttcggacacgttttgtatattttcatccaatatatccaaattgtataattcccccgccacacgggatgcgacggcccccatatggggatcgccggcggcggccaccatttcggcggcagcggcggtattgctgtatgggcggacctccaggccccgggcggccaaataggccgagcactgggacagggcctgcggatgggaataaaccgtccgcagggcggcaggatccgcgccccggacgccgagcaggcaatgctgaaccggcagctcggctgccgcggcgatggagaactgtgactgcatcatcaaatcgtagacttcatgaaccgagccggtggaggagttttccaccggaaccaccccataatcggcggatccctcttccacagcggcgaacacctctgcaaaggatgagacgaaccgcggcagcggcccgcctgggaagagacggcaggcggcttcgtgagcataggcgcccgcccggccggaacaggccacccgggcctcggcgggggggatcagcgcgtttgaagcggatgccaggcggtcccgcagaggctgtcctcccgccatccggcggtgctggaggccgcgggagacatccatgacggcggaaaaaatcagggcggcggcatcgccatattcactgccggcgttttggcgtatccggtcgaggatctcctgctcccggccaatattcagtaccggcaggccgttggcgagcttgtaggcggccacctctttggagcaatccatccgccggaggagcaggccgagcagctcctggtcgatctgatcgatgtcctgccggatggcggacagggtgcgtgcgggaggggtagagggcatcaaaaacatcctttccttggggttcaggcgtcgggggtaggattcccctcagcttccagaagcaggtcgaacagtccgaaggccagggcggcttccacgaccgggagtgcccgcggtacgatgcaaggatcatgccggccccggacggtcaggagttcgtcccggccggtctcgaggttgaccgtccgctgcggaatgccgatcgaggcggtcggcttgaccgccacccgcagcagcaggggcatgccgttggtgattcccccaaggagtccgccgttgtgattggaggtggtttcaatgccgccgtcgggcgtataccggtaggggtcatttgcctcgctgccccgcatccccgcgaaggcgaagccgtcgccgaattccacgcctttgacggctgggatcccgaacagcagggaggcgaggcggttttccaccccgtcgaacatgggagagccgagtccggcgggcaaccctaccgccgcggcctctacaattccccctacactgtccgctgccatccgggcagcctccaccgccgagcgcatgaagggctctaccccgggatccaatagggaaaacgggacacgggagagggcctccaactgctctgcggacaccgccacagggtcgaaccggcggtcctccactcctccgatggcggcgatatgcccgcccaccgccacgccccggcggcggaggagctgcttgcatagggctcccgcaaaaaccaggggtgcggtcagacgcccgctgaaatggccgcctccacgcacatcgccgaacccatgatatcggacatagccgggataatcggcgtgtcccggacgaggcaggatctgcagctcccggtaatcccccgagcgctggttttcattttcgatgaggatggccagaggggccccggtggtgcgggctgtcccgtccttttccaaaaacccggacagcaggcgggggctgtcgctttccacccgtctggtcgcagtggcgtcccggccgggcgcacggcgggccatctgcacccggatctcctccagatcgaaggcctctccagcgggcaggccgtcgatcacgcagccgatggctgggccgtggctctccccgaagatggagaggcgcagacaggtaccgttagtcgacgacatggacatctcctccaattcgctgataatccgcaaaaaacgacggccagcttttctgtacgctctcggcgcttgtgatttcgacaggttcctcgcacatcagggcggccaccgccatgctcatgacgatgcggtgatcctggtagccggaaacccgtccccctctcagtcgggccctgccccgcagaatcaggccgtccggccgttcctccacctgggcaccgagacggctcaggccgtccgccgtggcggccagccggtcgctctccttgagccggagacgggcggcgccggtgatatgggtttctccctcggcgacggcggcggcgacggcgaggatgggaaccaggtcgggaatctgggtggcgtcgatttccaccccgtgcaaaggggtgcggcggcaatggacgatttcttgggatatctgtatatcagcgcccatccggcggaggatcgcaagcacggcgcggtccccttggttggaatcgagctgcagccctccgatctggacttcgccccccagtgcacccgcggccaaaagaaacgccgcctgggaccaatccccttccaccgccgtctggaacgggcggtaccgctgcccgcccgggatccgccagccgtcgggaagcggctggatttcgatgccggccagggagagggcctgcagggtcatatgcacataatccgccgattccagcggcgtggacaggcgcaggtcactgtcctcctcacacaagggaagggccagcagcaagccgctgataaattggctggacacgtccccgggcaaaaggtaagttccgccggtcagccggccggacagggacaagggcaggctgccgccatccggggaaaattgcagcccggctccgtgtgaaggcaggcagtccgcatagacgccgagagggcggtcgggcaggcggccgcggccggaaaaccgggccgaaacccccaaagcggcgaaaatcggcaggaaaaaccggagggtggagccgctttccacgcagtccacctcggcgggagcgtcgggagataccccggccttcagcaccagggcgtccccgtcccaaacagagctcactccgagggcggccagggccccgagggtcgcattcaggtcgtcggacagcacggcgctttccgtctcccgcagccgggcaatgcggcaggacgcgccggtatcccggttttgcagggccgccagagcggcgcagatcagcgcccggtgccccgccgatttggaagatggagggaatgcggaccccgcgatagaggaggcgcgaacgatggcaaccgacatgccgtcacctcatttccgatagggctcggccacaaaggccggcagggaatccgcgggaatgggatggatatacccatccccgattcggtgcagcagaacaagggagagggaatccccggcacgttttttgtccagggcggcgtaggggaggtattcttcgggcggggttccgtctccgtcgggcaggccgtaccggcgcagcaatgcggcgatatccttcgccgtaccaggtgccgtcagccccttccgctcggcggcgcgggtgacgagcatcatccccgccgccaccgcccggccgtgggacaggcggaaatgggactgggcttccagggcgtggcccagggtatggccgaaattgagcaggcgccgttccccggcttcccgttcgtccgactctaccacccggcgtttgatatccaccgcccgggaaacggtttcgggaagattttcgtcagatagggcgtcctgccgcgacagccagtgaaagaaggacgcgtccttgatacaagcggccttgacgacctcggccatgccgtcggacaggatgtctgcgggcagggtggaaagagcgtcggtatcggccaggaccaggcggggcggccagaaggccccgaccaggtttttcccctgcgggatgtccacgccggttttcccccccaccgaggagtctacctgcgcgaggagggaggtgggaagactcacaaaatcgatcccccgcagccaggtggcggcggcaaagccggccatgtctcccgtcacgccgccgccaagggcggcaatcaggtcggcacgggtcagaccgtcggcggccagctgttcatagagtgcggcgatggtggacagccgtttcgactcttccccggcggggaagacgaaccgggtcacgcgatatcccgcggcggcgtagctctcagccacggtgtcggcatacaggggcgcgacgttggaatccgagaccaggagcacccgaaccccgcgatttatccggcggctgcgctccccggcctccttgagaaggccggggccgatgacgatatcgtaggggcgggaggcggcggtatggagggtgcgcataagggggccttctttctgttaaaattattccccgagagcttccttgaccaggcggccgcgccgtatgacggcggcaatttcgtcccgatcgcccgaagcgatggcagcccgggcggtttccagcctggcaatcaggccgtccagctcctcgattaggggcacctggttgagcgcgaacagctcgctccacaggatctcgtccactgccgcgacccgggagacgtcccggtaactgccggcggaatatcccttgtggccgggacagaccggggactggacataagcgcctgccagcacgtgggggagctggctggtgaaggcgatctgccggtcatgatgggcgggggtggtaatggtaaccgaggcgcagcccaaggcggccgccaaagcgcgcagggtgtccatcgcgtattcgggcgtgccctctggcggggtgaaaatgtagctggccccccggaagagattgtgggtggcgttttgccatccgccccgttcccgcccggccatgggatggccgcccacaaaaagcaggcgatgttcccggcagaggggcaggcaggcatccataacggcggacttgacaccgcagacatcggtcacgacgctgcctgggcgcaacacgtccaggatttcccgcagcaccggcccgcaggccccgggaggaagggccagaaccaccagatccgcctgggacatggcggcggtatccgccacccctttgatggcgccggtctcctgcatccaagcgacggcagcgggatccaggtcggatccaaacacacggtatccgccgtggcgggagagggccttggccatggaaccgccgatcaggcccaggccgataatcgccacgcagggacgggggtcacggggtgtgctcatcattttccctccagacaaatcgggtttgtgggacggccgctgggacgctgtggaacgaatggcatgcggtatgctcaaccatcctccggggccgcggctaaattatactcagatatacaagaaaacgacggggggattttctgtttaggaaagccggcgggcaggtggggaccgaagccggcgcttcgctgtgaaagggtcctctgtgtatggtggtcataaacctcttccatttcgtctatatcctgccgttttcctgcaagaccggctaatatccaccgggcagccgggtcttctctgtccccgtcacggggccagaggccccgcgtctccgaaggagtcgggactctggtcgacgaattcgcggggattcgcccggatatactccacgcatcggtcgagcggccgttcctcctcggccgcctccagaaaatcggcgtgcagctcggccagttcttcggcgtggccctccatgtcgctaatccgctctttcgccgtccgcagtgcggcggcgcagcggggcgctccgatgagatccagcccgtcggcggccagctcatcgaagaccgccgacgggccggcgtatagatcttcaaagctgcccttgtccagctcgttacaaatcagccagacactatagaccgccgttctgccccgcgagagcaggggaatggtatggtagggatccggacggcggcgatcctgcttttccagcaggttggccgccacggcgtcgacgagctcctcgtccggaatcccggcgagcttgtcctcgtcgagctccctgtacagacggcccagacgggcggcccggctgtccgaatccttatggcggttgccccagagatacaggccgaccagcgcggccaaaaacgccaggatcaacagataatacccgggctgtccggcgtcgaaaaagccggcggcggtaatgggattcataaacgctcctcctcttgattggaatcgggtttccgcgtcaggcggcggtagatgtcgccctttttcagcccagtccgggcggcggcctgcctggctgcatcggagggggcgagaccgtcctcctccatcaggcgcagggccatggctacggccgtctcctcgtcgggtgtctccggctcgggagggggcgccccctccaggatcaacacgaattctccccgcggcgattcggctgcgtaccgttccatcgccgctgcgagagtggtgggaaaaatctcctcgtggagcttggtcagctcccgggcgagcacgatccgccggtctccaaacgcggccagaaggtcagtcagggtggagaggagcttgtggggtgcctcgtagaaaatcatggtgcgccgttcctccgccagatcggccagatgttcccggcgggcccggcggttgacgctcaaaaacccctcgaaggtgaagcggccggtcggcagtcccgacagggccagcgctgtcagcgcggcggtcggccccggtacgcaggtcacggggatctgccgctcatggcagagcgccaccagatcctgcccgggatcggagacggcgggcatacccgcgtcggtgaccagaacggcggcctcccctgccagcaggcgggcgcagatctgttcgccccgttccctccggttgtgctcaaaatagctgacaagaggctttttaatgccgaaatgggtgagcagccggagcgtgaccctcgtatcctcggcggcgataaagtcgcaggcttccagcgcctccagtgcgcggggtgagagatcggacaggttgccgatgggggtgcctaccagggtcagggttccgggcatatagaggccctccttttgccttagtcaaacagagctggacggttccccggccgccaggaacaggggcggcaggaccgtgagaccgggattcccgttctttcgcgcctcgcagaggaacagaaacggggcggcgtctggatggtgatgggcccactgcaggcgcttcggctcgaggcgcgcctgccgccagcaggcaaagagatcggcgagccgttccggccggtggcagaagcagaaccgcccgccgtttttcaacagccgcgccgcgcagccggcaagccctgcgaagccgtccccgctttcatgccgggccaggcggcgtccggccggaacggatgtccggccgctggcgggggcgaaatacggcggattgcagaccacccgatcgaatccgcccgcctcaaatgagggcggcaggctcctccagtcgaccaggtggacccggatccgcccggcaaggccgttttcagtgaccgatcgggaggcgagcgccgccgcgtccgggctgagctccaccgcctcgaccggcggggcgtcgggagaacgggggcgggcgtaccaggaaaggggaatgatgccgcagccggtgccgaggtcacagacccgctcccgctcccgggcggatccccatccggctggacgggcgaaatccgcgagtagcagggagtccgcgccgaaggtgcagccgtcgtccacatacacgaatacgccgccgtccagcggctcggaatgcgccggcatattgtcaccctgcctttccagaaatctcggggacgcgtgccgggactgccgcgtacctccccagccatattccaaaaaattaccgggcggcaccaaatgggccgcccggtaacgctgcacctgaacttaaattgaccgttccggcgccgggccggactcagtcggcctggggagctcctacggggcaaacatccgcgcagctgccgcactccgtgcaaacatcgggattgatctcgtatttgccgtcgccttcagaaatcgcggaaacggggcactccgcctcgcaggcaccgcaagcgatgcagtcgtcgctgattttataagccatctaaaacagcacctcctttttatgttcccccttatcataccacaaaccccaaaaaaatcaactggaaaatggcgaataggcgggaaatatccgcgtcccggaatagggcgggatctgtaaaaccgttaagcagccacatggaggcaatcatccggataccggctctttacattcacgagtttactttctgacgataaatggtctgttatagccttttgcggacggcaaatccacagggttagccgctttaacggcatatggggggtgtgggcaccttgatgggatgaagcaacgaaacagtcccggccaggtttttctgccgacggagaacgacgctctgcaggacgcacaatattcacgcagaagaggaacggaacgccccggaaatcctctttaatacttgtataatgtgtgttaaatcccaagctaatatgacgcattcaaattttccctctttcgctggacaaaacatatcagaaaagcaggataaaatcaaacgctgaactctcgatacgctccggcatcttcgccctggtgtcggaaggcttacggaacagctggaacagggaaacggcgccgtttttctgcccggccggcggaacccttttacaagtttgtccccggccgcacaatctcctcttgcgcaggagtgggtatccacgctataatataaggtactttccgggcggagaacctccgcccggttcgggccccgccgtccggcggggaagatcaacggggaaagggagttcgggcggctgtggaagtgcgttggaacagtgaggcgttgggggaggtatttgtcctccccgccgctgtggtggatcggcatatccggctggcgggctccgcgcagctcaaggtgctgctgtggctgtccagggcggggggcggtgttttcgatccggaaagctgcggcaaagcgatcgggctgtcctctgcggactgtgccgacgcgctgcaatattgggtggaaaccgggatcctggtcctgtccggttcccccgctgttccggagattgcaaagcctgcccgtccggtaaaggcggctcccccgccggaaccgccgaagcctgtccgggccgcccggccccgcgcggtcaagccgcagatgcccgaggtggtggcccgccgcgaaaccagcggggagttcggctatctgctggatacggtatccgcccggttcggtcgtccgctctctccgggggacatggaaaccctgctctatctgtacgacggcgccgggctgcccgccgaggtgatcctgatggtggtcgcatatgcggcaggcgaggaaaagctcaacatccggtatatcgaaaaggtggccctggattgggcggacaaggggattgtcaccattgcggcggccgaggagcatttgtgccgccttgagcaccggcgggaggcatgggcgcgggtacagtcgttgtgcgagctggccaaagggacgacggtcggggcgatggaggctgcggccaaatggttttacgactggcggatggacgaagggctcgtccggctcgcctacgaccgctgtgtggaaaaaacggggaaattccaatataaatatatggaccggattctcgagggctggcacctcgacggcatcgacaccgccgaaaaggtcctcgccggcgaatccgccgcgaagaaaaagggccgggcgggcagggagacgtcgatggacctcgatgcgtatgaaaccatggtgatgcagtacgtgccggtttataggaaggactgagagcggtggcttacagccgggatatgtatgaggaagcgatggcggagctggaacggcgccgggcccaggcccatgccgccgccgctgcgctgagggagcgggcgacggcccggcagccgcggctgcgggagatcgaggcggcccttgccggggccgcccatcaagttgccagggcggtgctcgacggcggcgacgtggacgcggcggtggaacggatcaaagaggaaaacctgtcgctgcaggcggagatggcgtccctgctgcgggtccagggggaaacggccgtcgatttcgagccggtttatacctgtccccgctgccgcgataccggttacgccggaggaaaaatttgcggctgcctcgaacagctgctgcgggaagcggcctgccggaggctgagccgcacctccaatatgacgttgacccggtttgaggatatggacctggggtactaccccgacgaacccgacccccggactgggatttccccccgggagaggatgaggggggtgctggactactgccgatgctacgccgtggatttcgtcccgggcgcacagagcctgctgctgcggggtccgaccgggacggggaaaacccatgtctcccttgctattgcgcgcacggcggcagaaaaagggtgttcggtggtctacgggccggcgcagcagctgctgcgccagcttgaaaatgagcatttcggccggatggcgggggacagcgccgagaccttggaggcgtgcgatctcctgatcctggacgatctcggcaccgaattttccagcccattcactgtttcctgtatttacaacatcatcaatggccggatgctggcgggccggtcgaccgtggtgagcaccaatctcagccagcaggagctcctcgcccgctatggggaacagaccacctcccgcataaccgggacattccagccgctggtgttttcggggcaggatatccgccagttgaagctccaggaaaaaatccgggggaaccggtcctagcctggatggttacaaatttgtcagccttcttgacttatcacccgatatccggtacaatgcgaatgcatttggaaaggggccccagtcgatggggcaggctgcttgcgggcgccacggggatctccgggcgggccgtttccaagtaaggggttctcttccccggaaaggacatggagtgggattatggccaatctagaaaaacgatgcatggggtgcatgagtccgctgccggatgaccggcaggaatgcggggtctgcgggtacccggccggagggatcaaccccgacggctatctgcaggtgcgcaccctgctttcgggccgctaccttgtcggccgggtactggaagcgggcggcgacagcgcgctgtatgtcggctatgaccaggtgcaggaagcacccgtgtccatccgggaatttttccccgaaaccctgtgcggccggggggaaaacggccaggtgacgctgctggcgggctgtgaggtcgcgtacgacgagatgctggataaattccgcagccatgcccgggtgctggcgcgtctgcgggacttgccgactatgatcccgctgtacgatatttttgaagagaacggtacggcttataccgtcagtgaaaaggtagggggcgtgaccctggcggctcggctacgccagtccggcggccggatgagctgggacgaggcgaggccgcttttcatgccgctgttcgccgccttgtccgccgtccattcggcggggatctatcatctggggatctgcccggagaatatcctgctgggttctgatggccgcccgcatttccagaattttctggtacccgaggcacatatggtcgggacggacctcaaaccgcagctgatggcgggatacgcggctccggagcagtatgagctcgagcagcgctacaccgccgcaaccgacgtatacgggatggcggcgacgatttttgccgtgctgaccggcagcccgccggccgacggcgcggcgagggcgcgggagtcggcggatctgctgatgccggccgacgtggcgaaagagcttccgcctcatgtcaagaccgcgctgttccatgccctgcaggtcagtccggacaaacggattccgaccgttgaccagctgcgggaacgcctgtccgcagcgccgtcggtaacggcgctgctgcgggaggaaccgaaagaggaaaaacagccggtgccggaaccggaaaaagagcccgaaaagccaaaaaaacacagccgcctgaaaatcggcctgttgattttcctggccgtgttcatcgtgctcctcctgtttgccttcgggatactgcttctcctcttcccggatatgatgtccggcctgttcggcggcggagggaatgcctcaagcacccttcccatttccagcaccgctgtcatcccctccaccacgccggcgagcagccaggcgatagaagacgaccccttgagctattttgccgtaaccgacgtgatgggtaaaaattattacgacatcaaggagaacaagctcaacggcgacatgccgcttgaggtgctctataagcagtactccgacaagccggcgggtaccatcctctcccaggagccggccgcggaggaacgggccaagaaaggcacggctgtcaaggtcgtcatcagcgacgggccgcggcagcgggaggttcccgatgtgtccggctggaccgaacagcacgcaaaagcctacctggaagcgctgggctaccgggtgaaggttatctacctggaggtttcctcattcgacaagggcctggtgcaggagacgtctccggccaagggctccaaagtggaagaaggggacacgatcgatctgcgggtatccaatcaggagcaaacgccgccaccgacaagttcggacggcggcatcggctggccgtggtaaatcgccatatttgcggggattccgttctgcggaatccccgttttgccgccttggcttgttgacaggcattataaagagaggctaggcttatattataacttaaattgtaagaggagagggaaaatgcggttgatattgccgtttgagcggcgtcccccggttattgcctatcaattccatgcgtttccattcggtatcctcttcccccatccggagtatctgccggagtttctcacccagtacatcaacctgttctatgactgtgatgacccgcacggcctcgacttcgacaccggattctggtttcacgatgcggcctattttgataggcagcagctcgccgtcagtgccgatgacgggccgccgcgggccgccctgaccgggatggtcaaacaggggctcgcagagggatattatgtaaccggggacttcaacgcccggtatcagcccaaccgggaagcctatcggaagtatgaccaccggcacgatatcctgatctacggcttcgacgatatgaatggctgctttgtcggggcggggtacggcaaaagggggatatacgaggaatataccctcagctatgacgatttttatgacggcctgcgcaccctggaggggccggataaccgcctggttttcctgcgggtgaaagatggctatgtttttaccttcgattacaaccacgtgtggtggcagatcaaagcgtttcttgattcggcgggcacctatcagaaccggccggtcccatatgggctcgccgtctacggaaaactgggcgaaaaactgcgcacctttcccgacggggtgccgctccaatgtctccgtcttctctgggagcataaggaatgcatgtgcttgcgtctgcggttcatggaagagaacgggtttttgccggcccctggaccggcggatgcgtatgaagaagtaagacggatatttcagcagatatttcaactggcagtcaaatatcaggtgcagccagatgtccggatcccacagaagatactcgaatatatcgaccggggcgcggaccgagaggaacagatcctcaccgcggtgctgaccgctccctggccggacaggctgacggtccaagccgtttccggtccgcctaaaaatgcaaatggagcggccgaacgttgcttgtaattcgggacgatcggattataataaagacgggatattctgtcccgcgctgctcgggcttcggcggatcgccaaaggccggccacattcatttttaacgaaagaaacggaggaacgcggcatgctgctgaaaaacgcggtcgtctataacgaggttttcgagcctgtcaaggccaacgtcacggtggagggatcccgtatccgggccgtcgacgataccccttcggcggcggaagagctggatctgacgggcctgacggtcattcccggcctgatcgacatgcatatccacggctgtgctgggcatgatacgggagaggccacacccgaggcgcttgaggccatgtccaaatgcctggtggagcggggggtcacctccttctgcccgacgtccatgaccctgccatttgaagaactcgagcggatttttgccaatgttgccgaacagaaggataaagtgaccggcgcctacatccacggtgtgaatatggaagggccgtacatcgccatgtccaagaagggcgcacagaacggcgcttatgtccgcaacccggacaaggacgagttccggcgcctgttcgaagggtgcggcggctgcatcaaggtagtggacatcgcccctgaaactgacggagcggaggccttcgtcaaggacatcgagcccatctgcccggtttccatcgcccacaccgcggccgattatgagcaggcctgtgccgccattggctggggggtgcgccacgtcacccatctgtacaacgcccagagcggcctgacccatcgtagtccgggcgtggtgggcgctgtgttcgacaatgcccgcagccgcggcgtgcgcgccgagctgatctgcgacgggttccacatccatcccgccgccctgcggattgctttccatcagcttggggaggatcagtcggtcatcatcagcgactccatgtgtgccgccggccatgtggacggagaatacgacctgggcgggcagacggtgtacgtcaaaaacgggaaggccctgcttgcagacggcaccatcgcggcctctacctccaatgtgtacgaggagctcaaaaatgtcatccggttcgggatccccatgaaacaggcgatcaagtccgccaccatcaacccggcccgggctatccgggtggatcaggaaaccggttcgattgccccgggcaaaaacgccgatctgctggtccttgacggcaatctcgacatcaagctcgttatggtgcggggcgaaatcaaggtcaaccggctgtaaacattctgtgactttcggcgggaaaccttgactttcacgggtttttgcggtatgctgattttatccaaaaaacgggaaatgccgacaattctgccgaagggagcgcaacggatatgtgtgaaaataagaataacaagtggatgtgtgtggcgattgtcgccgcggtggtcgcggcgctgaccaccgtcgccgtcttcctgctgcgcgccagggcgaagcgaaaagccctgcgtgcctacaacgacagctttgactgtgacctgggggactgctgctgcgacgattgcggctgcgcggatgaggacagcgacgccagccccaacgaatgagattggttttcctgaccgtccgtgtaatcacggacggtcctattttttcataaaatgcaggaatcggattaaaaaattgcaaaaaagagatcgctcccccttgtaaaacgtatcaaaaaccggtataataaattgttcgtccgtcgagccgtctcaggccggcggcacgttccgacaccgaaggaggaatgcagcatggtccgagccatcgtgggcgcgaactggggtgatgaggggaagggaaaaatcaccgacgtcctcgccgccgagtctgatgtagtcatccgctttcagggcggcagcaacgccggccacaccatcatcaatcagtatgggaaattcgccctgcaccagcttccgagcggcgtgttttacgaccacaccgtcaatatcatcggaaacggcgtggcgctggacatcggaaagtttctcaaggagaccgaggccctgcatgagaaagggatccggccgcgcctgatggtgtcggaacgcacacaggtggtcatgccgtatcacgtgctgttcgaccattatgaggaggaacggctgggaggaaaatccttcggttccaccaaatcggggatcgcgccgttttacgctgacaaatttgccaagaccggctttcagatctgcgagcttttcgacgaggatgccgcctatcaaaaactcaaaggggtgttggaggtcaaaaacgtcctcctcgcccacctgtatcacaagcctctgctcgacgcggacgagatgtttgccgggctgatgcggctgcgggacgggatcgccccttatgtgggcaatacatccgctttcctgcgggaggcgctccgatgggagaagaacattctgctggagggtcagctcggcgctctcaaggatccggattacggtatctacccgatggtgacctcgtcctccaccctggcgggctatggggcggtgggcgccggcctgccgccctatgccatcgaagacatcctcgtggtggtcaaggcgtattcgagcgccgtgggtgccggcgctttcgtcagcgagattttcggggatgaggcgcaggaaatgcggatccggggcggtgacgccggcgagttcggtgccaccaccggccgtccccggcggatgggatggttcgactgcgtggcatcccgttacggcgtggagacacagggggctaccagggtggctttgaccgtgatcgatgccctcgggtatctcgatgagatcccggtttgtgtgggctatgaggtggacggcaaggtcacgagggatttccccaccactcccactctgagccgggcgaagccggtgctcgaggttctgccgggctggaagcaggacgtacgggggatcacccggtatgaggatctgcccgcgaattgccgggcgtatatcgaatttatagaaaaagagctgggcgtaccggtggcgatggtttcaaacgggcccggccgggaggaactcatccggagatgagtggaaagcccctcatatggaaggacggaaacagccatgccacaggaaatgaaagaaaccgtgctggttttggatttcggcggccagtataaccagctcatcgcccggcgggtgagggagcagggagtgtattcggtggtcaagtcctaccgcacccctctcgaagagatccgtgaggccgggtataagggaatcattttcaccggcggcccaaacagcgtgtatgacgaagaatccccccgctaccaaagggaaatcctcgatctgggggtgccggtgctggggatctgctacggcgcccagctcatggcttatctgctgggcggccgtgtgaccggtgccgatgaagatccgggctgtgcgagtgaatacggcgccacccgggtcaggctcaccgacccggacagtctcctgttccggggcctggatccggaacaggattgtttcatgagccacaccgaccggatcgccgccgtgccggccggcttccacgccacggccggcacggcccattgccctgtcgcggcgatggaggacccatcgcggcggctgtacgcagtgcagttccacccggaagtcatgcatacgaaaaacggcggggagatgctgaggcggttcctgttcgaggtatgcggctgcacgggcgactggcagatggcctcctttgtagagggcgccgtcgcgaaagtgcgggcgcaggtgggggataaaaaggtcctctgtggcctgtcgggtggcgtagacagttcagttgcggcggtactcgtcgccagggcggtcgggaagcagcttacctgtatcttcgtcgatcatggcctgctccggaaaaatgaaggggaccgggtggaggagatgttcacctcccggtacgacatccagtttatccgggttgacgctgcggaccggtttttagctcgtttgaaagggattcgtgaaccggaggagaagcggaaaatcatcggggaggaattcatccgggtttttgaagaggaggccgcgaaactcggcgacgtggatttcctggttcaggggacgatctatcctgatgtgattgaaagcggcagcgataaagcggccgttattaaaagccatcataacgtggggggccttcccgagcggatgaagctggggctgtgcgagccgctgcgggacctgttcaaggatgaggtgcgccgggcagggctggagcttggcctgcccgcggacatggtgtggcgccagcccttccccggtccgggcctggcggtccggtgtatcggagaggtcacggccgcccgtctgcggatcctgcgggatgcggacgcgattttccgggaagaagtggtgcgggccggtctcgagcgggaggtacaccagtattttgcggttctgaccgatatgcggagcgtgggggttatgggagacagccgcacctatgaatataccgtcgccctgcgggcggtctctacctccgatttcatgacggccgactgggcccgcctgccttatgaggtgctggctgcggcctcgggacgtattgtcaacgaggtccccggcgtcaaccgggtggtgtacgatatcaccagcaagcccccggccacaatcgagtgggaatagaggtcatcattccacagagtgtctatttttattc

SEQ ID NO: 31 - DNA, 32230 bp, Unknown
  16S sequences of unknown bacteria
ggttccgagggaacatccggggatcagccggttatctgggcaaccatggaatcaagcaggctctgcatatcgtcggtggactggttctccatcgcgaggccgaacgcttcggaaggcgtccagaaattgccgagcacgtacttctggctcacgccgtactggctctgctccgccagcgcggcaagcgcgatattcgcctgcacttcttcggaagcggcgacgttgctgttgctcgggccgatttcgcgcatttcaaagcggagctgctgcgcttcttcgttggtgaggaattcggccagcatcatggcttccaccggatgcgcggtctgggtgttgacgccgatcagcttcgtgccgatgaaggaggacatctgaacctgttcgccgttcagggtgaaggtgggcagcttgcacgcggcgtagttttcgccgagcttctcctggatggcggcggcgttccaggtgccggaaacgcccgcgcagatggtgtcgcccatgccgccggtgagcacgctgtcgtcgccggtcaggaaggcgggatccgccgtgaaggcgcggatggcttcgcccgcggcgacgccggcttcgttgttgaaatcgcaggtctgcttgccgttctcgtcaagcccgagcgtgcagcccgcgcccaggaagaaggaagcgatgtaccagccgttggaaacgtccataaagaccttcttgccggcctcgttcgccttggcgaggatgctgtcgagggtctgaacgtcttcctcggagaggacggacttgtcgtaatagaggaagtagccgttgtcggcggtcatcggatagccgtagagcacgccgtccagggtggcggattcgatcgagccggcgctgttcgcggcgacaatcgcatccaggttgcgggtgacttcgtagagcgcgtcggcattcacgaggtcgagcagctggtcgttcgagaaggcgaacacgtccgcggcggcggcggggtcttccagatagcgggccttggcatccggctcgccgaccacgccgaggctgatgtcccacgtggtgtcgggattggccgctttgaagttttcaaccaaaacgcccagcagttcctggtcttcctgcgatccccagaccttgagggtgacggtttcgccttcggccaggctcgaggcggccaggccgaagagcatcatggcggccagtgcgaatgcaagcaactttttcatgtgagcatctccttattaggtagaatatggatctacgcgctttcgcgcgcggattcccgagtgggtggttcctgcccgtccaggcggcgcaccgtgccgccctgtacgagccggctgggcacgaacacgttttccgtgtccgacgggtcgtgaatcagccgggaaatcagctccacgctcttttccgcgatcagctgcgcgggctgggaaaccgtgctgagcgtgggggtaaggaaccgggcgagggcaatgttgtcgaacccgatgacggagatatcgtccggcacgcgcaggccgaattcggaaaacgccttgatggctccgatggccatcgtatcgctcatgcagaacatggcggtgcattccaggccgctccgcacgaacgcgagcgcccgttcatacgcgcagcccatggtgaaatggctttccacatacagccgctcgtcaaacgcgagcgagcgcgcttcaaagctttgcagaacgccccggtagcgctgcccgatgccgtcgtccacttcgcgccgcccgcccatcaccgcgattttgcggtgcccgcaatccagcaggtagtccacggccatgcgggcgctcagccggtcgtccacgctcacggaggacacgccttcgcagcgcagcgcgctggtatccaccgtggcgaacacgcagggcaggggcagggcacggatttcgcgctcctttccggccgtgctggaacccaggaacacgattccttcgattttccgctcggcaaactggcggtgggcggcttcgaactcgtccccctgctcgtcgataaaatccagcgcaaagcgggccttgctctggttgccgaaagagatcatgcgttcggcaacgtcggccagaaaagaattctgccttccgcgcacaatgatggacgccatttcggaatttcgctgtttcagatttttggcgttggaattctgggtgaaattcgttttttgaacgacctgcaaaaccgccgcgcgcgtcttttccgaaacatcgggccgcccgttcagcacgcgcgaaaccgtgctcacgctcacgcgcgcaagccgcgcgatatcccgaatggtcagaatctccatgcaagaactcctttcgcggcaggaggccgtcggcgaacaagcgccggcagatcgtttcgtctgtttctgcaaacgtttctgataacgttcccggaaacgtttacgtccatattttactccacatgcaccacattgtcaacaccttttttatcggcgggagaactttttggcgattttttgaagccggtttccggcgggaatttacaattcgggatggaagagggcggaaaaaccgattataataaaagaaagtttttgaaggagacgaacccatgaagaaaattgccggtacggtatggtggaactggatgctcatcgttgtggggctgctcgccagcgcgagcgcgtacaggctgtttctggtgccgtgcgacatcgcggcggggggattcacgggcgtgggccagctcgtttcccatatcacgggcggcgcggtatccgtgggcattgttccggtgattttgaacgttcccctgtttgccgttaccatccgctcgatgggggtcgggatgggcgtgcggtcgctggtcgcgatgctggcgctttccttcttcatcgattggctgcccattcccgcggcgacggacgatatgctcctggccagcgtgttcggcggcctgctgggcgggcttggcttcggcctgattttgcgcggcggcgcgagcacgggcggttcggacatgctgggaaagctgattcaccagaagtttccccacattcgcgtgggcgtgctggtctgcctgatcgacggcatcgtgattctgggcagcatgttcattttcgacaccaaaaatgccctgtacgccctgatttccgtggtcattatgaactatatgctggattttgcgctggaagggccggattccgcgcgggcatactttatcattacggataagagcgaggaaatatcccaattgctgatgcgcgaaatagaacgcggggttacgggaattcccgcgcaaggcatgtatagcggaagtggcaagacggtgctcctttgcgtggtgaaccgcatggagagcatacgcttgcgccagcttgtgttttccgtagacaaaagcgcctttgtgattgcgaccaatgtgcacgaggcgctgggggaagggttcaaagaatacaattgaaggcaaattggatgggccttcccggatgccggtcaatatctggcatccgggaaggttttttgcggccaatcgaaattggggtttgacgggattagcgaatcacatcaaagccggtgtacttgcgcagcacttccggcacgacgacgctgccatcgccctgctggaattgctccacaatcgcgggcatcaggcggctggtggccaggccggaaccgttgagcgtgtgtacgtactcgatttttttggtttgcgcgcggcggaagcgaatgttgccgcggcgcgcctgataatcgcgcgcgttggaaacgctggagcattccttgtattcgttcatgctgggcagccacagctcaatatcgtaagtggtcgccatggaagccgagcaatcgcccgccgccagcttggagagccggtagtgcaggcccaggccttccaccagcgcgcaggccttatcaatcaattcgtgcagcgccttggtgctgtcctccgggcgggtatactggaacatttcaattttgttgaactggtgcccgcggatcatgccgcgctcgctggcgcggtaggtacccgcctcgcgccggtagcagggcgtgtaggcaaagagcttgcgcggcagcatggattcatccaaaatttcgtcgcgatacaggttgatcagcgcggtttctgccgtgggcagcaggaagcggaagccctcttcggtgaggcggtatacgtcttcctcaaatttggggaactggcccgcggtgagcccgcactcgtaggtgagcaggtggggcgggagcatgaattcgtaaccgtccttcaaatgggtttccacaaaataattcagcagcgcccattccaggatcgcgcccttgccggtgtagagccaaaatccattgccgcccatttttacgccgcgttcgtagtcgatcaggccgagtttggtgcaaaggtccacatggttctgcggctcataatcccattcgggtttttggccgtagacctttaccacctggttggactctttgccgccagcctgcacgtcttccgccggcaggttgggcagggcgagcataaaggtgcggattttttcttccaattgggcctggcgctcgtccatcgccttcacgcggtccgacatgtctttcaactgcgccatcagcggggcggtgtcttcgccgcgctttttcatggccggaatttccttgttcagccggttgcgttccgccttcagggattcgttttcgctcaaaagggagcggcgctccgcgtcccacgcggtgaaatcggacagatccagcgtgtagccacgcttggccaggccttcgacgacaacatcgggttggttgcgcaagagattcacatccagcattttctatccctccaaaaaaattgcgcccctgccattgcaggggcgattgctcgcggtgccacccttatgcgcgaaagcgcgtacgccttcgcctcgctgcggtggtatcgggccgcggcccggttcactcctcgtgaacggctccggaatggaaagctccgccgccttttgctggcttgcacccaccgccagctctctgccaaaaggccttgcgaaacccatttccttcatcgctttgtctttcattatagccatatttgcgccaattgcaagggaaaacggcagattttacatcgcttgcgcctgaccgaccgaagaaatgtatgggaatttacatgcgtttgatatactaaacccaaaagaggggaggggtgcatatggcgatcctgatgctggcgcacgcgaagatcaactgggcgctggaagtgacaggcgtgcggccggatggctaccacgcgctggatatgctgatgcagcgcatcgacctggcggatgaattgtttatggaacccgcgcgctggatttcgctcacggtggatggaaaaagcatcccttctgggggacgcaatctggtggtgcgcgcggcaaacgcgctgaacgagtatatgggaacgcgcagaggcgcgcgcattcgcctaaaaaagcgcatccctgtgcgcgcggggctgggcggcggcagcgcggattgcgccgcggcgcttctggggctcaatcgcatgtggcgcttgaaccttccggagagcaagcttatggaaattggcttgcggctgggggcggatgtgccctatcttttgcggggcggatttgcgcgcgtgcgcggcattggcgatgaattgacgccgctggatggcgcgcgttctgtgccgctggtgctggttcgcccgggaggcggcttgtcgacgccgcacgtttttgcggaatacgaccgtatggcgcaagcgcgtggcgaaatcgatatcgaaggcgcgtatcgcgcgctggcttgtggggacttgcatgcgtatgatcgcctgagcggcaacgcgttggaggcgccggcgcgcaagcttatgccggaaattggcagagttatggagcggctgcgcatggagggcgccgtggccgtgcgcatgagcggcagcggttccacggtttttggcgcatttgaaagcgcggacgccgcgcaaaaagcgcatgaggcgctgccaggttccgtgctggcccgcacgattgtccaataaccgcgcaaatttttcctttcgcggcgattttttcgcataaattcgttgaaaatggccgacgctaatggcacaaatccgtgatgatgcaggaggttgtgcgtgaagcgtcggtttttgtttgggcttgccgttatggtcgcgctgtgcgcggttgcgcaggtgggcgcggcggaggaatatcggattttggcagaggaccttcccgtggaagagtacgttcgcttgcatatactcgccaattcggatagcgaggaagatcaggcgctcaagctgaaagtgcgcgatgcagtgctcgattgcgcgcgggaactcttgggcgatacatgctctgcggacgatgcgtatgcgattttgggcgaaaagatttcgctggtggaaacgtgcgcccggcaggcggcggaagatgccggattttttggcgaagtgcgcgcgcaagtgggcgttttcgagtttccagatcggcagtatggcgatttgctggtgccggctggcgaatatcgcgcggtgcgcgtgttgttgggcgcgggcgagggccacaattggtggtgcgtgatttatcccaccctgtgcgccatcgatgaaaagggcgaatttgtgcaggaacgcgcggaaatcgtcttttattccagcattgggcgctggttgcactccgcgctgggaggtggccagtgatgcggcggttgctggcgggcgcgctgtgcctggtcatttgcctgggcctttttggcgcgaatgccttggcggccgtggtgctttccgtgggttcgcggggggagaacgtcaccaaagtgcaaaaacgcctgattcaatacgattatctcgatggcacggcggatgggatttatggggaggagaccgccgctgcggtgcggctattccagcggcgcaatgggctcagcgtggatggcaaagtcggcccggcgaccgccgccgccctgggggttacgctgagcgcgtcgggcagcgcaagcgcgtcttcttccaccgcgatcatttccagcgatcaccgcttgctctccaaactggtatacgccgaggcgcgtggagaaccgtataaaggcatggtggcggtggccgcggtggtgctcaatcgcgtgcgcagctcgtcctttcccaacaccatttctggtgtgatctatcaaaaaggcgcgttttcctgcgtgtccaatggctctatcaacaatacgcccaacaatcagtccatccgcgcggcgctcgatgcgctcaacggctgggatcccacgggcggttgcctgtattattacaatcctaggctcaccgatgacgagtggattcgcacccgcacggtgcaaacggtcattggcaaccattattttgcgcgatagggggaggaagcatggagcatattcaatcccggcccgacgcgcgaatgcgctttgccgccgccgcgctggcgattttgctgatcgccatggtcgcggccagcggggtacaggaattggctttgaatcgcgcgcagttgcaggtttccgccgtttatcaaaaggcgttttatgaatcctgcgagctgatgaatggcctgcagctgagcctgcgcaagctgttggtctcgggttcaggagcgcaggagcaggcgctgttgggggaaattgcccagcaagcgcagggcatagagagcaatctgaccttgctgccccttgggcaagagacggtttccagcgccgtgcggttcgtgaaccaggtgagcgattacgcgcgcacactcaccaaccgcatcgctatgggcggcgccatcaccagcgacgattggacgcagctcagcaccctttcggacgcgatgagcgagatgaccctccagatgaatgacctgcttgcacgctatttgaatggcgaagaagtgttttcggcggaggattttgcggcagcgggcgaagaaatgggctcctccacgcaaccggccgtggattatcctgcgctgctctatgacggtccgttttccgagggcagggaaaccgacgtgtttgccggattgaccggcgacgccgtgacacgggaagaggcgggcgagtatctgcgcgcatttgcccagcgcgcggcaggggaggtcagcaatctccagtatacgggggaatcggcgattccggtggagtgctgggaattctccctcgtggcaggcggctatgtcttgagcgccagcgttaccaagcagggcgggcatgtgctgtatatgctgccagaaaacgatgtggcgcaatcggtgctctcgcgcagcgaatgcatcgataaggggttggcctttttggccgcggaaggctttggccgcatgcatgtgagctattaccgcacgtacgacggcattatcaccgtgaattacgcggccatacaggacgatgtggtgctgtatccggatttggtgaagctgcaaatttccatgcgggacggggccgttatcggcatagaggcttccaattactacgccaaccacattgcgcgcgaaattgggcagcccgcattgagcgtgagcgacgctgtgagccgcgtgagcgacaatctttccgtaaacggcgtgcagctttgcgtaattccgctggatgtgggcgaggcgctgtgttacgaatgcagcgcgacgcgcggcacagaaacgtatttgatttatatcgacgcgaataccggcatggaacgggaaatcatgcaagtcgtgaatgcgggagatggtatcattgcacagtaacgcgggagttggcagcaaaaccgtcgcacgcaaagtgggcggcgcgcatagtatgcggcagatactgccgtatgcggagcgtgaaactatgattgcaagaggggagttgtacagcgccagcctcgacccggtcgtcggctcggagcaggggggcatacgcccagtactcattatacaaaacgatgtggggaaccgctatagtcccacggtgatcgtgttggccataaccgggcagctcggcaaagcgcgtttgcctacgcatgtgaatgtgccggcgcagggcaatgggcttgcgaaggatagcgtggttctggcggaacagatccgcacgctcgataagcgccgcttgcgggagcgcataggtacgctttcgccagagttgatggaaaaagtcagcgaagcggtaaaaatttctctggggtttgatgtgtaggattcagcttgtcaaaaaagactttttgacaagctggtggacgggggaggaagctatccacaattcgcaatggtcaccctgcttcgcctggcggcttgcagcgttcccttgctcattgggcttacttcgcgctgcttcgcccactgggcgcgcgcttcgtgcgccccccgccactgccaccccctcaatcagtttccgctaaaatcctacggattttcgggcgcggaaactgcaaagaaacgatttttgctctggaaaatggaattttccggcgcaaaaatcgccccgtccccgccgtacacgccgccggggacgattgtaccgcgaaagggctccggttccacaattcacaatggtcgccttgcagcgcctaacggcttgcaacgctcccttgttcattggactttcgcttcgcctgtttcgcgcactgcgtgcggcgaagctccgtccctctcgcactctccgttggggttttttgacagcctttgcggctggcaggcatgtgctgccggccgcttttctgttcgctgggcaaaggacaatttatttagcatgcaaatcaattttcttaacatagaagccggcctgtgctcttgttcctcttttgagcgaaggcacacaacgtgcttgctgggcaaaattcaccgaattttcacaaaaaaacggcgaaaaattgcatgacagggccgctttggcgcgataaaatatggtttgtttccgaacagtattgtttcgaacaatatggcgcataatggattgccgggaaaggaggagccgcgtggagatggattgcggtggatggattagcgtgctgttccacaagctccgcaagcgcgtgaacgccgatgtgcagcgcctggggcttacggggatacagagccgcgtgattcatttcatcctgataaagagcgccgaggggccggtgtatcagcgcgatgtggaaagcgcgtttggcgtcagtcgttctacggttacgggtatgctgcagcaaatggaaaaagacggtttgattcagcgcgtgagcgtcgccagcgacgcgcgcctgaagagtctggtgcctacggaaaaggccgttcatttggacgcgcaggtagaagagcgattgcatcgcgccgagcaatgcctcacgcagggcttgtccgatgtgcagctcaccgcgtttaaggaagccgccgcgcagatggccgccaatttggacaactgaaacgccatccgcaaaacgcgctgggcgaactgtggcgcgtttgcgcatttgggggataagaaggaggaatgccacatatggtaaagacccttgctcgcagcattcgcgagttcaaaaagccagcgattttaacgccattgctggtgacgggcgaagtgattctggaatgcatcattcctttcattattgccaatctggtaaacgaaatgcaggctggctgcggaatggacgtcatcattcgctatggcgtgcagttgctcgtcatggccgtgctgtcgttgatctttggcgtggcggctggcaacacctgcgctacggcatccacgggctttgcgcgcaaccttaggcaggatatgttctaccgcattcaggattattcgtttgaaaacatcgataaattttcggtatccagcttggttacgcgtatgaccaccgatattttcaatgtgcaaatgtcctttatgatgatcatccgcgtggccatccgcgggccgctaatgttgattttctcttttatcatgggctttgtcatgggcggccggttggcgatgattttcctgttcaccattccgctgctcagcatcggtctggcgctggtcattcgcaaagccatgcccattttccgccgcgtgttccgcaaatacgacgcgctgaacgattccgtgcaggaaaacgtacaggccatgcgcgtggtgaagagctatgtgcgcgaggagtatgaaaagcagaaattcggccgcgccgcggaggatgtgagcaaggatttcacccgcgctgagcgcatcatggccatcaacagcccgatgatgcaattttgcgtctacgccggcatggtgttcgtgctgacgtttggctcttacatggtcattaccagccagggcatggaggtcgccgtggggcagatgtccgccatggtgacgtatagcttccagattctcatgagcttgatgacggtgtccatggtgttcgtgatgatcaccatgtccatggaatccatggaacgcatcgtggaagtgctcaatgaaaagagcaacctggtgagccctgaaaatgccatcgaggaagtgaaggacggttcgatcgattttgaaggcgtcaacttcaagtattccaaaaaggccgaacgcatggcgctttcgaatgtggatttgcacattcgctccggcgaggtcattggcatactgggcggcacgggttcttccaaatcgacgctggtacagctcattccccgcctgtacgacgtgacggaaggctgtgtaaaggtaggcggcgtggacgtgcgcaagtacgatttggaagttttgcgcaacgccgtggctatggtgctgcaaaagaacgtgcttttcagcggcaccatcaaggacaacctgcgttggggcaatccccatgccacggacgaggagatgctcgaggcttgcaagctggcgcaggcggatgaattcatccagcagttcccggataaatacgatacctggatcgagcagggcggcgccaacgtttctggcggccagaagcagcgcctgtgtatcgcccgcgcgctgctcaaaaagcccaagatcctgatcctggacgactccaccagcgctgtggatacgcgcacggacgccctgatccgccaaggattccgcgagttcattccggagacgaccaagatcatcatcgcgcagcgcgtcgcttccgtgcaggacgccgaccgcatcgtggtgatggacggcgggcgcatcagcgcgattggcacgcacgacgaattgatgcagaccagcgagatttaccgcgaggtctacacgacgcagaacaaggcgggtgatgaagatgacgaataatggcaatgcgaacgcctccccggagcgcaagacgacggctcgcggccagcgcgcgcccaagggcgtattgcgccgcctgctgcgcacgctgtttgagttctatccggtgttgctgccggttacgctggtgtgtatcctcatcaacgccatcgtcagttctattccctcgatctttatgcaaaacatcatcgccatcgtggatgacgcgtatcaggcgggcgattggaatgctgtggcgggccaaatctttggctttgtgggcatcttgctggtgatgtatgccatcagcctggtggcgggcacgttctatacgcagatgatggccatcatcacgcaaggctccctcaagaagatgcgggaaaagatgttcaaccacatgcaggatctgcccatcaagtattttgataccaacggccgtggcgatatcatgagctattacaccaacgacgtggataccatgcgccagttgatcagccagagcttgccgcagatgctggtttccgctgtaacgttgctcacggtgttctgcatcatgatgtattatagcgctattttgggcctgatcgtggtggcgggcgtggtgtgcatgacgtttgccgcgcgctatatcaccagtcattcttccaaatatttcctgcgccagcagattacgctggccaaggccgaagcctttgtggaagaaatgatgaccgggcagaaagtcgtgaaagtgttctgccacgaggaaggcgccaaaaaagatttcgataaggtcaacgacgaaatctatttcaacgctcgcaacggcaaccgcttcgccaatgtgttgatgcctctgatgggcaacatcggcaacgtgatgtacgtgatcgtggcgctggtcggcggcgcgctgatgctggcgggcgcgcccaacgtcagcatttccggcatggctttcagcatcagcattgtggtgcccttcctgaacatgaccaagcagttcgccggcgccattggccaggtttccaaccaggtgaacatggtgatcatgggcctagcgggcgcgcaccgcatctttgccctgctggatgaacagccagagacggatgagggctatgtcacgttggtcaatgccaaggaaaatccggatggcagcgttacggaatgcaaggaacgcaccggcatttgggcctggaagcatccgcatcacgatggaacgctcacttatacccgcctgatgggcgatgtgcgcttcttcgacgtcgatttcggctacacgccggaaaagaccgtgctgcacaatatttcgctctacgccaaacctgggcagaagctggccttcgtcggctccacaggcgcgggcaaaaccaccatcaccaacctgatcaaccgcttctacgacattgccgatggcaagatccgctacgatggcatcaacatcaacaagatcaaaaaagcggatctgcggcacagcctgggcattgtgttgcaggatacgaacctgttcacgggcactgtgatggagaacatccgctatggcaacctggaagcgactgacgaagcctgcatcgacgcggccaagctggccggggcggacgatttcattcgccgcttgcccgaaggctacaacacgatgttgcatggcaacggcgcaaacctcagccagggccagcgacagttgttggccattgcccgcgcggctgtggccgacccgcccgtgatgattctggacgaggcgactagctccatcgacacgcgcaccgaagccattgtgcagcgcggcatggacgcgctgatggctgggcgcacggtgttcgtcattgcgcaccgcctgtccaccgtgcgcaacgccaacgccattatggtgctggatcatggccgcatcatcgagcgcggtacgcacgaggatttgctcaaactcaaggggacgtattatcagctctataccggcgcattggaattggattgatatcgtgtactattcatataatcattttgcccctgcagcggaaattcgttgcgggggcgcaatttttttggcgtggtagagcaaaacgcttttgcgagtccagattttttcgggcgatctccggattttgggattgactttgtaaatttattccgatataatgcagggcagagagatgcatcgtttgtgcgcggcacaatactataccaaaatgtaggaggcgcgtattgtatggctcggattcgggtgggaagcgttggcataggcggcatcagccggggtgtgcatttgcccggcattgccgcaagttcggatttggaactggcggcggtgtgcgacattcgggaggatgccctgcaggcggcgcagcaggcatatggcgttgcgccggagcgttgtttccgggattaccgggatttgattgcctgcgaagatgtggatgtggtggatatttccacgcccaacgatgtacactttgaggtggcaatggcggcggccaaggcggggaaatcgttttgcgtggaaaagccgctcacgctcacggcggagcaggccgacaccttggctagggcggtggagcaagcaggcgtaaaaaccatggtgtgcttctcttatcgctataaggcggcggcgcgctatgcgcgcgacctggtgcgcgggggcacattggggaaaatctaccatgtggatatggaatattcccaggcgtggggcctgccgcaattcggcacgccgcgcgtgtggcgctttcataaggcggagacgggttcgggcgcgctgggcgatttgggaagccatgcgctcgatctggtgcgctttgtgacgggagaggaatatgagcgcattgtggggcatgccgaaacctttgtccacgagcgaaaggcgctttctggagatgccgtggttcctgtggatgtggacgatttttccaatatgctggcgcagatgtcttcggggattgccgcaagtttccgcatcacgcgctttggctatgggcgcgggaactatcagcgcatggtggtatatggcgagaagggttctttggtgtacctgctggatgaaaacggttcttcggaagatacgctggatgtgtgcctggagcctttgggcgcggaaaaccatatgtttgtgcgcgtgccggttccgcatcgctatcgggctgaccagatgcagagttttgccgatattttgctgggcaaggcggatgggttgtccgccacggtggccgatggacgggtgaatatgcacgcggtggacgcggtgctcgcttccgccgaaaaaggcgcgtgggtggaaatcaagccctgacttttctgggggctgtgaagaaactttggttgttctttcacggcccttcagactgtcaaaaatccctaggagagcgcgagagggccgaagccctttcgcggtgcaatcgtccccggcggcgtgtacggcgggggcggggcgatttttgcggcggaaaatcccattttccagagcaaaaatcgcttccttgcagtttccgcgcccgaaaatccgcaggattttagcggaaactggtaggggtggtagtggcggggaagcttgctcccccgccaccgcgggcggctcatagcaggatgcagatcatgccgccattgccctcgttgatgattttttgcagcgcttcctgcatcttctggcgcacgtcctcgggcatcatggtgagcttgccagaaagcccttcgcgcaccagctcattgagcgacttgccaaagatattggtttcccagattttgtccggctcattttcgaattcacgcagcaagtgctcgaccaattcttcagattgcttttcggtaccgacgatggggctgacctcggtttgaatgtccacgcggatcaggtgcaggctgggggcgctggccttgagtttgacgccaaagcggttgccctggcgcacaatttccggtttttccagcgaaagttcgctcatcagcggcgaaaccatgccatatcccgtggaacgcacggaagcgagcgcgcctgccacgcggtcgtattcgcgcttggcgtacaccagctcggtcatcagcttgaaaaggtgttcttcattttcaatctgctggccgctttcttcgccgagcacgcgatagaacaaggcttcgttcagccgcagccggtaggtcatcgcgccttcgttgagccgcatttcctccacttccgcgctttccgcgtcgtccagcgccatcaggttgtttgccaggatggtgtggtcgcgcacgcgcgtcatttgctgggcggcggtgcgcacggcgtcggtgatttgcgcgacgagccagtgcgtgggcttcagtgcgtcgacccagcggggcgcgaccacgtcgatttccgtgagcgggaattcaaagagcaagctttcgagcaagttgttgaggtcgtcgatcgtcatgtgttccacatccatggcggtcacggtcacgccgtatttttcgctgagcgcgttgcgcaggcgcagggtttcctcgctattgggcacgctcgtgttgatgacgaccacaaagggcttgcccagcgcgttcagttcccgcacaacgcgctcttcggcttccgcgtaggccgcgcgcggcatttctgtgatggaaccgtcggtggtcacgaccacgcccaacgtcgagtgctcagcgatgaccttgcgcgtgcccagttccgcggcctcttcaaagggaatgtcatgatcgaaccagggcgtgcgcaccatgcgggcgtcctcgccttcgttcagacccagcacgccgcggatcaggtaacctacgcagtctaccaggcgcactttgatggacgcctgatcgcgcaaggtgatttccgccgcctcgttgggcacaaatttgggctgcgtcgtcatgatggtgcgtcccgcgccgctcacgggcaattcatcgattgcgcgttcgcggcggtgttcgccctccatgttcgggagcacgagcagctccataaaacgcttgataaaggtggattttccggtgcgcacgggcccgactacgccgatgtatatgtcgccgtcgcaccgaagcgcgatatcgcgatacagattttggttcatgctgcgcctcctgccatgagatttgccctgctcaaccatatgtgcaagggggacggggttatgcgcaattgacgccgggaaggccgcggaatttgcgcgggggcttgcgcggcgggggattctcctgtataataaaggcaggaaaagggaggactccatgagcaggaaagacgaacgaaaaaagaaggacgcgggaaagcgccagcggatattgacctatgtttgcgccgcgctgatcgcgctggtggtgctgctgagcgcgtacattgccttttccctgcgcgaatcccagcgcgcgcaggagcagggagaggcataccgcgaattgtattatgcctcgccgcaggcgcaaacggaaacgccggcttcgccagaaacgtcagcttcgccttcgccaacgcctttgccaacggcgacgcctgcgccgtctcccacgccaacggaagcgccttctggcataattgtggagatcgatgggcgcaccattgtattgggcacgccggacgcgggcaccattcgcgtggctttgcccacgctgccgccagtggacgcgtcgtttgagccgcttcttgcggaaaatgcggacatagtgggctggctcaaggtttccgacatcattgatttgcccgtggcgcagcgcgacaatgaatactacctttcgcacgggctggatggcgaagagctcagcagcggcgcgctttttatggatgaggccaataagctttttccgttggatggcaatacgctcgtatatggccacaatatgcacgatggatccatgtttggccgcctttcgcgctatgccaacgcacggtatttgcgggaaaatcccattgtggaattcgccaccttgtatgaaacgggggagtacgtgccgtttgcggcgttccacgcttctatggaggcagaggacgaggagtattttgaaatccgccaactggcctttgctatggaagattcctttgatctgttcatcgagcaattgcgtgcacgttccgtgtattatgtgcccattgacgtgcgctatggcgacgcgcttttgagcctggtgacgtgcagctatgagcaggacaatggccgctttattctggtgtgccgcaagattcgcgagggagaatcgcgggaagacgtgctggaaaaggtgaaagaaacccgcattcacagataaattggcaaatgggaggagaaagggatgtttacaacagggctggtttccatttcgttccgcaaggaaacgccgcagacgctgattcgcgcgtcccgcgaagcagggctggagaaaatcgaatggggcggcgatgtgcacgtgccggtgggcgatctcgcccgcgccaagcaggtgggggaagagacgcgcgccgctgggctggatccgtgcgcctatggcagctatttccgcattgggatttctccgctggatgagtggcagcgcaccatcgataccgcgctcgccttgggtgcaaaattgatccgggtgtgggcgggaaacaagaattcggaagatatggacgaggcggattggagcgcgcttacggaaaccgccgcttggatggcaggcacagcgcgcgaggccggccttctggtggccacggagtgccacaatggcacggccaccaatgaataccatgccgcggtgaagatgctcaaggcggtcaacctgcccaatttccgcacgtattggcagccgaaccagttttgttccgatgcctataacttggaggcggcccaggcgctgctcaactggatggagaacgtgcatgtctttacttggcgcgggcacgaccgctttcctttggcggacggagaagcgctgtggctggaatacctgcgcattgtgggggaaaggccgctgctgctggaattcatgcacgacgaccgcctggaaactctgccggaaaccgcgcgcacgctccatgcgtgggtgcggaaactggaaggctaatttctttgccggatatggcccgcatgtgctcttgcctggcgcgtgcgggctatttctgcgcgtggcgcttctccaaatagcggtatatcaaaaggccaatgaggcttatagcggctgtgacgccaaaggcgatcagcgcgacggtgtattcctgcacgcccagcgcgtcgccactgatggtggaggtgagaatggagggcaagcgcgccacagaggtgatcagtagccaggcgggcagcttgatgccggtgagcccggcggcgtaggtcatcacgtctttgggcgtgccggggatgagaaacaacacgaacgccaacacggtgagcctgcgctggttttgaaatagacgaaaggaaaggattttttcgcgggaaatgaagggatcaatcacgcggaaaccccacttgcgcactgccagaaaaaccatcgtaccgccgattagagaggcaacggtgcacaagatggtgccctcaagcgcgccaaaggcatagccggcggcgatttccaacggttcgccggggataaaagccacgacaatttgcaatattacaaggccgacgaaaaccacttgcccccacgcgccgcaacgatcgatccacgcgcggaatttttcaggctcgcgcgcggcttccgcaatgggttcccatgccactacgcaaatgatggccatgatggccaacacgattccaatgccaaccaaagatttcaagcgctgctttttgcgttcgttcacgatgcatttcctccgagaatggcgattgtctgtatacttccagtatagcggaaaaaatcaactttctcccaagtttattgtaaacaattctcgaaaatttacggatgcgcctttggaagcgcaagttcgcttggagcaaaggatttggcggcagaatcgccgccttttacagaaaagctatgatggaagcccttcgtccgcccccgccgggaaaaagaagatgaaggggacaaatggacgcccggatgcgctcgcgtagcggagcccctttgccatttcgcgctgcaagcttgccgcgcgatacgaaaaataagtgcatagcacagccatgccggtttcctcgccggcaaggcgaagctttgcactatcgtatggcaattttgatgggggaagagcgacgctgcgcgcccaatttttggcgaaaaccattgctcctccggcgccgcacatgcggcgtcagagaagttttgcccggctatgcttcattgcacctctgccaggatggcgttgagcaacatagcggtaacggcggcgccaccttttttgccgcgcacaacaatgctcgccaggtcgctttcccacaggcgctctttgagctggatggcgctggcaaagccgctcagcgcggtaagaacgcaaacatccgtcatcggcgcagactggcggcgctgcaccagccggtgcaaggcggtgggcgcgctgccgacgaccatgagctttgggcccggcagggcgagcgcgtgatctacggccacttctgcccgcgtggcgcggcgcgcttctgcgagcgatacaacataaggctcgtcaataaaacacatcacacgcgcgccattctgccccagcagggaggtatccacatcgttggccagcaaataggtgtcggttacaatggtgccgcccgccatgagcaaacggcgaacaaaagttaaagccgtgggtccaaagtgaatgctattgagcagggtttgatcgctgcattcagagcgaagccgttccagcacggcgttgatttccgccgtggtaaatggaaggggtttgcggtgcttatcgccctcgcgtgttagcttgcgatgcatttcgcgaatgctcctattcctatatttgtatcccagctgtgcaatgcacaaccatactatattactatactttgtattgcgaagaatgtcaagtctcaatggggagatagaaagttcgttggcacaaaaataacataattttaatcaaaaacagtgtgaacgcaagccgtatttcctttaccatggacgtgaggtgaagcctatgtgcaaggaatatctatgggcgggcaaagccccgtacgaaaccgatttgcgcccttccattgaggcgcattgcgttccgggcgcgaagagcgcggttgtggtgtgccccgggggcgggtataccatgaaggcgatcgaccatgagggcgcggcgttttgccgcctgttcaacgatgcgggctacagcgcgtatcagctggattaccgggtgcgtccctgccactatgaagcgccattgagcgacgcgctgcgcgccatgcgcatggtgcgcgccaagggctatgaaaaagtgggcatcattggcttctcggcaggcggcaatttggtgtgcaatgtggcgaattttttcgattatgggaaagcggatgcggaagaccctatcgagcgggtttcttcccggccagacgcgctgatcgcctgctacgcggtggtgagtttttgcacgcatgcgcacgaggggtctgcgcgttcgctcctgggcgagcactatggagagaaagcgctgatgcaccgtttttctgcggaaatgaacgtgcgggaagacgcgccgcatgcgtttatctggcacacggtggaggatcaggccgtgccggtggaaaacagcctgatgcttgcgcaggcgtatcgcgaaaagtgcgtaccatttgaaatgcacattttcccgcagggcgcgcatggcctggggctcgcgcaggacattccgggcacgtgccagtggccgcagcttatgctcgattggcttgcgcgagaaggattttagcggaaattgacagcgatatatcgtgaaccttttgccggatttgtcggtctaacgaacagacaatcggcgaaatgaggtgtttcgtttggcgaaaaaactgctgcttctgcttctgacgttggcgttgctgctatcttcgtgtagctatcaggtggtggaagattctgatgtgcgcacgattttgggcgtgggccaatccgcatacgccttggaagaaggcgcgggggaagatggtggcgaacgtacgctgacgggcgatatagcgaacattttgcgctggattggcgagcaattgcgcaaattcgcgcaatgggcagccaacagcggcgatggcgcggttcctccgcaggcggaagggagcccttctttccaggagacgcccgcgcccacgccggagccgacccctgcccctacgcccttggcagatggcgcacgcggcgatgaggtgaagatcattcagcagcgtttgcgcgaatggggttttatgacggactcggcggatgggatctttggcgccaacacggaaaatggcgtgaaggaattgcaaaactatttgcacgagctgggcgagttgggcgcaacttctgaggaatggctcttgcccaccatagagagggaagaaactgccgaagaggaatttgtggccgacggcgtggtttccgaggaattgaaggaaatcctgctgggcgtggggcagtttgcgctctatcgcgaagatctttcgcgcggttccgagggtgcggaagtgcggcggctgcagacgcgcctgaacaatctggactatctcacgggcggtatcgatgggcaattcgggccacgcacggctgacgcgatttcttatttccagaagcgcaatggcctaaaacagacgggagtcgcggatctcgatacgcagatgctgctgttttcttccgaagcggtgaaatccgaccggccggagtacccctactatatcaaggtgagcattgccgaccagcgcgtgtacgcgtatgcctgggagaacggcagctattcccgcctggtgcgcaccatgaagtgctccacgggcctgccggagacgcccaccccaacgggcacctattccatggccgggcaggcgggccgctggtactacttctcgaagttcgaatgctgggcgcaatacgcttatcgcatctatgggccgtatctgttccattcggtgctttattcggaaaaagatacgtccaccttgcggcagggttctgtggacaacctgggcaagcccgcttcgcacggctgcattcgcctttccgtggaggacgccaagtggctgtacaacaattgcgccgcggggacgacggtgaagatctactagcatttccttggcaatggattttgcgggcagagaagtatctgtccgcatttttgcgtaggtgcgcttgcagttttccggggaaatatggtaaaatttggctactgtaaacccattttgcctgtgcagtgcgaagcgcttgcgccttaagaaaatctttagatttttccaggaaaaaagcaatttggggaacgaaaaaatatgctacaataaaagggagaagcgtgggagggagattggatgcccgagcaaatcctcattgtggacgacgaggcggaaatcgccgacctcatcgaattgtatttgaaaaacgaaaactacgcggtgcataagttctatacggcgagggaggcgctggcgtgcgcagaaaccgagcagctcgatcttgccattttggatatcatgctgccggatatgagcggcttcgatctgtgccggcgcatccgggaaaagcatacctatcctgtgatcatgctcaccgccaaggatggggaaatggacaagatcacggggctcacgctgggcgcggacgattatatcaccaagccattccgtccgctggagatggtcgcgcgggtgaaagcgcaactgcgccggtacaaaaaatacaatcccgcgcacgggacggaagaggcggtcgagatcatggagcacgcggggctggtgctgaacgcgaaaacgcacgagtgcctgctggatgaacagccgctcacgctcacgcccacggaattttccctcctgcgcattttgttggagaacaagggcaatgtggtgagcgcggaagaattgttccaccagatctggaaggacgagtactacaccaagaacaacaacaccatcaccgtacacatccgccatttgcgcgaaaaactgcgcgatagcgtggatcatcccaggttcatcaaaaccatatggggagtgggatacaaaattgaaacgcatccatccaagggataacgactattcgcagttgaaaagaaagctgctccttcgcctggcggcggccacagtaggggcaatttttggcatcgtggccttttatatccttatttggcagggagagggcggcgattttgtggtgctcgtgcttcaggtgctcctaggcatggattattacgaggcgctggacgtataccggcaggttttccgcagcaacgccgaattgctctggctgggcgcggtcctcgtgacctttttcattttgctgcgcgtggtgctcaattggttcacgcgctattttgcctttatcaaccgggggattggcgatctcctggaggaggatagcgagattcgcttgccgcccgaaatggcggccacggagcgcaagctaaacgccgtaaagggcgagctgaagcggcgcgcgcgggaagcaaaaatggccgagcagcgcaagaacgatctggtgatgtatctggcgcacgacatccgcacgccgctcacgagcgtgatcggttatttgagctttttatcggaagcgcccgatatgccggtggaacaacgggccaaatatgtgaacatcacgctggagaaggcctaccggctggagaaaatggtggatgagttttttgaaatcgcccgctacaatttgcaagaactccgcctgcaaaaggagcccattgacctgtactatatgttggtgcagatcatagacgagcttacgcccgtgctggcagcccatgggaaccatgtcgcgctccaggcggatgaaaccctcaccgcgtatggcgatcccgaccggttggcgcgcgtgttcaacaacgttctgaaaaacgcggcggcctatagctttgccaatacgcagatcgatctttgcgccaaaagcgaggacggttttgtgaccgttacctgcaaaaatcagggcaagaccatcccgccagaaaagctttccgccatctttgaaaggttttaccggctggatgaatcccgcgcttccaacacgggcggcgcgggattgggactggccatcgcgcaggagattgtcgctcttcacgggggcacaatcgccgccgccagcgaaaacaatacggtcacgttcacgattgtcttgccactggaggacaaaacgcaaaatggcaaagagggcgtgtaacgccatctgatcgttgacaaacctctggtttgccaacgaatctgcccgaccgcttgcaaatctgacgatttgcggccagcggtcggggcgggaatgcattttttccgcaaacgcaagcgtttgctctgcaaaaaatgccagaaatgacgtacacgccgtcatttctgattagagcctcgttcttccgagactttgtcaatactctgagggcgtgtaacgccatgaatggtatccgaaaaaggggctgcgaaagaacttttgtcgttctttcacagcccccaaacttttgtcattctgccgctgtgcgcgttagacgcggtcgggaatctggctgatgacctttttgttcaagcggatgaagagcaccgccgtaaccaccgctgacataacttctgcgacggggaaggaaatccacacgagcgtatcgttgcccacccgttggccaatggccgccagcgcccaggcgaccggaaccagcacgaacagctggcgcgccagggaaacgatcatggaataaacgctaaatcccagcgcctggaatacggaaccgagcacaatgcatactccggccacgatgaaggtggaggcgatgatgcgcagcgccggttcgccgatggccagcatcgtttccgtggcgttgaaaaagccgagcagcacatccggaatggccaggaataggatggtgccaatcagcataaaggcgctggcgtaacagagcgatacgcggatggcctgcgtcatgcggctacgcttttgcgcgccgtaattgtaggcaaggatgggaatcacgccgttgttcaggccgaataccggcatgaacacaaagctgttcagcttgaaatacacgccgaacaccgtggcggcggtttctttgcccgtggtgtacgtgatgaggatgatgttcatcagccacgtcatgatggagccaatcgccatcatgatgaccgacgggaagccgatggcgtaaatgcggccgatcaaatgtagcttggggcggaacttgcgccacgccagttggatatccgagttctttttttcgttgataatgatggcgaggatgcacgccacgatttggccgatgacggttgcaatagcggcgcctttggtgcccatatcaaagccgatgggcatgttgaacaggcccatgtcatagcccttgggcaggataaagatggggtcgaggatgatgttgatgattgcgccggtgctttgggtgatcatcgtgtagaacgttctgcccgtggcctgcatcaggcgctcaaaaatcatttggccatacatgccgaacgagaagcagcacaccaccgtgagataatccacgccgaattccacgatttgctggttctgggtttgcgagagcataaacgcgcgactgccaaagaggccgaacagcaaaaagaccagaaaaccaatcatggagaggaaaacgccgtgttcggcaatacggttggcgcgctcgcggtcgcccgcgcccagcgcacgcgacaaaagcgcgttgacgccgaccgctgtgcccgtcgccaacccgatcatcaggttttgcgcagggaaactgaacgacacggcggaaagcgcctcttcgctgaccatgctgacgaagatgctatcgacgacgttgtacagcgcctgaaccagcatcgatatcatcatcggtaccgacatgttcagcacgagtttgccgatgggcataacgcccattttgttttcggcagtgttttccatgggaatcccttcctctccacatccatcgtacttgggtttgcgcgggcataagaggcgtaagaaaagaagcgcgccgccgggcgaaaccgtcggtgcggcttgcggaatccttcaattctatattgcttcttgattgccgcaaaatatggtaacatccctgcgcgtgcctgtcaagcgtaggtagataaactttcggccagaggcatttgtatggcgcaaaaacataacaaaggattgcgcttgccgatggccgctggacatcgtccgcaattttgtataggatatcaggattgccaaaagcgcgcctttaatatataatataatatagattagacgcgcgatgtacggagccttttcgcggtacaatcgtccccggtggcgtgtacggcgggggacgcacgaagcgcgcgccctgtgggcgaaacagcgcgaagtaagcccaatgaagcagggagtgccgcaagtgagcttgcgagcagcggaggctgcgaagtggctggaggcgcgaggacacgcccaaagggcgtccgcagcgccggaacaccgcgccgccgaaggcgagggcggtgcgaagatgcaggacgaccattgcgaattgtggatagcttgctcccccgccaccagcttgtcaaaaagtctttttgacaagctgatatactgccaatcttggcaggatatgggagggaatcggccatggaatatttgacagtcaaggaaacggcgcagcgctggggcgtgtcggtgcgtacggtcaatatgcatttgaatgcgggccgcgtagcgggcgcggtgcgcaaggagcacggttggctcgtgcctgcgaacgcgcaaaaacccatcgaccgccgccgcaaacaggatgaggcgccacttgtgcgcgtagtcaagcgctttatgcccatattttcgatgactttcggcgaaggcggctttgtcaaagctgtggagcagctggaagacgaggaggaacgcgccgtcgcttggacggggcaccactatttccgcggcgaggcggaacaggcgatggagttggcggcaagcgtctttgacagcgaaagcgccgagatccgcctttccgcgcgctggctgcacgcgatggccgccatcggcctgggaaacgaaataagttgtcgggaggactttgccgaagtcgtgcgcgagggcgtagacgcgcaggatgacgcggtgcgcgcccagagccagttcattcaaatggtcgcgaagatctattttcatgaggaagaggttgacattgctcaattgatgccgcatttttcccacctttccaggggcgtgcgctatctcgcgctctatgggcgcgcccacgcgctctatttgcgccgggaataccaacaggttatcggcgaggtggaagccgcctccgcgctgatgcagcaggcttatccagtggccgccatctatctcaatatcgtcggggccatggcttccaacagcttagcgcgccatgaggacgcgcaacgcttttttgaccgcgcctgggaactggcgctgccggaagggtatattgagccgttcgccgagcaccatggaatgctacaggggttggtcgagcgcaagctgcgcggcacgcagccggaactttaccggcaagtatcagacctggttttgcgcttcagccgcggctggatgaagatccacaacacgtcctccaagcgcaaggtgacggatgcgctcacaccctatgagttttccatcgctatgttggcggcaaaggggcgcagcaataaagagatcgccgattatatgtacatttccgtggcttcggtgaagacgtatctggccacgatctaccagaagattggcattacaaagcgtgcggacttaaaatactacgtaaattattagccattttgcttctaaaatggcgagtgacatcttgctttggcaggccgtataatgtaagtaaacggcctgccctttttatgcctttgtgcgatgggcgcggaccggaaagcgaaaggattgaatgcgcgcatgacgggtacacagggttcgcgtcggagccgccgcatcatcgccagcgtgctggtggtggcgatgctcgctggagccattgtcaccgaccaggtgggcgggaatagcagaagcgggcgctatgccggtttgccagcctatgcctatctggccgaggcgatggagtgcctgtcctatggctggctgcgctggaccgcttattggctgggcacgcaggttagcagcgcggacagcgcctccgggcaataccgccgcgcctgcattggcgtcgccaacggggatttcgcggatgcggagaaatggctggaagcgtatatcggggcggaacccgggcactccggagaagaaagcgccgctctcaccatgcagttggcctgcatacgatcgctcaatggcgacgcgcagggcgcagcgcgagctgccagcgaagccgcggcgcaagatgcaaaaagcgctcggctccagcaactttcgtatcggtttagcctggaggcgggagacgcgcagggtgcggccaatgcgctgggcgcctatgcggaattggtgcaagacgatactctctacgaggcgattgcagatctctatttagaggcgggaaattatgaagaatccggtcggttttatgatttggccatagggacgagcggcgcgaacgaccggttgctctatatgcgcggcacgtgcaacatgctcttggggcgctatgccgaagctgtggaggactttgccgccagcgccatgcctggcagcgtctattctcatggggtgtgcgccatggcgctgggcgattttgagcaggcggaaacttgctttgccgaagccatggagcgcggtgagcaggaaaatgacgcgcggatgatgctggccgtgtgccgcttggaaggcggagcgtacgcagaggcggaagaattgctcgaccagtatatggccgctggcggcaattacgcggatatcgcctattaccgcgcaaacgcgcgggccatgcagaaaaactacgcaggcgcggctggggactatgcctcggctgccgaagccggacaattccggcaggagagcttgttcgccgccgcccagtgttactattttgcgggcgattacgcgcaggcgatcgagtggtttgagcagtgtgtggaggaagaaatcgaccttgcccagagttggtattaccttggcctttctttgctggccgtaggcgagaacgagcgggcggccgaggcgctggacaaagcgctcgccgccggcgaaacgaacggatgaggaggatgaccatgaggactttgcaacggtttgccgcgtgcctgctagcgctgctttgttgcctgttgcccaccagcgccgcggcgcagtctttggacgcggcgcagcagctcaatgcctattatacgctgatgacgttgtcgctttccgatggcgactttgaggcggcgctggactatgccagtcaatgtctggaaatggacgaactcctcgacgatgccctgcgcgcggatatttatctcaagcagggctatgcgtttttgtatttgcagcgctttgaaaaggcgctgacggcattggatacttgtttgacgttcctacctggcgcggcggacgctatgttgttgaaattgcaggcctacgccgccgtgggagatgcgcaagccgccaaagagcaggcggaagaatatttggcaacgtatccagaacagaccgaagtttattctgtgctcggtgaattgctcgcggttgcgggcgattacgcgggcgcggtggaagcctacaccagttatatggcctccgtggaggaagcacccgcctccgcttatgagatgcgcggccagtgcctcttgcagatggggcgttacgaagaagccgtggccgatcttacgcaggccatcgatttgaacgaggcagcgcagccgcgcacacattatctgcgcgccatcgcccagatgcagttgggcgataacgcggcggctattcccgatctcgatgtgtgtgtgacctacctcgaagaagaggaggcgcgcatggccgaggacgagcagtatatgcccgaaattgacgcggacgttctttacagccgctattatcgcggcattgcccatatgcaagcggctgattatgaagcggctatcgccgattttacgtcctgtgttgaggatggacgcaacgcggaggacgcgcgcttctggcgtggagcctgctatttggatacaggcgaatacgcattggcactggaagactttgacttctgccgccaggctggcgtggaagaggaaaatagtctctattacacggcactgtgccacatgggcatggaagactacgaagccgccgtggagggctttaccgagtgtttggcgcagggcattatgaccgagcaggcgctttacaaccgcggcatgtgctatttgcaactgggcgatacagaaaaaggacaagccgacctggaggcctccctctcgcagggggcggcgcaggatgcggctgaatgatatatagatagcgaaaagcaaacgaaacacgttttcaaaaaggacgcgtagggcgcagcccggggaggccagaaaatgaagaaaaaaatgacggcgaaaaaatttagaatgcgcatcggtgcaatgctgctcatggtgcttatcatgattgtgggtagctgtttgaacgatctgcgcttctttgcgttagccccggatgcaaacggggctctggcagaaacagggcaaaaagtagagaccccgcaaccgtcgcaggagtttgttcctggatcggaaccgacgccgggaacgacgcccggagctttggtcacgccggaagcttcgatcacgccggaggtttcgaccacgccggaagcttcggtcacgtcggaggtttcgattacgccggaaccctcgcttgtgccggaagcttcggtcacgtcggaggtttcgattacgccggaaccctcgcttgtgccggaagcttcggtcacgtcggaggtttcgattacgccggaaccctcgcttgtgccggaagcttcggtcacaccggaggtttcgaccacaccggaaccctcgcttgcgccggaagcttcggtcacgccggaggtttcgataacgccggaggtttcgaccacgccggaaacttcggccacgccggaagcttcggtcacgccggaggttttgaccacgccggaggtttcgacgacgccggaggtttcgacgacgccggaagcttcgacgacgccggaagcttcgacgacgccggaagct

SEQ ID NO: 32 - DNA, 2788 bp, Unknown
  16S sequences of unknown bacteria
atctgtctcatcctcccggtcagtcttttttccctgacggcttctcatgccggatgacaaactgagtcacatgtccggatgccgccatcacaagtactgtcgatactgcagtcaccacaatcagctgccagaaaatcggactgatccgatcccaggactctgtcaggccgaccgctgcaggaataaacatcagcggcatgacttctacaagaaatttgccggtttcttttaccccatccatcggtataatatgacagcacagccctgcaagcatcagaagcagaccataaatgctggccggaatcggaagcggaagcaatgcatgcaacacctctcccaaaaacgaaacagtaataataatcgaaaactgttttatgtatttcatatagatccttctttctttgtatcacgatactgtaaagccccctgcgcttttggtacccccgatacactaaaagaaatgtaaagcggacagtcgcttcgcgatctatcgttcaagatattacattctttccggagcggcaaatccaagcagatcaatgctcgtctccagcacctcacgggtcagatccagcagttcaatgtagcttctcttgcggtctgcatcttcctcggaaagaatttttgtttcatgataaaaatgattgaaatcattcgccagatcatagatgaaggagcagatcttatgcggagccagctcctcaaatgcctgctgaatcatactgttgaatccggtcagtgccagcatcagcgctttctcactctcacctgccggtaccagaatatgtcccttttctactgcattgccacccgcgcgatacttgttcaggatcgacttgatacggacgattgtgtaaagaatgtacggacctgtattgccctcgaacgatgtaaatttatccaggtcaaagacataatccttggaggcctgattggaaagatcaccatatttgattgcggaaaggcctaccagctttgcagtctcgcgtgcctctgcctcgtccacctcatggttctccgtaatcttacggaacatctcttcattgatatctgcgatcagatgttccagccgcatcacaccgccctcacgggtcttaaacggcttgccatcctttccgttcattgtgccaaagccgaggaacttcagaccggtatcctctttgaccagtccggtctttctcgcacagcggaacacctgaatgaaatgcatctcctgacgcttgtccaccacatagatgatctcatccggatcaaacagcttccggcgctcaatgatcgtcgccaggtctgtcgtcgtataaagagcagcgccgtcagacttcaggatgatacacggcggcacttcctttgtatcgctctccttcgccacatcaacaatcaacgcaccctggtccatgtaggcatagcccttttccttcatttcttctaccatttccggaatgtacggctgtgcatcgctctcctttttccagagatcaaattctacattcagattgccatagttctttttcaggtcggcaatggaaacgttcagaatctgctgccacagcgcacgatagccgcgcacaccgctctgcagctttgcagtcgcctccagcgctgcctcacgaaacgcttcgtccaccttggattttccgctcgccgtcgggtagatctcctccagctcagagatcgtaaacggtgcttcttccgggtattctccctcataggactcatcaaaatagacgagctccggctggcgctcctttacctctgtgataataagccccatctgcagaccccagtcgcccagatgcacatcaccgatcaccttatgtccgacgaaacggccgattcgcttgatgctctcaccgataattgccgaacgcaaatgcccgacatgcagcggctttgccacatttgctccgccgtagtcgatcatgatggtctttggctctgccgctttctcgactgacagcctctcatctgcctgcatgccattcagatactctgccacaaaatcgcctgcaatccgaatattgataaatcccggattcaccgctacgatctcgtcaaacatcggatcctctttcagcgctgccactacatcattggcaatcatgatcggagcctttttatatttttttgctccggccattgctccgttgcactgatattcacataaatccggccggttcgaaataccgacctttccataagaagcctcatagccgcatccttcaaatgcgtccatgacctttttactgattaagtccagaattttttccatgctttccaccttttccaagcggcaaatgccgcatagcttcatttttcgtgtcaatatgttagtatagcacagaagctttctcctctacaatatgttttttgaatttttccggttctgtatagcagcaaaatgtccgcccgccatcatccacggccacagcacctgaatgttccacgccagataatacccaagtgctgtacttaaatctgtaaatccagacgcagcaaaacagatcagcacgcatatcatcgcccagaacaggtaccggcgattatccccctcatcttccttccacccacaactacagatcagatatacactcgcctgcacactgacggcgcgcagatattccagtgcaagcccggcagtcaccaccaggacaaacagtacagccactaccggaaacacgatcagcaccgtcactgtaccgattgctgccgcaatgcacccagaccttctcctgctctttgtaaagcggacattcgcaatccgcttcgctacttgctcatgaacgcagtc

SEQ ID NO: 33 - DNA, 5682 bp, Unknown
  16S sequences of unknown bacteria
tttgtcgcgcggggcgagaatatagctgacggattttactcggttgcagcggacgccgagggcgaaacctgcgcggaggcggacgccgcgggcgaagcgctgggcgcgggcgacggcgaaggcggcgcagtggtgcccggcgtgagcagcgaaaggatttcgccatcttgcacggtcatgttataaccggggtcgagcgtatagagcgcgcgcacgttttcaccgttatacacggtatcgatgcatagaccgaagatataggtgccatccggcagcgggcccaggtcttccgtgctggttatgacgttggcgacgtcgaacttcacggagaattccgcctcatccaaattaaaggccttatcgctggtaggctggttgcccgtgatgtttttctccttcaccgtggggtaggccacatagtggttggtgccgcgcagccgcacaatcaccgtgatttccgattcgcgcccgtcgaagccgtaaacgtcggcataggcccaaccctccatcgtgacgatggaaccggtaaacgagaactcggaaagccccacattgccatgttcatcgtcgcggttgccagggcggtattcatcggacatcatggcggtggcgagcgccggcgtgggcgtgggcgaaggtaccggcgtgggcgtaggcgtcgcgttcggatcgcgcgtaggcgccgccgtcgcgatgggcacgggcgtgagatccgcctcggggaactgcgatagcgatgtgggcgtgggcgttgccgcagggggcatgtcgctgtttgccacatagctgcgcgtgtccgaaccgctgggcaacaggtgcgaataatcaaattgcgtcagcagatagatgacggcgctggcgatgatgatcaaaatcaatagcccaatcaaaaacttcacgattgagcgcccaaagtgcttgcgtatccatttgtggaagttcatggcgtacctcccaagccgctgtatttgcattcctgcccttatattacacacaaattgcaaaattgtcaatagaaattcctgttgcgccaggaaaaaccacggataaaaagaaggaattttgtggccgaaagcgaaccataacagagaagatgcgatggtttctttgtccgtcagacgagttctggcggtttttgcgcgtttggggtttggcgcaagaaagcgggccagggcgattgacaaaggcccgctttcggtttaaaatagaaaaaagaagcgagaagctgtttgaaaatttcttaattcaacagcttctaaaaagagataggggtttttctatggggcaaatgagttacgcggtctttgtggatttggagaatgcgggcgccaagcagagcacgttgcagaacatcattgaaaaggtcaaaatccgcggggacatcttgctgggcaaggtatatggctataccgaccggtatacagagctgaaggaagtgctgctttccaacacgtttaacgtcgtcccttcgctgcgctatggcaaaaaccagaagaacaatctggatatccagttggtgatcgacgcgatggaggtggcgtatgccaatccgctgatcaatggattttgcattgtttcaggcgatagcgattatacgccgctggtgggcaagctcaagagcatgggcaagcacgtgctgggcatctcgcgctcggaggtggccagcaacattttcatcaaagcctgcaatgagtttattttcctggagagcgtggccacgtcgccggtgaaacagcagccgacgcgggacgcggatgtgcgcgaggatatcaaggaactggcggagttggtgcccaccatcctgggcgaccaggcggaagagcggatgtacgccagcgagctcaagggcattttgctgcggctgcgcccggatttcaacgagcggaattatggctgtgggagttttggcaagctgatggcgctggtggcccgcgaatccccgcagatccgcctggaaaccgtggattcttccctcatcatcgtgctggacaatggcgaggcgcccacgcgctctttggataagagcaattggctgccggcattccgccaacaactggagcgcttccgggaagagggattcgaacgcgtgaatcccagcatcctaaaggctgcgatccaggcggaatatccggattttgacgagcacaagatcggcttcaaaaagttttcggatattatgaagcggctggagcgcgagcacttgctggtggttgaaatggacgaggcgaagaccatgctgcttcgcatcatttcctgaggtcaaatatgcgtttggcggtcatcgcggatatgcatggcaattcccacgcactggaagccattttggccgatgcggaacgcgtgggcgtggatgccatagcctttttgggggattttgtgtccgattgcgcggatcccgagggtgtgctcgccctggcgcgcgaggcggcccgcgcctatccctgctgggccgtgcgcggcaaccgcgaggaatatcaggttcgctatgccgaaggacaggaagcctggcgcgcggattcgcgcacaggctcgcttttgtataccgcgcagcggttgagcgcggcggatatcgcgtatttccgccgcctgccgcgttcgctcgtcctctctgtggatgagaggccggacattttgttgtgccatggttcgccatgggccacgcgcgatttgctcacgcctggttccgccctgttggagcaagcgctttcgcatgcggcgcaggccgggcacgcgcttctgctgctgggccattgccatgtgccctttgttttgcgcaaggacagcgtactcgcggtgaacccgggcgcggcaggcctgccggaggacggcgatccgcgcgcctgctgggcgttggccacgtgcgaaaagggagaatggagcgcgcaattgatgcgcgtgaagtatgatattgcgggcgcggtgcgccagatggaggaacgaggtttggcggatatggcgccctggtgggcgcgctgcatcgcgcataccatgcgcacgggcgtatgcctaaacatgcaattgctctcccgcgcacaggcgttatttgagcaaggtggacaggcgatggaaacctgcttcgcccaggcgggcagggaattggggttgtaggcagatgcaaagcgtctggcgcactttggtcacatctgtaaaaagccaaatgttgccattttgtgcgccgcgtggcagggcttgacaaatgcccgtaaagcaggtataataaagccagaaaggcggcgcgtgcgtccgcttttctggtttacccacccgccaggcgggtggcgagagtgtccggggaatgcggcgcatttctccggtgaggcgttggcccggtcaacgccggtacactgcccatttcggcagtgttcttctttatgttaacggatggaggatgcatcaatgtcggagaaccacgtggttttaacgaaggaagagcgcgaacggctggaagaggaactcaacgatctcaaaaccgtcaagcggcccgccgtcgccctcgaaatacaggaagcgcgctcccatggcgatttgagcgaaaacgcggaatacaccgaggctaagaacgaagaagcgcgcatcaacggccgcattatggacatcgagcagattctgcgcgtggcggaactggcggatgagacgaagctgcaaggcgatgtggtgggcgtcggttccgtggtgcgcgtgtacgatatggaataccaggaagaggatgaatacaccatcgttggcttcacgggcgcggatcccatgcagatgaagatttccaacgaatcgcccattggcgcggcgctcatgggcgcgaaagagggagacgtcgtcaccgcggacacgccggctggccccgtgaagatgaaggtgttgtccgtgggccgcgcgagcgtgtaagcataggaggaagaatatggcggattacaacagcgcggattgggcgcgcgaggtttccgagcagagccgcatccggctggataagctccatgcgctcgtgcaggcggggaagaatccctatcagctcacgcggtacgatgttactcacagctccaagcaaatcctggagggattcgacgcgctttcgcaggagggcgtgtccgtgtccatcgcggggcgcatgatgtcgcgccgcgtgatgggcaaggcgagctttgcgcatcttttggatcgcgatgggcaaattcaggtttacgtaaagcgcgatatcgtgggcgaggaagcctacgccgcgttcaaggactacgatattggcgacgtgctgggtgtgacgggcaaggtgttccgcacccatgcgggcgaaatcaccgtggaagccgcgcagatcacgctgctcaccaagtccctgcatccgctgccggaaaagtggcacgggctgaaggacacagatatgcgctatcgccagcgctatcttgacctgatcgtgaacccggaagtgcgggataccttcgtgatgcgttcgcgcattcacaatgaagtgcgcaagttcctggatgggcgcgggttcctggaagtggacacgccggtgctcggcacgctggaaatcggcgcggccgcacgcccgtttgtcacgcaccacaacgcgctggatatcgatatgtacctgcgcattgagacggagctgcatttgaagcgcctgatcgtgggcgggctggagcgcgtgtacgaagtgggccgcatcttccgcaacgagggcatggacgtgcggcacaacccggaattcacttccgtggagctgtatcaggcctatacggattatttcggcatgatggagctgatcgaggcgctgtttaagcaagtggcgcaaaacgtgctcggcacgctggatatttcctatcagggcgaggccatccatctgggcggcgagtggccgcgcatgacgatgaaggaagccgtcaagcgctatgccggcgtggattttgacgcttggcagagcgatgaggacgcgcgccaggccgtgaagcaggcgggttttgagccggaaaagaacgctacgaagggcgaatgcctgaaccagttgttcgaggaaaccgtggaacagaacctcgtgcagcccacgttcatttacgattaccccattgaggtttcgccgctggccaagcgcaaggcggacgatcccatgttcaccgagcggtttgagtttttcatgatccgcttcgaaatgggcaacgccttctcggaattgaacgaccccatcgaccagcgcgagcgctttgaaaagcaggtggcgctgcgcaaggcccagggcatccacgcggaagtagatgaggatttcgtcaccgcgctggaatacgggctgccgcccacgggcgggctgggattcggtatggaccgcatggtgatgctgttcaccgattcgccttccatccgcgatgtgttgttgttccccacgatgaagccaatcagcaagtaaagtcttgatttttcaagggcttcaaggcttttcgagggttgaaaaatccgattctacaccagttttacaccaattgaaatggaatccggctctggtgagctgaaagacacctcttttgacagggggtgtcttttttgggtttgtaaatttttggggggtggtaaattttgcaaatgtttcagggactgtatcccactctctggggctgtgaaaaaaaggagcaataaaaaaagaggatttggcgccgaagagaggcgctaaatccccttttttgtggtataatttac

SEQ ID NO: 34 - DNA, 9857 bp, Unknown
  16S sequences of unknown bacteria
aaatattggagaacgtgaaaattttgccgaggatcagaagcgccgcggcggtaagtccctttgataaaaattcataggggattcgtatgtaattgttattttcctttaccgcttctgccatttcttaaccttcctttatcctaaacctcatcgaaaagcgacagctgccgcggaatattcaaatatatatcctcgtatgtaaacagcttttccgtaaccgtcagtttacgcgttttatccgcgtctatcgtgcgggagagggttttctcccaaacggaaataaaatcaggcggcgcctgctgttcgctgatgagtaccgtatgcccggtcttggatagttcccgcatatattcccaaaatgccgcgtgatcgaatttccccgtagtatagcccgtcgtgccctgatagggcggatcggcgtaaatcaccgactgcggcgggatctccacttcccgataatccccgcagagaaattccgcgtttttcagcgccgccatatctttgagcagcgaccgcttactttgcgccgcataattcgtattttccgcgtttctggcgtaactaccgaaaaacttcccgccgaagctgcaaccgaagccgacaaaccctgtaagcgcgggatcggtgtctttgttcgccttgattgcggcgtattcttcttccgtcacgacatcgggcggatcataaccttgctgtacggctttaagcagcgcgatgaggtatttatgcttatcgtttaagatcatgcggtcaaagcccttgactttcgcctcgatagcgcacgagccgcaaaacaagctgataaacgcccccccccccgcaatttgacaggatttccgctatctcccgcgcaatccgactttttccgccgaggtagcgcattgatcagtgccgcgacgtcgtttgcgagtcggctttttccaccgaggtattgcatatcggctccgttcttttcatctattctcctaattcaccaaaacggcgtttgggatcgacaatttcccgttttctatttttaagattttatttcggatcatgcgattgatcgccttgcgcacggtgtcacgatccatattcaatgatttggcaatcgtcttataatcgacaaaggcggccggctccgcgccgaggtgcagagaaatgacgcgcaggatctgcgccgacgtcgcgtcgatttttgttaaattttcgattttgatcgcccttgtcatttttttcgcctcaatttttccctgtgccgagggtcgccccctcgtcggcggacgcaagcgccgccttctgtgggggaatggggtacagcgcgccgcggcttgattttagcctccccgcccgcatgacgttgcccggcgccgtgtccggtctgcccgccggctctgcgcccgtcttcccccgccccgcggtgcgggtgcatacgtccgcagttccgtcggtctgcccagccccgtcttttctccgggcaacgtttacctattcagatttatctggctccgccgactcacttacttcctttgcgccttcggcgcggctacataagtgagattgcccgcgcctgggccgccgcgcttttgccccgctccgcgtttgcgttcgtcgcatacctgccctgcccgttttatttttgggacatacgctttattgttgttttttgtcaccgcatttgtcggagtattcccgcttttgccatacatactttacaccgactttttcgcggtatatctgccgcttaattgcctctatgccgttatcctcgaacgcctcgaagatctgatcgtaaaaatggcttttcactttcttcatctcttcgcagctcgggtgcagatccgcatagcactcgaaatcgtttaatccgtatttcgaacgcagcgccttcttgtcgtaaaattctttgattccgtccgttgcaaaccgcgccgcataatcctttttcgtagagagataatactttcccttatccgtcagtttctcgtccgtcattccgttcgcacacgcagcgtcgaagtatatatcgaatactgattgaagatccgtacatagtggttattgatcggactatatagctttttaagcagatatacaaacagcgtattatccccgcgtaagtttcggatattataatagaccttatcgaaaagccgtgtcgttatcagatacaaagcctcctctatcgcaaaccccggcatgacgattttcgcctccgacgtctttttgatcatgatgatatcgcaaaggtctttatcgtccgccgcaagggaatccgcacgctggtcgtctaataacattctgaaataagtatagttatctatcgtagccgcgtgtccgtgcatttttacgtccagctcgaaaagatcgttgtgctgattacagtccggggaatctttttttcccgttctcgtgtgttgattcccacgctctttcgcgtgttccatttccgccgcgacgccgatctcaaatccgtctttgtacggatcattttcgcctttcagtttccccagccgcatggcattataatccaaaatgtggcaatattcttttttcagttcctttgagctgcggctgaaaaaatcatcgtcaaagagcggaaaatttccgttgtctattctttgagtatccgtgcggatcgcgtaattcgccacgatcagcggcgtcggcgccgcataaatccaatagctctgcgcatagttttccaggctttcgaatatatccgctatatataaattgttgtcgtatgtaagaccgtaacgattataatcatagccgaaaataaaatccccgaaagtatatccgtatcgctttttcaacattttcaaagcgtgctttcgcgtaccgcccggacactcgtaaaaccacgttttcaagtatcgaataaatcgtcttacccgcgccagcgtcggcaaagatccgttttcgattccgtactctattaccttttccagattgatccagggaaagaagggaaactgtaaatcccgctcccgcagcttctctctcgccttttcacgaaacacactcgcctgcgaaagcgccatactcgtgattgtcgtcgtctttttcgcgcgctgtttcccgaccacgaacagcgcgcccgggtgtccttccagaaatgcgcgatctttcacttcatagctttgcaggactttcaagcctcgctcttttcggatatgatcgaaaagcaaccaaccgaacacaacccacatccaccacggcagaaaatcgatcgccaccgtcagatccatcgccagctttgccacctgtgtgtagatatgcagcacatcgaaactcaccgcaaaatagaacacatacgcaaacgcttccgtcaagatcgtaattgcgttcagattgtacgtccacagcagcccggccgccaagcaatagattttccgatcccgcaaaaaattgatatactccgaaacaaaatacttgactttattccaggtcgccgcctcgatttttttatagatccgcagcggcttcgtatccgcgttgtaatcgttgtttgtacgcctgtacgcattctttatcacgaaatacagcaacacaaatacaggaagcagtaggatcaacactttcgcagctctcgaaatcgtttgcgcgaatttcatcagaaacgaaagcgcattgtctttgtcgattaaaagccggaaaaacttactcaatcccgattgaaattccgcaggctcgaagggtaagacctccgtcgcgccgtgggggatctgtgccaccgtcggcgtgatcacgccctcgaagcctaaaagctccgtgaaataataccccaccgaaagcccgaaatccttgaacgattccagcactcgccaaaatacaggacgaaaataaaacactgataagagcagcgaggcaagcaaaatcgacacgctcaaagcgtgatatatcttttctttaccgattctctttccgcttgcctgctctttctccatttcagaacacccgtttgaacgtatagactacatatagcactaccgccgcgatcagcacatacaatatgatttttaatatcagtttcaggattttcaacatttttccttgacttcctccccgctttcgcgtataatagtattagtagcgtgagttccgcaagggacaaaacggcggtgagataatatcaataatctgtggtcgctcattgagaagtaacgttcccccgttacttcttatttttttgttgcagcggatatttccaaggatatttttccccgaaattctttttctcgtcatgcctcacccgtttccctatatacatagggcgcgggtctttgggattgggattcggctctaccttctcattaggactattcccgtctttttcgttgtgcatgacttttcggtatttatactcgtctgtttcacgctctttcccttgattgtctgtctttttgccttttttctcgcctacaatcaaagcggggtgattcgattttttatatttccgaaaatgcgggaatttttctttctcggcagttttggatttttgcccggtattgccgggcgtttgggtttgtttgccagcgccggattttttcgccggcttcgctgcggtttgccgttgcggttttacggattttttcttacccgccgttttgttcgcggcgggctttttcgcgttcttctgcttgttcattttttcgccttcgtggtagtcttctttttcttcgccgccgacgttcttcgctttggcttaatgatccccgaccagatcagaagcttatacacgcccgcgacaagcgccacgacagccaataccaccaacgcgatccccgccgcgatcttgatccacttcatcgcgtccgagccgttcagcttatcccacgttttcttgatccattccttcgcgtcgtttaaggcgttcttgatcgcgctgtctgtgtcgtccgcactatccgctccgccgttcgacaggtacggattgtcgctcgttccgtccagatagaaaaaatagctgtaatacatcgcgttgtcgtcgtccacaagctcgcataagttcatgcacatcgtcgagagcaacggcgtaccaagcaagatccccatgaatccgcctttcgtcgccagacgattgaaaaaccgatataccccggagccgcgaacttcgctttgtgaaaagatcgtcatgcacccgtcgcccgtgttgttcctgaaataaaagttcagatccgaaacctgctctttgaacaccgccactgagaaaaagccgtacagcttttcacgggcgacatcattcgaatatttgaaaaagtgtcgatccgtcctgttcagaaacaaaatagaccaatccttgccgtattcctcgcaccaatccgcataactcgtcaacgggattttgatttctttcacgttcccgttatagtcgatctgcttcaatgccgcatacgaatatgccagctttgccgtataggtcgatactccgtcgaacgttacactgatactttccgccgttgccaagcctaatatatccagattatccagaccgagaattttcgacatttccgcgtttgtcgggtgataaatgtccgcgatgtccttgaccttgaccgctcccgaaaacaccttcttttccgcgaaacacgccttcaccggctttccggcttcatccttctcgccctttttcatcccgtaatcgatatagttttccagatatgtgacaaccattttccagctgtccgtgaaaacgacctctaccggcaacacctctttcgccgtcgtgctcgttctcacctcgattgccgcggttcggtaatcctccgcgttcgtgattgtcagcttatccttaaacgccgccggcgtcgttaacctttccactcgatagcccgcggggatattccctacaaaatactcccctgtatagttcaggctgttatgatttaacgtcttgaacgtcatgccgtcatcgtagttgttcgttatgcaaaacagcgtgttatacgcatattccaccgtaattttgcaggtatgcgtttccgaatcgtaggcgctgtattccttgcgtatcgacgcgggaatataatactccgctccgccgaggaaggcgggatttaccgccccgctcacgatctcgccgtagtcgagcatgaaattcgtgaaattatacgttacgatctcactatacagtttcacgatcggcgccgacgttttcaccgtttccgcgatttccccgcccgacagcgacagctccgcgtattcgtatgtcagcgtatattcgacgtcctcgataatctccgccacgccgatcaaggacaaattcacaagctcgctttccctggcgttcgggaaggttacgatcagcgcctcgtccgtcagccgcgtcgtcacgccctccggtacgcccgtgatgcggatattctctttcccaaaatcaaacagccaattacacgaattgtgcagctgctcctcgatgtccgcgaaatcatacgtcagcgtcgtactcgtcacgccggccaccgcttccgtcgtgtaataatctatcgtcagattattcgccggatcgttattcgtcacccgcagagaaagatccttatactgaaaatcgttgtatcttacttccaacattcccttttccgtagtcgggttatagctgtactcgaaatcccgagcttgtaaaatgatccgctcctgcgtcgtgtatttatatccgtcccgccaataatcgcccgtatagaccgcattgaaatccgcgatattgctatactccgtcaaactgtataacgtagaaatcgcaagcgttttattttgtgcataggcactttttagatgaaatgtatagctcttttccgttagcgtcgcatagtccgtcaattccttatatttcaacgtcacggaaatctcggcggtggagggcttgatccccagaatcgtctgaatccccaaccgttccgcgtccgtcagcgactcgcttccttccagctgcgtcatcccaatattccaaatcgaatttttataatatcccgaggattccgccagcgtttccgtccgttcgttcgcaagtcctgaactccccgcgtaatcccgatcaaattctactgtgtacgtcgccttaatcactttcgcgcggtaataatattccgtgttcaaatcggagggaatcgctatcgacagcacgccctgcccgctacttaaaaacgtactcccgaaagtataatcatagctatacggggaatacaaaggatcgtttgaggatgggaacgacgcgcccggtgtgtccggtaaatagtccgattgctcgatatgataatataccgcctccccgcttcctgtttcgctcgtcgaatacgtgatcaccaacagataatccgtataggaacggctgctcgctgttcggccctgcttcaacccatttaacgccgtggacggaactcgcaccgaaaaggagattgtcggatcctcgtattccgacgtgtccggagagatattctcaaaactaaatccgactgtttccgccgctttcgcctggatcggcttatacacgcagaatagcccgaacacgaataccgtgcaggctactacaaaagtcaggattagcgtcagttttctatgtagcgttttcatctccctcaccttcttaaaatacgatttcgccagggctaagctctattttctccaccccgatattccccggcttccgcacagaaaatccgactgtcagcgtacttttcccgctcgtgatctccattcggaatctgtcgccggccgggatattttccggcagctcgatctccgcgtccggccatacgtcccgcaacgctttctcgattccgcccgaaagtgtaaagcccgtttccgttttctcgacctcgaatacctccgtgaaatcctcgcctttgccttgattcaccctcgctatgctttcataccagctatgcgccgtcccgttcactgtgaacgtaaaatccgtttcttccgttccctgcgcgtagatcttcaaggcatagcccgcgttcttatcccgaagctttatcccaaactccgactcaggctctattttcagacccgacacggattttttatagttttcgcccgcatacgtcaacgttatttccggtctgccgataaatccaccaaacagccgcgacaaaagaccgagcgaaaggagcagcaccaataacacgatcagcgccgtcagtattctgtttcccgttttctttcccgacatcctttcgctcctttgcctcgtttcagaacgtcacgcccgactgatctatttttatactctccgcttgcagttgattcgccaacagttccggatttataacgatatggaatgtcgccgctatcgttccgtttggacggtccataagtttgatgtaatatgccggctcagccccaaaatttaacaaggctttaattaaggcgttgcgtttggacgcctctcctccatgcaacgctctgccccagatttcatctaatacacccgttaaacgatgataactttcatattccgcatctatactcgtccatctcggcagctgcgacgcgtcaagcttcacgacattggttatataatctttgaattgttccgtggcttctatttcaaaatagtttgccggcgtatattccgcatcgcttatcggctttgtataggtttcagacaacttctcactgctcccagcttccgtattcaccggcgcactgaatgatgcttttattgattgtgttaatacttctgcaccactcgattccgaggtcggcgcaaaccaacgcagcgcttcttctccgtttatctcgttcccaagccaaaagccatagcctaaaaatcgctgttgataatcggccgtacacgtcgctgtcgcgcccgtgttatcccggcttgtcactgtcaccacgatctgctcaccaaatgccgctacgttctccacgacagcagtcaacgctccgtccgaagaaggcgttaccgtcacatagtccgttaccgtctttccctttgcccaggtcgagcttgcgtttttgaatgaaatcgtccaatccaccgcctgattcgtcgcgtccggcggcgtgatcgtcgccgtcaacgtgtatgcaccttccgcctgcgcgctcactccgttcgccgcgtactccgtgcttgaaagttttgtcgccgcaatttgcagcccatgactttcccactcgttaaatattaccccccccccgtctgtttccgcaggtacttccagctcgatcttttgttttccgccgtgcagtatccgctctatcgcccgatagcacccggcgccgagcatcaggctcaacagattcgacacgattcgcgttttcttatctgtcatttttccgtttctcctatcagaatacaatctccgtttcgtcgatcacgaggttttcaactcccttttgagtcttgatcgtcgttgcatctaacgtgatattgaacgtccccagctccgtcccgcctttggctgtataaatcttgatttcataagcgttgcctttgtagccgtcgattgtggaaataagtttattcttattgatattactattcccgtataaggctactccccaagcgctatcaaaaaaatccgtaagcgttgcgctttttccgccggaatattctttcaactcacttgccgaaaaaccggcgcttgtgagtgctgtcttaaatgtttccgtcggcttaatggtaaaatatgtcacgtcgtccgtattcgcccgcgtatagacattcattttattcgccatcagcatagcaagtgaacctctgggcatagaaaaagtcggcgcgacgctattcgtttttgtccccgtcgtactatatgtttcggagtccagcatcaacgtgtagcccgttgtccgctgcaaatattccacggtgcaggtcgcaaacgcttccgcattgtccctcgacgtcgctttcactacga

SEQ ID NO: 35 - DNA, 4827 bp, Unknown
  16S sequences of unknown bacteria
ccccggctcccttgtgtaaagggagctgtcagcgaagctgactgagggattgtagatttgcgaataagcctctgctttatcactcgccgctgtttgagtcgtttgttcgtaagtttatgtgttgccttaaagctttccgccgtagaccgggaaaaccccgctctttccgtagctttctatgggcttaaccgatttaaggacttccatatcctgctcggaaatttcaaagtcgacctcggaattactcttcatgtgggcggggtcggcggttttgggaagagaaacggctcccagctgaagggtatagcgaatgcaaagctgcggcacggtcacgccgtatttttcggccatggccattatgtcgggctgatttaaaatttcgccgtggccgataggagaataggcctcgacgacaatacccttttccccgcagtattttataagctcggcggggctgttgcttatgtgcagcagaatttggttgaccatgggctttatttcggccgtctcgagaaggctttcgatgtcctctttcttaaaattcgacacgcctatggcgcgaagctttcccgctttgtaggcgtcctcaagagcccgccatgccgcgcggttgccctcaacatatctgtcatcgctttgattgaccttgtcccagggttggggcgaatggattatcatcatgtcaagatagtcaagaccggtttttaaaagggtctcgtcaatgctttttgccgccgagtcataggttttgtgctcggccgcgaccttggaaaccgcaaaaatttcctctcttgatactccgcagccgcgtattccttcacccacgccccgctcgtttccgtaggcctgtgccgtgtcaaaatgcctgtatccgagctttgccgccgcctttaccgcctctgcggcattcgaatcgtcgataaaccatgttccgagacccagctgcggaattttcacgccgttatttaatgtcagagttttcgtatacataaaaaatctcctttgtatgatgtaattgtataagactcggccgcacggggcagcggattttcgcgataaatcccgcatttcgcggcggctttgcccttttcatttcaatcatacaacctaaagctgacttcaagtcaagctttttttgaaatttttttatttttcctcaatacgacgaacacatcggcaaatcacatcgcacatatactcggtcggctcggcacattcgcccttaagccacagagatattatcgccataattccctgaatgttaaaggtcaaaacataatttctttgctccttcggcacaccgtagcgttcaagaatcggggttataacatgttgaagaagcccctcatagcttttatcaagactgagtatcgccgaattttcaagacccgtaccgaaaagacggcggttatccttgataaaattaagatagggaatcaaatactccggcgttataaggtaaagctcgtcaagagggcaatccgcgattttcgacaaaaaccgcgccgaatcatgctccatataggcgaggaatttcccgatcatatactccgtgcattccttcaaaaggtcattcaccgtttcgtaatgttggcggggagctttgcctttgcgtcaagctttcgcagagccacaacctttggggtctccttcggcgtatattcgctggccagtcgttcggcataaattttatctgtgttcatttttattcctcctttgttttctgacattataatagcaaaaacaaagaggaaaccaaacaacacaaaagcgcctttgtgtcgatttatgatttataccgcaatttacttttcaaaaaagtctcatatacaaaagcggataggggtttccctgcccgtcaaactcgcttcttttgtatgttttgaaacccatgtgcccgtaaaatcccacggccgacgggttttgttcgttgacggtaacctcacccacaccgagatttttcacggcatatgtcaaaagctcctttccgactcccctcccacgcattttcggggaaacgaacagcatttcgaggcggtctttttcggcgcccataaaggcaatcggctcatttttgctttgccccgcggcaaaaaggcgggaaacgctttgcaaagcatcggacacatattcctttattttaagtatctcgtcatttgacaaaaaggtgtgggtggcacggaccgagtcatcccaaattttcaaaagcttgtcggttgcggcttttctgtcgcaaatttcaaaaatttccgtaaatcttcacctcggcaaatttcattcaagcagttcctttatttttgcaacggtttcacgcgtcaaagccgttcggcctcttttgtgcagcacgccgtcgatttccgcggtatcggacagcacaaaatcggacactacgggactgcccccgttcacaagcataacatatccctgcacccacacgtcgacgccgtaatattcgaggtattttgccaaaatatacacctgtcttttgacctgcttaatggggtttttgacggttttctcatatacattccccgcggccgtttttttatattttttccactcgtattcgttttcttttccgaaaagtaccccgacgtaatttttaacttctattacaaacacgccgtttttgttaacaacgacgcagtcgagctcggcgggccgcccgtcataggctatgctcacatttgaaagcagcgtatccccctcgcgaaggacgctttttatcaccgacgccgcatatttctcgccgtatctgccggatcttttttgcggcggttcaaaaaacgtgccgtcggcatcccgattcgaaaggccgacgagaacaactgcggcggcaaaagcaataaggacggcaatcaaaaccgcggcaataattatcactccgtcacccgcctttctttttaagcggctcggcacatttccgaaccgtttaagcaacagatacgaacacgatttcggcggagaaaaatcccccgatgacaattgaaagaaacgtcggcacccttgtgtaaaggccgaaatcgacctttccgcgaaatttaggcaacccgatgtaaacggccgcggttcgatattttcggctcccttgtgtaaagggagctgtcagcgaagctgactgagggattgtaggtttccgaaacccctaattatcaatttttccgcaatccatatctcatcgccggattgtaagcttgcggacaagccacaaatttatcacccgtcgctgtttgagttgcttgttcgtaaattatatgtcaccttaaacaacaaagccttaagctttgcatccgtggcatttgaaactcatttgtgcaatctaaatttcgacaagaccgagggtgattttccagtttaacacccgaacggccgactgccttatgcgttcccgtgaaattgttccgccgtttacggcgtcaagcaccgcggtatactggctttcgaggtcggaggaaattatcatgtcgtttcccgcctcaacggcaaacacggcagcggatttgtctcccgtgtatgcggttatcgccttcatggcaaggtcgtcggtcattatgaccccttcaaagcccagctcctcccgcagaaccctgtgaatttcgggcgaaagcgaggccggaaggtttgagtcaaaggatttcacaatgttatggctgacaagcacgccgcccgcccccgccgaaatcccggcaaaaaagggcagaaaatccttttgataaaattcctctttttcccgctcgtcaacggcaatttccgtgtgtgtatcggagttgccgccgtagccgggaaagtgcttgagcacgctgcccaccccgtcgaaattcattttttccacaagacgggatatgtattcggccgtttcctcggctcccttgccgagggttcgcgaatatatgaaatccgaaggattttccgaaacgtcgcacacgggggcaagattcacgttgataccgagacctttgagcaaggcgtccttttcgtcggcgtcggcaatgaccgcatctataccgccgcgggaataaagatagcccggcgaatgaaatttttccgagcggaaggccttataggcgctgaccctgaccaccgaaccgccctcttcgtcggttccgatgagcagcggcgtttttgccgccgattggtattcgcttattttttgacggagggactcgggagtctgcccttcaaaatcccgtccgaaaagtataaacccgcccacattaaaccgcgccgcctgctcggccgctccgctttcgggacaacgggcaaaaaacatctgcccgagctgctgctcgagagtaaggccgtcgacatatttttccgccggagttctctcgtcgacagggagggttatcggctcgtagttcggctcggggtcggcatttttctcaagctttgaaacttcgtcgaaagcctcgggaaccgatgtagtttcttccgactgctcggcttcgctttcctgctccggctcagaaacgtcggagacctcgctcaaaaccgaggagttctcaaagccctgctcccgactttgccgacaggagcaaaattcaaatagcataaaggccgccaaaatgacggccgtgagttttttcatttaacataaaccttcttttatgacttaggctgccgtcggctttacacctaaagcgtcgggcaaatggacataagaacgcccgcggccaccgccgagccgataactccggcaacattgggacccatggcgtgcatgagaagaaagttttgaggattttcctcctgacccaccttgttggaaacgcgggcggccatgggaacggcagacacgcctgccgaaccgataagaggatggattaa

SEQ ID NO: 36 - DNA, 28275 bp, Unknown
  16S sequences of unknown bacteria
gaaaaaggcccgcccattttgacggcggaaaaaggcgagctccgagcgcgcacgaacgtccatgttggcagttcaactgtgctgcgcgcgacatagcgagccccgccgtcaaaatgggcaataaagggctttttccccagaagggtgagcgaagcgaaccgaggtcgaggacagccccgaaggggctaccgcagaccgaagcccgcgacgcgcagcggggcgggccgcaagagttgccgtgccgctggctttcttttgcacacttttctttcgccatcgaaagaaaagtgtgaacgccccatgggacggcaagtcccaatccgcgccgtagtcggcgcgtcaggccccttggcagggattttttacaacaaagttggcttacaccactgcttgcagggggctttccgctcgccccctgcaccccttcggttcgcctgccgaaacaaagacccccgtaaggctgcaaaccctgctttgcgccgtggtcggcctattccctattggggaaggtgaatgcgcctgcgggcgtatccccccttctcccttaatccctttgaaaaagccccacccagcctttttcagaaaggagttttccatgatatccactaccgcactggaagtgcagaacgtcacccgccgtttcggcagtatgactgcgctgaacggccttaccttctccgtcgcccccggccagaccgtgggtctgctgggccgaaacggcgcagggaaaagtaccctgctgcgtattctctccggccagcttcgggccaatgagggggaagtccggcttttcgggcagcctgtccggccggaaagcagcctttcccagctgtgcctcatcggcgatacccctgactttggcaaattgagcaatatcaaggaactgttctacgtgtgcagcggcctgttcccccattgggaccagagccgcgccgaggagcttctcagccggtttgagctaccggaacggaaacgcctgaagggcttcagccgcggaatgcagaccgccctgctgctgagcgtggggctggcctccggcgcgcccctgaccgtatttgacgagcccagtctgggtctggacgcggtcatgcgggagcgcttctatgacctgctgtggcaggagacccactccccggacggcgcgtccggccgaaccttcctcctcagtacccatctgatcgaggaagtggcccgggtgctggactcggccgtgctgatcgactccggccgtctgctgacgcagggtacggtcgcggaactgacggaaagctacctgagcgtatccggccagccagacgcggtgcgggccgctacggaagggctcactgtgctgcgagaggaagaaatggccggttcgctggtgcggcaccttcggctgaacagccctgccgaccgggagcggctgacggcggacccctccgtccagaccgcgcccatgagcctgcagaggttgttcgtattcctgacagaagcaaaggaggcggaacggcatggctgaaaaactttcggtctatcgcacctcccggatgaagggcgcgctgcgctattccctgctgcggctgggcaagctgtcactggggctgctggcgctgatcctcctttcggatatcatcgccctgatcatggggctgacgggcttttccagctgcgagggcaccggcgtttcagccaactgggcgctgaccctgtttctgatgctggtgctgagctgtatgctggccaaaagcggcgctacgttcctgtgccgcttcggcacgtcccggttcaccgtatggctgagccagatcgtcagtctggccctgtgcatggtcgggtttgtgctgggtacgctgctgctaagcctcgccaacaactacctcattctggctctcagccgacacaatgaacatttcagcatcctgtgcggctatgatttcgccttcctgccggaggcctatctggcccagtccttccggcagacgatgggggattttccccggcttctgttggactgtctggaagtgttgtgcctgatgtatctgttcgcctgctgcctgcggcggaataaatgggtcacgctggccgtggtcatcctggggccgctgcttttgtgggtgctgacgctggctcccgtgttccgtcaggccatcgatctggtgcagtacggcagtgagggcgaaattttcattcaaagcctgcaatgggtcaactggctccaaaaggcgtggaatttcttcaccgaccattggcggctgatacagggattggccgcgttggtcagcctgcccttgagttatctgtgcgtgcgctccatgccgcaaccgtaattccttccctctccgagttttcatcggagagggaatttctttttccgcaaggaaattcgccttttttcggagaaaacataggagaacgtcaaaaaaaggggaacgcgcctatggaacatacgccctgctggatctggtatcccggagacttcgagctccgtcactctctgaaacttcacgcccgccgtcaggagcgggattactaccggctggcgatctggccggtgtacgactgctggcacagcgtccgttttttccgccgcgcagagctgaccgccccggaagggctgaccgtccttgcccgtggcaagggcaacgtaggcgtggacggtaagctgtaccccttcgggaaggaaatccccctgtccgccggaacgcatgagatcgtggtggaagtgttccgggaggacgggctgccctgcctgtatgtggaaaaaggaagcctgtccggcacagagggctggacggcccagccctttgccggggaaaagctacccgtgggtttcagccccctatttaccctgccggagcaggacccggaggtctttcccttcatctatgagaaactccagcccgtcgaagtcattcaggacgagcggggaacgctgtacgattttggccgggagactttcgcacgggtctttctgaaactggaagaccaaccggcgttttccctctgcttcggtgaatcggagaccgaagcgcgggccgtatccgactgtccgctgatcgagaccgtgcccgctggaacggcttcgatccagttccctgcccgggcgttccgctatgttttcgttcccggcgaggcgaagctttgcctgcgggtggaatacgaacgcacgccgctggatcgccgggggcgtttttcctgctccgatcggctgctgacagatatttggaacacggcggcctatacctttgaactcaacagccgggaattttttctggacggcatcaagcgggatcgctgggtctggtcgggcgatgcgtatcagagctacttcgtcagccggtttctgtacatggacgcggacatttgccaccgcaccatgtgggcgctgcggggcaaggatccgctgctgcagcatctgaattccattgtggattattcgctctactggctcctgtccatccgggaggattaccagacctacggcgatctggactttgtccgggccatctggccgaggatgcggagtctgacggacttctgtctggaacgcaccaatgaggaagggttcctcgttggccgggaggaagactgggtctttatggactgggccgacatggacaaggacggcccgctttgtgccgagcaaatgctgttcatccgggcgctggaagcggcggcagactgctcttcgctggccgggcaggacggcagccgatatgcggttcatgccgaaatgctgtcgaaaaagctggacaagtttttctacgacgaggaaaagggcgcttatatcgacacctacgcctccgggcggcggaatgtgacccgccacgccaatattttcgccatcctgtatgatttcgcggacgaatcgaagcgggcttccatcgtccgaaacgtgctggacaacgacggcgttccggccatcaccacgccctacttcaaatttttcgagctttgggccaactgcaagctgggccgggtggaaaaaatgctgaatcaggtacgggattactggggcggcatgctgacgctgggagccaccaccatttgggaggaatacgacccccggcagaccttccccgatcactacgccatgtacggcgatctcttcggcaagagcctgtgccacgcgtggggcgcgggccccatcgacctcatcggccggtatgtagccggtttccgggctgaggctcccggctgcagggcctttgcgctggagccccgaccctccgggctatcggcgctggataccgtcattcccctgccggacggcggacaggtacaactgtgctgggacgagcgggagctgcgcgtcctgaccgatcgtcccggcggcgcgctgatctggcagggtcggcgcatcccgctggaaccgggacaggagctgcgcgtcagccggtaatccccctttggttttccacaagcattgctttttgaaaggagttttccacatggatactgcttcccatgaaatgctgaatttgttgaagacccgccggagcgtccgggcctacaaggccgaccccgtgccggaagaactgctggatcaggtgctggaggccggaacttacgcgccctcggccatgggcaggcagtcgcccaccctcatcgccgtgaccagtcccaaatatcgggaacaaatttccaagctgaacgccgccgtcatgggcacggacaaggatccctactacggcgcgccggtgatcgtgctggcgctggcagacccggccatcggcccgtgggtggaggacgccagctgtgcgctggaaaacatgatgctggccgctcatgcgctggggctttccaccgtgtgggtgcatcgggagcgggaaattttcgacagcgaagcgggcaaggcgctgctgcggaaatggggtctgccggagaccctgcggggcgtaggctccatcgcgttgggctacggcgccgccccggctccccagcccaagccacggaaggaaggctatatccttaaggtctgaacctgcccgaccctcggcagggaagaacgtcccttcccattcgattcccctataatgaaagcgaatgacacaaacaggcgcgcaaaaataagggaacgcgccaaagggcgaggacagcggcaaacccgctccgcacccccgaatcttaatttgtccctagggaaagctggtctgcctttgacagactgaacttttcaaatgaaatttgaaaagttcatcatcgcccagtgggcacaactgccgaaggtacttagcgactggcagccctgagtaaaagcgcggcagtacccggcacgccgatatttatgaataaggcgccagcggggcgggccgtatacaccggccatccatttcaggcaattcaaaaaaccgggtgcagaggaaaaacgatcctctgtacccggttttttccataaagattttacgcccgcggcttggcccgatccgccatgcgcttcatcagcagtacgccgacgatcatcagcagggggaagcccaatccgcacaggatgcccgcccgcaggttatcgcccaaggcgctggctaccgcgcccgccaccgtcggcccggcggagcagcccagatcacccgccagtgccatcagcgcaaacagagccgtaccgccccggtgcatggaggccgacgccgtgctgaacgtgcccggccagaaaatgcccacggagaaaccgcacaggcctacgccgatcaggcccgtcagcggactctgcgtcaggccgatgagcaggtacgccgctacgcacaggccgcagcagcccagcatggtcttggtcaagtccattttgtcgccccgtttgccgtagatcagacggctcaggcccatcagcagggagaacactgtggggccggtcaggtcgcccagcgccttactgacacccagccccttctccgcgaaggtggaggcccactggctcaccgcctgttcgctggccccggcgcagaccatcatcagcatgatgacccagaacatgccggagcggaacagttcgcccactgacatccccttttctccgtcctccaccagcggcgcaaggggcaccttcaggaagaaaatgccgttcgtcacgggcagcagcgcccagatcagcgccagcacccgccagctgccgccgccgaacaccgccagaaacagggtggacaacaccaccacgcccgcgctgccccagcaatagaaggaatggagcagactcatggtcttggctttatgctcggatgggcaggcctccacaatggggctgataatgacctccagcaggccgccgccaacagcgtagaacaggacggagatcagcaggcccgcaaaagcgctgggcaggaccgacggcagcaccgccaaaaagatcagccccagcgccgcgaagccatgcgccagcagcgccgaagcccgatagccgatccgatcaatgaagaacacggacgcgccgtccacagccagctgcagaagaaaattcagcgtaataagcagcgtcacctgcgacaacggaatgccgaactgtttctgaaaggtcaaaaacagcaggggaacgaagttattcaccaccgcctgcacaatatatccggtgaagcaggcgcgttcggtgtgcttgtaggtcatgggaaatccctccttggtacgggtgaaatacgccgcattatagcacttcccgtgcgccgggaaaaggggattaagaaaaatgaacagcatcaaaaaacaggacggtcttttctaccatcctgtttttttgatgacttacagcaccttttccaaaaagctgatgagccggggactttccgggtggctgaacagctccttggagggcttatcctcctcgatgcggccgccgtccaaaaacagggtgcggctgctgacttcccgggcaaagcgcatctcatgggtcacgacgatcatggtcatgccgtcctcggccagcgtcttcatcacgcccagcacctcgccgatcatttccggatccagcgcgctggtaggttcgtcaaagagcatgacctccgggttcatcatcagcgcccggacgatggcgatccgctgcttctgaccgccggaaagctggctgggataggccgtcagcttatccgccagccccacccggcgcaccagttcttccgccttggcttccgcctcggcctgaggcattttatgaatgcgcatgggggccacggtcaggttcttcatcacgttcatattctcgaacaggttgaattgctggaacaccatgcccatcttctgccggtggacgttgatatccgtctttttatcgcagatatccacgccgtcgaaaatgatctgcccatcggaaggtgtttccagcaggttcaggcaccgcagaaaagtgctcttgccgccgccggaggggccgatgatgctgaccacttcctttgcgtcgaaagaggtgctgatatcattgagaaccgtcagcttgccgaagcgcttggacaggtggcggacttcgatcattttattttctgccatgagccatcttcctttccatcagggcgatcagccgcccgccaatgaaggtgaggataaagtacatgatcgcggcgatcgccagacattccagactgttatacgtcttggcgataacgcccttggcgcggtacatcaaatcggcgataccgatgaccgacacgatggaggactccttgatgatggtcacaaactcgttgcccagcgcgggaaggatattcttcaccgcctgcggcaggatgaccaacttcatagcctcgccgtgatggaagcccagactgcgggccgcctccatctggcccttatccacggcctgaatgccggagcggatgatctccgccacataggcgcagctgttcaggctcatggccacgatacccgccgcgaagcgatcgaaatcaggaataaagctgacgctggggaaggtaacgccgatcatgggcaggccatagaagatgaacatcagctgcaccatcaggggcgttccgcgaaagaactcgatataggcggtagcgatccacttcaggggcttaatgcggctcatgcgggccatggccatcagcgtacccagcagggtgcccagcaggacagcgaagaatgcgataatgagggtattgcgcacgccttccagaaagaagttatagtagcgcagcaccagtttttccatggttgctaagaactgcatttcgttagctccttccgattaaagagaagagggagagagggggagggttcttttggaaagaagccctgatagaagaaagggttcgacgcggaggtgggggatgcctgcaccaggcgcggccattttgccgtagaaaatttcctgtcgggtgcttgacgcgccgactccggcgcgggagcaaggcttgccgccctatggggcgttcgttttcttcaggcggcccgaagggggcagtgaacggaaagccgacagcgcgtctgcgggcgcataatcacgccgagggcttgacgcgccgactccggcgcggacgatggggctgccgccccgaggggggcagtactttctttcgaagcgaaagaaagtaccaaagaaagcacgcggcacggcgactccgaaggcggctcacgtcgctatgcgccgtgggcttcggcctgcggtagccccttcggggctgtcctcggcctcggctcgctgcgctcacccgccggaaaaaggcttctattgcccattttgccggcggggctcgcaacgtcgcgcgcaatttagttagacagataactcctacgcttatgcgcgctcctgtgctcgcctttttccgccgtcaaaatgggcgagcctttttcccttcgctgcctatcgccgctctgctccgccgccgcttgggtgggggcggggctgaaactgcgtgagttgggatgtttcaccgacagttgtctgcttttgttaggcttgcgttcgacagggtttagattccttctgtcagtgcattcagaagaaatccataattccccgaagacaggcgcgagccgtggcacctgtcgtgccacggcggtctgtgcgcgattgttacaaagaacccgaccaaacccgcgagccgcgaggcccgttgccgagcggcggtatctacgcagccaactggcgtgtctcccgagcactcccgcgccctatgggcgcggtgtggggtgcagggggtcaccccctgcttagtcggcgttggcctgccagacggcgttgtactcgtcgaaggccttcagataggagccgtcggccactaccttatcgatcaccttgttgaccacttccatgaagtcgtcgttgcccttggcgataacggcagccttgccgaaagcggcttcttcagcggagaaggcaaactcagcggcttccagattgtcgttctgggagatcatgccttcgcccacagccttgtcgcagacgaagcccacgatgttgccgttgatgacttccatggccagattgggataggtgtccagttcgaacagttcgctgtccggcagagcggaggtgatcagctcggactgaatggtgcccatctgcgcgccgaccttcttaccggccagagattccttggtggcgtaggtagcaccgtcgcccttcttgaccaccagcagctgctcgctgagctcgtactgatgggtgaagtcaatcacctcagcgcgctcaggggtcacggtgaaggccgcaatgccgatgtccacatcgccgatcatgacggagttgatgatgccgtcaaaggccatgtcctgaatcttcagctccacgcccagctcgtcggcgatctgctgagccagccagatgtcgcagccaatggggttggcgttgtcatccaaaaattcgtaggggccgtaggtggcttcggtgcctaccaccagcacaccggcgttcttgatcttttccagtacgccctctgcagaggcggacacggcgcaaatgatcagacacagggccaacgcgatcgcgaaaattttcttcatcatggtttcgtccctccaaaatcgttagaatgtttattcaccttacgtgaatgattatacatccgttttgcatattgtcaagaggaaaaatgaaaaaagtttcactttttttgcgtggagtttttagccggtcagaagcaggcactcaagtccttcaggcgctccatggcttcccgaagcttttcatccgaaacggtgcaggcaatgcggaaatgtccctgccctgccttgccgaatacgcttccgggcacggccagaatatgggccttttccaaaaggaactgacagaattggccgtcggtcatgccggtcttggcaatgccggggaacagataaaacgtgccccggggccgcagcagggtcatgtagggcagcttttctatgcattcggatgcataaaatactcgatcccgatatttgcatatgtactcttcggcgatctggtgccgcagggccagcgcccggatggccgcccgctgggaaatggagggagcagtgtacgtcagcgcattgctgataaactgaaacaccgaaatcagctccgccggggcgatgaccacgccgacccgccagccggtcatcaggaaattcttggagaagctgttcagcgtcaccgtgcgctccgccataccgggcagggtgcgcatgggaatgaactcgccctcgtacagataccgggtgtagatttcatccgccagcaccagcaggtcgaactccttggctatgccggccagcatttccagcgtgtcccggtcgtaggccgcgccagtgggattgcagggtgtgttgataataatggcccgggtacgggacgtaatgacccggcgcagctcctgctcgtcggggcggtaggcgttttcctcataggtgggcacttccaccaccacgccgcccgccagttcgatctgttgggcgtagctggcaaagtacggggccagcacgatcacttcatcgccggggttcacgatgcccagcagcgcctgcgccatgccgatgctgctggaggtggtcaccagcacttcctcccggggaatgtcctgcccgaagtcctctttccacgcctgaatgaccgcgtccaccagctccgggtctcccttggggtcgccgtagtgggtgtagccgttcagcgcgtcggcataggccgcgtcgatgatgcgcttgtcggtggtaaagtccgtgtcgccgatgctcaggtcgatcacgtccgaatagcgggccagcgcctcggtgtcaaggctcaggcctgcgggccgggtttcaaaacgtttggcaacaaaggaacgcatcttttcctctccccttttacttcttttctttcacgtagggcaccacggtgctgccgttgggaataacgtacaggctcttgccctccagatgagcggccttcatcagctcgtccacgtcggagaaggccttcagccccatgggggccactgtctcctgcggcacggaggtcagcatgaggatgttgtagcggtgcgcctgttcgcagttcagcaggaagatatagccgggcacggtgaaatgctcccgcagacgcttttccatcgtgccgcccagcagatcgtcgatccatccgaaatactcggcggggccgccgccgtcccgggcctcgatgagcaaaatcagcgtgccgccgggcttcaggccggtttccacgttgtcgatggtcttggtgccctgatacagggacatatccttggggaaaccgccgcagctggcaatgatcgcgtcggccttctccggcacttccacccggtagatgcgatccaccgcctcgcaggccttctgccatgaggtcaggtagtgaccggcataaatttccgccagctgcatttccgcgttcatcaccagattcaccatatacagctggggaaccatggccgcggcctcgcacatatcgtcattgaggggattgtccttcaccttgccgttgccgatgcggggattgctcatcaggcaggccgggtccagcgaataggcatggttgtggcagatggtctccatgccgctgatgccgggcaggatgctcttgcgtccgccgccgaagcccgccatgacgtggtgggtgcaggcgcccagacagatcacccggtcggcgtgagcggcttcggcgttgatccacaccggggtgtcgtgggccgtggtgcccagatacaccagatccttcgccagacagtcgtggttcaccacccgcacccggtcgtatacgccgtccgtcaccagcgtgcgcagctctttttcgtcgccgccgtcgtgagtgccgttggccacgatgatggtcacgtgatcctccgggatgccgcactcgtcccgcagataatccaccagcggcgggatcaccttatcctgccgcatccagaaccgggacatatcgctgatgaccagcgccacccgttcgccgggcttcgtccactgccgaaggggcggcaggccgatgggattttccagcgcggcccgcagggtatcgggaatggaggcggctgcgggcacatgattcccgtgcagttcccccaacacctgaccttcgtccagaggaatgacgacctccccgtcgccgtagcggaaccggtactctttcatgcccatgcgcctccatgaatccattcatatctatgcatcgaaatgcatatgcgaaattttatcacgggcggcgggttttgtcgaggaaaaacaggaagagtacaattttcattttctttcgggaaaatcccccacaatgtccctttacacgcccgcttcagctggattataatgaaagtacccgtcagagcgggtgatcggctttcatcaactaaaattggatatggaggttatgcctatggatcgcaaactgcatatcggtattatcggctgcggcggcattgccaacggcaagcatatgccctcgctgaaaaagatcgacacggtggagatggtcgctttctgcgacattgtgagggaacgggcggaaaaggccgccaaggaatacggcaccccggacgcccgggtgtataccgactacaaagagctgctgaaggaagatgacatcgacgtggtgcatgtgctgacccccaacaagcagcattccttcatcacggtggacgcgctggaagcgggcaaacacgttatgtgcgaaaagcccatggccatcaattccgccgaggccaagaagatgctggacgcggccaagcgcaccggcaagaagctgaccatcggctatcagagccgcttccgtcaggacagcatgtacctgaaaaaggtctgtgaaaacggcgaactgggcgatatttactacgcccgggcgcaggccatccgccgccgggccgtgcccacgtggggcgtgttcctggatgcggaaaatcagggcggcggccccctgatcgacatcggcacccatgcgctggacctgaccctgtgggaaatgaacaactacgagcccgccatggtgaccggctccaccttccgcaagctggcggatcacgaaaactccgccaatgcgtggggcccctgggatcccaaaaagttcacggtggaggattccgccttcggcttcattaagatgaagaacgatgcgaccatctatctggaagccagctgggcgctgaacacgctggatgtgaacgaggccaagaccatcctctgcggcgacaagggcggcgcggatatgctgggcaaggacggcggcctgcgcatcaacggcgaaaagtactccaagacctttgtcaccgagcctgacctgaaagcgggcggcgtagccttctacgacggcaccaccggcggcgacccggcggagctggaagcccgcgcatggatcgctcacgtgctggacgattccaagcctctggtcaccaagcccgagcaggcctacgtggtcacgcagattttggaagccatctaccgttccgccgagaccaaccgtcccgtctactttgagaacggcgaactgaagctggactgaaccccacaaaaccatacgcaaggggaaccattatggaacagatcaagatcggtacctgtattcccggacagcaggcggagcagtggctccccggcatgaaggacaagggctttgagtgctttgccatcaacttccacatgacctacagcggcatcgacctgaaggaactggcccccaaggtgatgggaatgctggaaggcacgggcacctatgtttccacggtaggctactactgcaacgccctgcagaacgaatcccagctgcacgatctggaatacgccatcgacaacgcccatctcttcggggccaagaccgtggcgaccttcgcgggcgcgctggaaggccagagcatcgacgcggccattccgcggttcaaggaagtcttttccgagctggccaagcgcgccgaagaccggggcgtgaagctggccattgaaaactgccccatgcacggcgactggcggcacgccacctgcaatatcggcatcaaccccgacgcatgggagctgatgttcgacgcggttccctccgacgcactgggtctggaatgggagcctgcccatcagctgatccagctgatcgaccccatcgcccagctgcgggtgtgggccaagaagatcgtccatctccacggcaaggacacctctgtggactgggatgcggtcagccaccacggcatcttcgccgccaaggatttcgcccccgagcgcacgcccggcttcggcgacaccaactggcgggacgttttctccattctgcatgaaaacggctacgagggcgacgtctgcatcgaagggtaccacgacccggtatacgccggcgattgggaaatgaccagccagatgcacgcgctgaagtacctgaaattctgccgcggcggcgacttcgtgcccaacccctgggatgtgaagtaatttcagacaggcgaaagccgtccgggaaaccccgggcggcttttgtattttcatttttatcaaaaaaggaggagctttcgctcctccttcttgaatttgccctatggcttattcgtagatgatggtcacgttctccagaccggcgttggcaacttcgccatcagccagcacggagttgtcgatcgcgacggtgccgtccttgatggaggccagcagcgcttcgtactcttccacggtgaacttggtcagggaccaggtctcggtgggcaggcccacagcgtcgttgttggcgcccagggtggtagccacatcgccgacttcggcccagctgtcggtgtagaacttgtcgatagcccattcggtcgcagcggtgatgcccttcagagcggaggtcacaacggtgtcgctctcgtagctctggtcaacgtcaacgccgatcacgctggcatcgttggcggaagccgcagcaacgatggaggcgaacatggagccgccgcaggcgaagatcacttcggtgccgttctcataccagccgctggccatggtctgcagctcggcagaagcctggaaggaagcaccgtactgccaggagtacttcagctccacggtgacgcccatttccttagcggcagcgctcacgccctgagcgaagccgtagccgtaacggcagcaggcaggattggtgccgccgccgccgcccatgaagcccagcttggtgtagccttccttcacagcggcatagccggccagataaccggactgctcttcagcgaaagcgataggagcgacgttctccagacccagctgccagccatcgatgaagacgaacttcacatcggtgaactcagcggcagccttggccagagcggtgccctgcatgaagccggcgcacacgactaccttggcgccgccctcggcagcggccttcatggcgtcgtaacggtcgtcatcagtggcctgatcgccgttggcgggctgatagtacttgtaggacaggccgtgagcggcagcatagcccttcacgccgttccaggtgccctggttgaaggacttgtccttcagctggcccacgtcggtgacgaaagcgatttcgtacttgttatccgcggaggtcatgttgtcttcgatgtcgtcaggattgacggcttcggcgacggcgctgaccgcgaccagagacagaaccatggtcagagtcaaaagcagagccagaaactttttcatgggatttgttcctccttcacgaattgcgtccttataccaggaccctcggcgttagtatagcatgaccggaacggtttttcaagcggagagacggaatgttcgtattttttccgctgtaaaaacaggaactttttatgaagatgttttatttgtaacaaaacaggtctgatttgctatcgtcagtcgtacattttgcttcttcaaatgaggaaatcgtcaaaaaaacggcttttgaaaagcctccccggtaccaaaagcgaaaatttgtcagcgcagccggggaacattcccgcccgtcggttcgtcctttcagtggaacccaaaacggaaaggagttacttttatgatgatgaaacacaaacggatcgccgcgctgctgctggccctgaccgccgccttttgcctgacgggagccgcgaacgccgcggacgagagccctgtggtatgggaaggaacccttacggaagtgctggaggacggcttcgtgatgcaggaggccgacggccgggaaattcttttcaacgtggacgagcagaccgcgctggacggctttgaaacgctggaagatctggacgtcggcatgtatgtcatcgtggaaagcgacggtcgcctgaccaagagcatccccccgcaggcccacgccgaccgcgttacctgctactggctggccggtcaggtggaaagcgtagacgctgaggaaaacaccttcctgatgcagacggagctgggcgaggtgatcgtccatcagggcgacctgaccacccccgtttacgcgggcatgaccgtgaccgtttactttgacggcgtcatggcaatgagcctgcccgggcagatcgccgcccggaagatcgtggtgccggagctgcagggcacggtgctggaaatgacggagaccggcttcgtgctgcggacggacgatgaaatggagtacgacgtgaccctgacggacgaaacggttttcggcgtgctgctgtctgccgacgagttgacggagaacgaagccgaagaagccgtggaaggcgaagtctctgaagaaaacaaagaagaaggcgccgttgaggacaagggcgaagaaaaggcctccgctgaagacgaagccgaaaacgagccggccgaaacggccgatgaacaggaagactccgccgagtctgcgacccgccccgccatgggcgaccgggtcacggtctatttcagcggcgaatacaccgacgaggacggccacgagctgacggcgctggaagtgctgacggaaaaggcgggggaataagacctcctgcttgacttcccccgccgggcgtgctatgctggacgggcaatggggcggccaggcgatcgcgtgggataccatgaggaaagtccgagcatcacagagcagggtgccagctaacggctggtggaggcaactccaaggagagtgcaacagagatataccgcccgggcttttgtccgggtaaggctggaaaggcgaggtaagagctcacccgggccgtggcgacacggttccgctgtaaaccccacccgatgcaagatccgaccagaagcgatacggctgctcgtcgtgcttctaaagagatcgctagagcctcgcggcgacgcggggagcagatagatgatcgtccaacgacagaactcggcttacgaccgcgcccgttgccctgcggccccgaggagaggaaaaccatgggttttcttcccttcggggccgcttttgcccctgctttttcagcgggattttcggattgacttccttcttttgttgtgctatgctaccttccgttaaaagggagtagttgtcaaggcatggccaacatctcccggcctccgccggtggccatgcgcctgattgacaggtaatgagacttttagcacatcacataggatgatcgtgcggaaagtctctttttttgcatgatttcatcccaaagaggagcttgttatgagcctgaatttcaccggcagtaccccgctttggatcgtccttctgtttgcggcggggcttgtatgcatcatcaagggcggcgacctgttcgtggacgcggccggatggatcgccgaagcgtccggcattcccaaattcatcatcggcgcgaccatcgtcagcttcgccaccaccctgccggaaatgctggtatccgtctttgcggcgctggagggcaacgcggatattgccgtgggcaacgcggtgggctcggtaacggccaatacggggctgattatgtgcctgtcgctggtgtgcatgacgtgtctgatggagcgcaggcagttcggcgtgaaggcctgcctgctgctggcggctattctgtcgctgttcggcttcacccgggacggccggctttccgttgccgagggtctgctggttctggtgattttcgcgggctttctggcggaaagcctgatctccgcccgccgggagcaggggacggagcggaaggcggagggggagcggcccgccgtcagcggcaaaaccgtggcgggcaacatcgtcaaattcgtactgggcgctgcgggcatcgtgctgggcgctcagctgctgatcgacaacggctccgccatcgcgtccttgctgggtgtgcccgacgccatcatcgccgccaccatgatcgccatcggcacctccctgccggagctggtgaccaccctgaccgccatccgcaagaaggaatcctccctgtccgtgggcaacatcatcggcgcgaacatcatggatctgacgctgatcctgcccctgtgctccctgatcctcggcaagcctctgcccgtccagagtcagggaatgctgctggatattcccgcctgcctcatcatctgcgccgccgtgctggttcccgccctgtggaagggcaaattccagcgctggatgggctttctggccgggggactgtacatcgtctatctgaccgtgatgttcacctgcttcggcgcctagtagcgccgttctggacttttggaacaacctctgctataatcgagccaaccttttccgccggatgtcacgaaggcgtccctttccccttccgaaggagggagaaaaggccattttgcatgtcttcatgacgaaaggatggtttcggatgtccaataaaaccaaaaaactggtgctctccgcgctgctgctggcggcgggtctggtgctgccgttcctgatgggcggcatccccaactttggccggatgctgctgcccatgcacctgccggtgctgctgtgcggctttgtgtgcggctggaaatggggcctgctggtgggctttgtgacgcccctcctgcgcagcgtgctgttcggaatgccgcccatggtgcccacggcgctggccatggcctttgagctggcggcctacggcgcgctggcgggcgtgtgctacagccgctggcacggcggcgtgaagggcgtttacctttccctgctggccgcgctggtgggcggccgtctggtatggggactggtcagcattccgatctacggtctgctgacggagcaggccttcacgctggcggccttctggatgggcggcttcgtcaacgcatggccgggcatcgtgctgcagatcgtgctgatccccgccatcgtgctggcgctggaaaaggccaagctgttccaacagcaataagttaggaagaaatcaacggaagggaggcgcgttccatgagcatgaccgaagcgctgcttcataaacggctggcggaaacgccggaaatggaaccctgcgacggcgtgaagttgctgtaccagagccaattcggctgcggccacctgctgccgccggacggacagctggcaaagcgcattcgggcagagcgggacgaaaccccggaaaacgcctctcttccgcccgtttctttcatcggaaacgggctgtgccggatgaatctggccgcgcccgccgtccgggctttgccgccggagcggctggcccggatgatgcccctgacggcggaagacgttccgcccctgcagcccggcgacgagcgcctgccggactttgaacgggagctggcgcttctgcgcgccgccgctcaggcgggacgaacccgcttttcggcggcggcgctgaacggttatctggccgaataccgtgccgccgggtatccgccggcgagccattcaccccgctaccgggcggcataccgccccgcctatcgggtggtttccagcgactttgccgttctgctgccgctgctttccgccatcgaagaccgaatcgcgcagggcaagcccgcgctggccgtgctggacggcccctgcggctccggcaagaccacgctggccgaaaaactgagccgcctgtacggtgcgcccacggttcacatggacgattttttcctgccgccggagctgcgtaccccggagcggctgagccagcccggcgggaacatccactacgaacgtttcctttcggaagtgctgcccggcttgatagcgggcagggccttctcctacggcagcttcgactgccaccacggcgtgacccgtcccgtcttccttccccaaagccctgtgcggatcgcggagggcagctacgcccttcacccccgttttgaggaaagctaccgggctgcggacgcgctgaccgtctttctgtgcgtttcccccgccgagcagctgcggcgtatcgaaaaacgcagtcccgccctgctggatcggttccgggaagtgtggattccccttgaaaattcttattttcaggcgtatgatatacagagccgggccagaatccggctcaaaagtatgccctgggagggcgacgcatgaagatactggtcatcgacggacagggcggcggcgtgggcaaaagcctgatcgcagccctgaagcgggaaatgccgtctcaacccctgatcgcgctgggcaccaacacccaggccaccgccgccatgctcaaggcgggggcggatcagggcgccaccggcgagaacgccatccgctatcagtgcaaaagcgccgacgtcatcgtgggcgttaccggtctgctcaacgccaattccatgctgggcgaggtgtctcccgccattgccatggccatcagcctgagcgaagcccagaaggtgctggtgccgctggaacgctgcggcctgtatgtggccggggtgggtcagcagcggctggacagcctgatccgggaggcggcgcatctggcggcttctctggccggacagacggaagcggcggacgagtaaaacggtcttttgcgaaaaagcctgctgaaagcgggtttttccgacaatcacttacggagggaaacaaatcatgagcgaatgtacacatgactgctccacctgcgggcagaactgcggccagcgcaccgagccggaaagcctgctgcagaagcctcacgagcagagccacatcaaaaaggtcatcggcgtgtgcagcggcaagggcggcgtgggcaaatccatggtcacgtctctgctggccgtcaccatgcagcgcatgggcctgaaggtgggcattctggacgcggacatcaccggcccgtccattccccgggaattcggcctgaagcagaaggccgagggcaacgacacgggcattttccccgtgcgcaccaccaccggcatcgacgtgatgagcctgaacctgcttttgcccaacgacagcgaccccgtagcctggcgcggcccgatcatcgccggcgctgtgacccagttctggacggacgtgatctggggcgataaggacgtgctgttcatcgatatgcctccgggaaccggcgacgtgatgctgaccgtgtgccagtccatcccggtggacgctgcggtgctggtttccacgcctcaggagctggtgggcatgatcgtggaaaaatccatcaagatggtggatatgctgaacatccccgtcatcggtctggtggagaacatgagctacgtccagtgcccggactgcggcaagaagatcgaggtcttcggcgagagccacgtggacgcgatcgccaggcagtacggcatcccccacaccgccgccctgcccatcgaccgcaagctggccgccagcgcggacaagggcatgatcgagctgaccaacggcgactggctggatgagatcgccaacgctattgacgagcttccggcccgggagcacaagtaagccatgaatcccaacgaaaaagcggagctggctcgagagctgttcctgtcgggaagcaactgcgcccagtcggtatacgccgcctttgccgaggacatgggcatgagccgggaaagggccctgcttttgtccagcggaatgggcggcggcctcggcgggctgcggttcacctgcggcgcggtcacggccatggccatggtgatgagcgccctgcgtggctataccgacggcgcggacatggatggcaagaagcgcctgtacgcgcaggtgcagcagctgcacgggcgctttgtggaaaagcacggcacctccgtgtgccgggaactgttggaacaaaacggcatttccgtttcccatgttccctccgagcgcacgccggagtattacaaaaagcgccattgcgcccagtacgtggccttctgcgccgaactggtagcggaagaactggaaaaaaattaaatttttgccctgcttcggcagggctttttcttgatcgttcgttctatgcccgtaccagaaaatgagagcggggaggttttttcatgaagcgtttcccattccgccgtttcctttcccggctggccgtcctgtgcctgctggggagtctggccgcctgcggggccggggcagaggccgccgggagcggcgttgaaaagctggcccttaccggcggcggcgccatctaccgctatacggcccccgacgggcaggaaatctaccttgtcgcagacgagcggcaggagcccgtgcttcacagggaggatgtgaacttcgacggcgtggaggatgtagtggcgctcacccggctgggggccagcaacgcattttatgatttcttcgtctgggatgggcagcagtatgtctacgccacgcctgacgggctgtctggatccgggctggccaattacagtctggacgcggagaaggggtatgtgctctcccacgccaataacggcctggccgggctggaatgcgaagtcggcatttaccgttgggaggggttggagctagcgcccgtgcgggtgctgagggctgaaaccagctcccgctggcaggattcccccgacggcagctacagcttcgccatcgtctacgacaaccggattctccgcgccacggtgacggactatcccgacggcgtttacgagggccgcgtgatctgggagaaggaatttgagctggaagccgaggacttcgacggcgcggaggtgtgggaggaaatgcgcggcgcgctgacggcgggactgtaaaaacagaaaaaagccagtgtccatccgggctcccggcagggaaaaccgtccggcgcggggaaaagaaaggcgttccgatttttgtgcggaacgcctattctgtttttcaggaggatttttccatgaataacctaaacacgaccgtctccgccgaccggccccatatcggctttttcggtctgcggaacgcgggcaaatccagcgtggtgaacgccgtgacggggcagaacctttcgctggtctccgacgtaaagggcaccaccaccgacccggtgcagaaggccatggagctgctgccgctggggccggtggtcatcatcgacactcccggcatggacgacgagggcgaactgggcgaaatgcgggtacatcgggcccggcaggtgctggccaggaccgacatcgccgtactggtggtggacgcggtgcgcggcctgcagccccaggacgaagccctgctgaagctgtttcaggagcggaaggtaccctacctgatcgccctgaacaaatgcgacctgctgcgggagcttccctccgccggggagcaccagctctacgtcagcgcccagcggggcgaccacattcacgaattgaaggaagccattgccgccgtggtgcgccagccgaaaaatgagcgggtcatcgtgggcgatctgctgcagccggaggatatcgtcgttctggtcacgccggtagactccgccgcgcccaagggtcggctgatcctgccccagcagcagaccatccgggacattctggaccatcacgccctgaacgtggtggtacaggttccgcagcttaagaccgcgctggcggcgctgagccggaagccccggctggtcatcaccgactcgcaggccttcgggccggtcagccgggacgtgcccgaggacattcccctgacctccttctccatccttttcgcccgctacaagggccagctggaacagatggtgcgaggcgcggcggcgctggatcacctgcgggatggcgatacggtgctgatctccgagggctgcacccaccatcgccagtgcgaggatatcggcacggtgaagctgcctgcgtggatcaacggctacaccggcaaaaaagacctgcaattccgtttcacttccggcggcgaatttccggaggactttgacggcatcgcgctggccgtccactgcggcggctgtatgctcaacgaccgggagatgcagtcccgggtggagcgggccgtggctgccggggtgcccatcaccaattacggcgtggccatcgcccagatgcacggcatcctgcgccgctcgctgtcgcccttcccgaagctgctggagctgctgaaataaaaagcagcggacagacattttccgacatggcggctactgccgcgcgcccggagtgcagctgctggtggaaaagaaacccttccgctctaaagtctcaacactggctcagttctccgccgggaaaggacagcgcctcagccgcttcgcagtccgtttccgcagggaaaacaaaccacagcaaaattggcgaaatgccggggcggcattctacacagaaaaaggaagatacagatcaaaagcgggaatgtctcaaatatggagacattcccgctttcttttatgctttttctaccgcgtcccaaagcacctgcgtcaggtcgtcccgcaccaccagaccggcggcgcggtcgtagtcggtcgcgtcccgattcaacagagccagacggcagcgggggctgcggtaacggatcagaccggcggcggggtagaccaccagcgacgtgcctcccacgatgagcaggtcgcagtgggcaatggcgctcagggcttcttccatcaccatgtcgtccagcggctcgccgtagagcaccacctcgggcttgatcacgccgccgcaggagcagtggggcgcgccctcgccctgcaaaagcggctccagcggataaaaacgcccgcacttcatgcagcggttgcggtggacggagccgtgcagctccagcaccttttcactgcccgccgcctgatgcagtccgtcgatattctgggtaacgaccgccttgcacttgccccggcgttccagctccgccagcgccagatgggcggcgttgggcttcgcgtccgggtagagcatcacccggcggtagaaatcccaaaattcgtcggggtgcgtgacaaaatattcatgagaaagcatctcctcatagctgcggccgccgggggtattgtaaatgccctgatgggcgctgcgaaaatccgggatgccgctggcggtggagacccccgcgccgccgaaaaagacgatgtttcgtgcctccgcgatccactggcgcagggtttccgtttcctgggtcattttgcttctcccctttccgatgagacgatttagtgacaggtatcttttcgatttttgaatggaaaaaacctgttttctgtcgggttttccctttgattgtcctttccgcccgagtcggaatgaaaaccctcccttttgcccatacttcctgttgaaagccggcaagggaggaaaccaacatggcgatcaacaaggtggaaatttgcggcgtagatacgtctaccctgcccgttctgaccaacgagcgtatgcgggagctgtttccgctggtgcacagcggcgatctcaacgcccgggaggaatttatccggggaaatctgcgtctggtgctgagcattattcagcgcttcggcaaccggggcgaaaacgtggacgatctgtttcaggtgggctgcatcgggctcatcaaggcgctggacaatttcgataccacgctgaacgtgcgcttttccacctatgccgtgcccatgatcatcggcgaaattcgccggtatctgcgggacaacaacgccatccgggtcagccgcagcttgcgggatattgcctacaaggccctgaaagcccgggatcagctgtccgaaaagctgggccgggagcccaacgtgaacgagctggccgaggccctgcacctgccccgggaggacgtggtctttgcgctggaggccattcaggacccggtcagcctgttcgagcccgtgttcaacgacgggggagactcgctgtacatcatggatcagatcaccgacgagcgcaagccggacaacggctggctggacgagatcggcgtgcaggacgccatgagccgcctgaacgaacgggaacggcacattctgaagctgcggttttatcagggccgcacccagatggaggtcgccagcgagatcggcatttcgcaggcgcaggtcagccggctggaaaagaacgcgctggtccatatgcgcaaaaatatggggttatgaaacaaggctcctccggcctgacggaggagccttgtttttttcatgagcaacgggctgaacagccgcagttccgttccttttccaccgtttttcccatatagcttgaaaatttttctccaaaaaattctgttacatattgcaatttcgttttctatttattaaaataatgtcacattttatgcttggaaggaggatgggtgtgaaaagcgccgttcagtttctgattgctttgttcattgttttgacgatggtcattccaacaggccttgccgctgcggatgaatcattcattgttttcacgggcgaccgggaggaatacaagtattcagatccgctgtacgtcctgaacaacggagagaatcgcgtagcgtactgttacaacgcctcgaagaaagtaccgcctacctagcaggagggcggacagaccgtgtacaagatcgaaagcgccacggcggaagagttctaccaaatgaccgacgaaaacgtccgggtcatggaacccgaagcgttcaaaaaggccatattgtccgtctgctatcagggtttcccacaaaacggatcaggcctgatggaaaaatacggtctaacccgtgccaccttccgcggcattacgcagctggcggtctggtattatacggactcgctggatatttcccagtattaccagcagtatcagccgtttgatacctatcccggggcgtgggcagcttatcaggagctgattacgcccttggataccctgccgctcggttatcagctggatctgtaccgcaaccgcaatgaacagtatcagaatgtgctgtgtacccgtctggcggaaatgcccgtgcaaacgtccatccagctgaagggaatcaagctgctggagggccgcgccctgctggccaacgagttccattttatcgtcacggacgaacaaggcacggaggtctcccggggcgtcaatcacgcggacggcagcatcgccttcaactatatcgagtaccgtcacgaggacgtggggctgcaccgctataccatccgagaggtacagggcgatctgtcgaatgttacgtatgacggcgcgtcttatacggtggaggtattggtggaatacgtagacgaccagctgacggccacggcgcagggagaaccgaaactggttttccgcaatgtgtacgacgcttctcctacggcaacgccaagcccaagtccgaccgtgaccccaggcgtaactccgtctccaaccccggcccagaccccggttccgggcacgcctcctgccactggcgacgaaagtcatcctgtgttatgggccctgttggcactggccgcgctgagtctgctcggcgtacaggcagtcctgagccgaaaaacccgtaagaaatgagcttccgcagcttattccatacgctaaaagcccgcccttccgcatggaaaggcgggctcagactgtcgaaaaaccctgattggccgtcatcgcccgcgaacagcgctctgcggcccgctcccctacggggcgcgagcttcggactgcggtagccctttcagggctgtcctcgtcctcggtgttgcgcacccttaagctggttcgcggaaaaaatgctgcagcgtaagacttaggggctccgttccgcaacctcaatcgtcgtctttggcactgccgtgccaaatcctcgtt

SEQ ID NO: 37 - DNA, 32759 bp, Unknown
  16S sequences of unknown bacteria
ggatttttgtcataacgacaaagaagccgccgtgaatactgtcgtatttacaaggcttttgcgaaagtcagggcgaaaatccgcccgttaaaaccgatgagagttcgaatatcatcagccatggattcaattcacccattctgaaccttttttcctatccccaaaggggctgtaaaaaacttgcgttttttttacagccccttccggttttttaagcattatttcacagcttcggctgcgcagaacgagcccttgacgactttgtccgcaaattccgcgaccgtttttctgtcatatttcccgtagccctcaacgacaacgtgaagcagcccgtttgacagatgtatataaagcatttcaagggtctccgccgatacgtctttcagctcggagcgccagcttgcaaggctcggctgctttgcctgctctatcattttccgcagcagcgtcgctttcgggttctcaaaaatcagcacgcggcatatctgacggttgcggtctatcatatcgtatatcgtcgctataagccccgcaacatcggttttttccgatttgccgagcgccgtctcaaagtctctcaacaggtcgttttcgatgctttcaagcagttcaaagcagtccgaaaaatgcagataaaacgtcgccctgttcagctccgcccgctcgcagacctccttgacggttatcttgtttatcggcttttcttcaagcagcctcaacagggaatcctttaacattttcagcgtgtatctgacccttgcgtccgttttcataacgtcctcctaaaaaaattcggaaagttatttgactgcgccgttgcgtatgtcgattatctttcgcctgccgcaacattgactattgcatttcgcgttcgaatatattataatataaatgcgaaagataatcaatagatgtctataaaatttcagaattcgtttatgttccgaggtgaatattatgtataaagagtatattgtaacgggtgcggcgggctttgtcggcagcgccgttgtaagagaacttctctgtcgcggcgtcaaggcggaaaatatccgcgcgctcgcgcttgaaaacgaaaaactgccgtccgatcttccggaaagcgtcgtctgggttcgcggcgacgtgaccgacgacggttctctcggcggcctgttcctttccggcgacagcggcgtctgcgtcattcactgcgccggtatgatctccgtcgcaagcgagccgggacaggcgatctatcgcgtcaacatcgacggcacgaagaacatcatttcaagatgcctgcgtcacggtgtcgaaaaacttgtttacgtcagttccgtccacgccattccggagctgccggagggcgataaaatgcgcgaaatctcggacttttcgcccgataaggtaaacggcgcttacgcaaaaagcaaagccgcggcgaccgccgcagttcttgccgccgccgaaaaaggactcaacgcctccgtcgttcatccttcgggcatcatcggcccgggtgacgaaaaatgcggaaacataacccgtcttatctccgctttcatccgcgggcgtctgccgttcgccgttaaaggcggctacgacttcgtcgatgttcgggacgtcgcaaagggtatctttctctgcaccgaacgcggaaaaagcggtaaatgctacattctttccggtcattatgcgaccgtttcggacattctcaaaaccgtgcgtgatcttgcggggctcaaacgcgttgtttcctgcgtccccatgcgtatcgctgaagctttcgctccgcttgccgaaaaaatatgcgtaaagcggaaaaagcccgcctcattcacgccgtacgctcttgcagtgcttgcttcaaacggcgctttttcgcacgaaacggcgagcgaggaactcggatactgtcccagaccgttaaaaagaacactgtctgacactttgaaatggcttcgttcgaaatctcttaaaaagagacgcttttccgcaaaaaaagcggctcaaacctgaaaattttcggataacgggaagacctttttcaaagcgtcgcgcagggcggcttatgcggagccgccctgcgtttttttgcgtatttcgcctttttccgtcgtcgattgccgcgtactcctcgcggagcacgcttttctgcttattttgctctgattgccgagtactcctcacggagcactcctttttgcttattttgcgtcggttaccgcgtgttcctcacggagcacacctttttttcttattttgcgtcggttgccgcgtgtcccttacggagcactccttttttatttcattctccgccgccgccgttttcttcgtccttctccgcttttctcgctttcagaattttcaaaagactgctcgtgccgctcactatcataacaagcgcaagcaaaagcgcgacaacgtaggcctttatgtcctccgccgtgcggcagagcgcaacgaaaacggcaatgccggcgatgccgataactatttccgccaccgtaagtataaaataaagctttctcttcttttccgccgttgttctgtcgtcgttcattttctttttccgcctttcccgcgcctcttttttcactttcgtgttccgtccgcgccgctctttatttcaattatacgatagcgggtattgaaaagcaagaaacttcacaaacagttcacactttttgcatatattgccgcgccgcggctctctttttcgctgtcctgaccgcaacgtcccgtttttgtccctctttacgcttgcaaaaagccgaaaaaagatgtataatgtatatatcactatttacttgaaatcaggagatattatgacagacagagaaaccgcggagatccgcagaagatataaaacagataaaaacaatataacgcacgttgcggggtgtttggtaacgcagacgcatgagatagcgtccgagttcgacgttcccgttgcgtcgatgacggaggatgaaacggacgctgtgttcggggcgctcaaacgcgtgctttcaaacgtcggcagaaactttgtcgatgtcgcctttcccgcttcggaagtgccgaacggcgatgtttacaaaatgcttgacgcactccgtgcaagcgggtgcaaggacgaaacggcgcgccgcgcgctttttgaaaagatagcgtcctgtgtcgaaagcgacgagggatatgtggtgatgctcgtccacgaaaactacgatgtgttccgcttcggtgcggacggcgaaaggatagaggaatcgaccgatacttttccgtatatcctctgcgccgtttgtccgcttaaatcgggcaaacccgtgctgactttttcaacaggggagaatgtctttgtcaattcgacgttgaaatccgttgtgaccgctccgacgctcggatttatgtaccccgcattcaatgaaagaaaagcggatatttacactctgggttactatgcccgcgatataaaggacaatcacgccgagtttgcggcaaccgttttcggtgcgcagacgcctatgcccgcggcggagcagaagcagacgttcggcgcggtgctttcggagtccgtttcggacgctctggatcttgatgtcgtttcaaccgtccattcgggtattgccgaacttatcgaggaacataaacagagcaaagaacgcgacccgctgactatctccaaaggcacggtcaagcgcattttgcgcgacggcggcgttgacgaggaacacgttgaggcgttcggcaagaaatttgacgaagatttcggcaaaggcgcagaactgcgtccgaaaaacatagttgacccgaaaaaattcgagttgaaaacgcccgatgtgtcgataaaagtcagccccgaaaagaaagaccttgtagagacccgcatcatcgacggcgtaaagttcattcttgtccgtgccgacggcggcgttgagctcaacggcgtcaatatcgaaataaaataattcagatcatactttttatccgcgtcagcgcgcttttttcaagccgcgacacctgtgcctgcgaaatgcctatctcggcggcggtctccatttgggtcttgccgttcataaagcggagcataacaatgcgtttttccctgtccgagagcgttttcagcgcttcacgcagatttatttcttcgacccaacttgtgtcacagtcgcttttgtcgctcacctgatccataacgtaaagcgtgtcgctgtcgtcgctgtaaaccgggtcgaaaagcgaaacggggtcaactatcgcttcaagagccaaaacaacttcttttcgcgtcagtccgagttctttcgctatctcttccggtgtcggttcgcgtccgagttcgtttgtcagtttttcttttgccgtcaacgctttgtacgccgtgtcccgcaccgaacggctgacccgtatcgggttgttgtcccgcagatacctccgcagttcgcctattatcatcggcacggcgtatgtcgaaaaccgtacgtcctgcgaaacatcgaaattgtctatcgcttttatcaaccctatgcagccgacctgaaacaggtcgtcgggatcttctcctctgcccgaaaagcgtcggagaacgctcaaaacaagtttcagatttcctctgataaacctctcccgcgcctcctcgtctcccgcctttattttcagcatgagttctttcatttccgcggcgggtataacttcgagttccgaggtgtctattccgcatataacgactttgttcagcatattccgcgccctgcctttccgaaaaaagtatcggcaaaagggcgaaaagtattcttccaaaaaatgtatttgaaaaaaagaggacgtttatgaaaaacataaaaatcgtttacggcagaaacggctccgacattcaccgtcgaatgcggtcgaaagttgccgactttgccgcgcacgcagccgccgaagacagggcgttttttatcgttcccgaccagtatactttgactgcggaacgctttttgcttgcggccgtcggtgaaaaagcgctgcgaaatatccgcgtcgtttctttcaaaaggcttgcgtctctctctttttccgaaaaaggcaaaacgtttgattttgtcggagagggcgggcgtgccgcgcttgtttccgccgctttcgatgccgtttcaccgcagcttaaatattatgcgggctactccgatttttattttaacgaggccctgtgcgaacgtataaaaatgttcaaggagtatgcggtcacgcccgacgcgctgctcacagccgaaacttcggacgcggttcacgacttggcgctcgtttacggctcttacgacgcgcttctcggcgcggacagagccgaccccgcagacaatctgcgcctgtttgccgaacttatcgccgaacacggactttttcgcggaacaacggtgtttatcgactttttcaaagttctgaacgcgtcggaactttccgttgttcgcgcgctttacgaagctggggcggagataaatgtcgggcttgtcgaagacgaatcaagggacgattgcggcatctttgcgcctgtgcttgaagttgaaaacaaactacgccgctttgttgaaaaagacggcggcaaactcgtttatgaaaaagcggaaaacggcacggggtatcagtcaaacggtcttgcgcagcttgaagatttccttgcgacggacggcaattctgaaccgtccgactgcgacggcgtgaatatatatgaagcgaccgatatatccgacgaggtcgattttgtctgctgtcggatatgcgaacttgtgcttgacagaggctaccgtttttccgatatcgccgtcgtgacacgcgacgacgaacggtatgcgccgtattttgaaaaactgtttgcggattatgaaattccgtttttcagacataaaaaaagcgggctgaccgaaaaaaaagccgttcgttttctttcttctcttttttccgcgatacgcttcggattccgtgccgacgacgttatcgacgccgtttcctgcgggtatatcgacggggtagatccgaccgatcttgccgaatttgaacggtatgtccgtatctggaacgtgaacggaaaagggttttttgaaccgttcgggcgcagtataagaggcttttcgggcggcgaatccccgtccgaggaagacgccgcccgtcttgcgcgcgccgaaaacgtccgcctgaccgtcggcgaagtgctttcatatctcggcaggggcagcgacaaggcaaccgtcagaacccatgccgaaagacttttttcgctgttcgaaaaaacgggacttgaagaaaagataaacgcagacacacagacgcttgccgccatggatgagaagacgcttgccgacgaaaacgaaaaactgtttgaactgcttgtgcgaggacttgacgaatacgttcgctccgcaggcgattcggaagtttctttcgaccttttcggcagaatgtatctgcgcattatttcagaatattccgtcggctcgataccgacggctctcgacacggttcttgtcggcggcgcggacaccgccccgcttctcgataaacgtgccatgttcgtcctcggactgcgcgagggctcattccccaaaactccgtcatcgtctccgcttgttcccgaacgggagcgcgccgcgcttgaagagcagggaatagtagttgacatctccccgtttgacaagtttctttatgagcagtttatcgcctattacgcgctgacagcggcaacggagcgcgtgtatatgtcctatccctcgtccgacggcggagagggtgttccgagcgaagtattcgaccgttgccgtgcagcctttccgaacgcggtcattactgcgcgggcgtccgatgcggaaagaatttaccgcgcccgtccgtcaaagataaaagccgttgagtacggcatacaagacctttccgagtattttgacatacggatagcgtcagacgacgagtatctcaaaacgggcttctccgtttccgaagaagtcgcaaaaaaactttatggttcgcccgtctatatatccgcaacgaaaagcaatacttttgcggagtgtccgtataactacttcgtccgtttcgggctcggcataaacgaactgcaaaaagcggaattcagcgccgtcaacgtcggctctctcgttcacgcttcgcttgaccgaatattcaaaaaggaaaaggatatttccgcacttgacgacgaaactctttcggctcttgccaaaaacgagataggaacatatatgaaagaagcgttcggtgcggacgcagaccgccgcgatatgcaggcgtgtgccgcaagcgtgcaaaaacggttgcttgtgctgctccgttccatgcgcaacgaactgcgaaccgtcggtttccgcccggtttatacggaactcggaataggcaagggcgaaaacggacttcccgcttacgacctcgattgcggcaacggcataaaagcccgtgtcacgggctcgatagaccgtgtggacgctttggaaaagtacggaaaaacgtttgtccgcgtcatagactacaaaacgggcgaaaataagttctcgcttgccgatatatgccgcggtaaaagcctgcaattgccgctttatctcgatatactcaaagagacgggctcacacctgttttcttccgaacccgaacctgcgggtatgatgtattacgtcttgagaaaggcgacggaaaaacttgatacagagcctgatacgtttgcggagtttgcgcaaacgggcaaacttcccgccgtaccggacagccacaaacgcagcggaatgctgcttgacgtttcctctccgacgaacggtgacgaggacggcgagcagcccgacattcacggcgaagttgacaaaaaagaatttataaaaaccgataaaaacggctttgacacggtgtttttctatgtcaaagacagcctgaaaaaaatgtgcggcacgctttgttcgggcagaacggaaaagacaccgaacaaaaacggcaacacctgcaaatattgtccgctcggcagtatctgcgaaattagggacaacccgccgtcggcgctcaaaatagacgacccgatgaaaataatgcgcgaccgcatggaaaaggacggtgacgacaatggctgaaagatggacagacgaacagaagtccgcaatcaacgaaaaaggcaggaatatcatcgtttccgccgccgcgggaagcggaaagacgtccgttctttccgagcgcgtctgccgttttgtggcggacggcggcgatatcgaacggctgcttgtcgtaacgttcacaaaagccgcgtcaaaagaaatgcgttcccgtatacgcaaaaaaatcgccgacctttgcagagcggagcaagaccccgaaacaaaaaaacggcttcgccgccaacttgtcaaagtcggaaacgcaaagatttcgacaatagacagttttttcggcgatcttgtccgtgagaatttccgtgttgcggaggtcagccccaatttcggtatgcttgatcctgcggagaccgccgcgatagaacaggaggctctgtcggctgtcgtcgaacgcgcttacgaagatatgtcagagccgttccgcgcgcttgtcgaacttgtcggaggagatgcccgaaacgaaaaaataggcggagacattaaatatatttataacagattggcgtccgttccgttcagaacggaatggttaaagacaaagaaagaactttattcttctcccgaatattttacgtcattctgctgtgattacatcgcatcccgagtgcgtgaagttcttcccgtttttgaacaaatcgaagcaagcggcgcgatatgttctccctcaaaatcaaggtatcttgccgaggatatagagtctttgcacagagttctttccgcttgcgaaaaaggggattgggacggtgcgcgcgtctgcgcgtttgaaggcgacgcgcgcggcaagtcaaagactgacgaccccaatgccgttgcacgctatttcaaggtcaggggatatctcaaaaacctttttgccctgccttttatgcagcattccgccgcagcgatcaagcgcgaactcgaagaaatgagcgtgcccgtttcatgcctgttcgaccttgttgaagaatacgcgctcgaactgcgccggatatgcgaagaaaaaaacaaatacacgtttgacattgtttccgaaaaagctctgcgcctgcttgttgcgtcattcgaccatgaaacaggcattttcgaaacgaccgaacttgccctcgccgttgccgcaaatttcgacggcgtaatgatagacgaatatcaggatacaagtccgcttcaagacgtgtgctttgccgccgtcggacgtgacgatatgttcgttgtcggcgatttgaagcagtccatatacagttttcgcggcgcaaaacccgagggctttgcaaaaaaacgcgatgtgtttcgccgcatagacttaaacaagaacttccgcagccgcaaaggcgttctcgattttgcgaactttgtgttctcgatgattttctcggaagaagtcggcggcgttgaatacgacgacggcgaacggctcaaccacggcgaaaagaccccgcccgaagaagcgcgccaaactcccgacgtcgaaattgacgttctcaatgcggagtatacagaaaaactcggaacgggttcattcgccgatttctgccatgtcgcgggacgtatttccgaccttgttgaaaacggcgacggagaaagaacatacaggtattcggacattgcggttctctgtgcggacaacctctcgtgcgcgagagtcgcaaagactctcaattcgcttaacgtgcccgcatattacgaaagcggcggcaatattttcgaatccgtctgcgttcgttccgccgttgcggtgctccgtgcgctgaacgacccgtattcggacgttgatttctattcctgcatgacctgcggctttttcgacgttgaggaatccgacattgcacaggtcgttgccgaagtcggcagaaaaggtttcctttacgataaaataactgccaatgcggcagcaaacacacgcctttccgcattcgtttccgtttttgaagcgttccgcacgcttgccgcggaacttcccgtatccgcactcattcgccgcatttacgaagcgacggggtatcccgaaaaagtcctacttttcccgaacggagaggaacgctacgacgcattgatgaagtttgaagcgttcgctgccgcgcatgaagaagcgtgcgaggcaaggctcggaaagtttttgaaacttgtttccgactttgcggcaaagggaagcacggacgaggacagcgcagctccgaaaggcgagtttgtgcgcattatgacgttccacaaatcgaaaggcctcgaatttcccgtctgcatcgttccgcgccttgaaaaagcgtttccttcaaaaaagggagataatgaaaatatcgcttttcacccgcgttttgccgtcggcacatatctgcgcgacgcagagggcacggtcgaggcaaaatcgtttttgtattcgctcaacgaacgcctgtccgcagatgaagtcctttccgaaaaactgcgcgtgctttacgttgttgtgacccgcgccaaagaaaaacttattctctgcgcaaatcctccgaagaagttttccgccgaatcccttgcagtgctttacgactatgttccgcagcccgacggcacacgaaaactcaaatgcctgcggcttgccgtcgaaaacgccaaaagttatctcgaccttgtcgcgcttgcgctgacgcaccgcaccgacagcggcattttcaactgcgccgacgtgccgacaaagccgttctgcgagcctatccgcgtcaacagcgattttgagaatgaggacggagaaatcaccgaacgtgcaacggaagcatccgaagcggaaacagaagccgtaacaacccttgaggacggcgaaaaaaagagagtgagcggactttcggaaaccgaactgaaccgccgtttcggcgcaaaactcacgaccgtgctttccaaagtacccgcaaaggtttcggtcacggaactttcaaaagggtttgtcgcggacgaagacgcggaacccatgttcccgcaaagccgcaaaccgtccgtaacgcccgagtttttgtcatcttcggagatgagcggagcggaaagaggtaccgccgttcaccgttttgtgtctctgcttgaccttaaagccgacccgagcgacgaacttgcccgacttgtttcggagggcgttttgtccgagcgtgaagccgaagcggtaaaccttgaaaaaatccgacgttttctgtcttccgatatcggcgaactgatgagaaacgcaaaaaagatctaccgagaggaatcgttcgttgtccgcattcccgcaacggaatacgcagcggatgcagacccgaacgccgaaattctgctccaaggcgcggttgacgcactttgtgagaccgacgacggctttgttctgatagattacaaaaccgaccgcaagacagccgaggaactcaaagcactctattcgcgccaactcggctactacgcttacgccgttgaaaaacttttcggcaagcccgtcaaaaaggcgtatatccgttcgttttcgctcgacgaaacgatagagatacctccgcattaaaggtgttcgcaggctgtgcatattcagcccgaacatataaaacaaacaggcagtcctcgcaaaaaaacgatggctgccttgcattttaatggaatcttaatgcgttttaatgctttccgacttccatttttacaaattctgtggtataatcagtttgtaaaggagagaaacgatatgtacaatctgcttatttgcgacgacgaaaaagatattgttaacgcgctcaaaatatatctttccgacccgtcgtatgaactctataccgcaagcaacggcgaagaggctctgcgcattgtcgaaagggaagacatacaccttgttcttatggacattatgatgcctgtcaaggacggtatgaccgccctttccgaaatacggaagataagcaatgttcccgtgatttttctcacggcgaaaagcgaagacaccgataagattttgggtctcaacatcggcgcggacgactacataacaaagccgttcaatcccgtcgaagtctgcgcccgcgtgcgctctcatctgcgcagatatttcagcctcggaggaggaaacgttaaacccgaaacattcgtctgcggcggcatagaactgaacgacgcttccaaaaaagtgaccgtggacggcgaacccgtaacgctgacgccgaaagaatacgatattctgcgcctgcttctttccgaacagggcagggtgttttctccgaaagaaatatacaagcgcgtttggaacgatattccgctgaacagcgacaacaccgttgccgtacatatccgtcatcttcgcgaaaagatagaaatcaacccgtccgaaccgcgctatctgaaagttctgttcgggcagggctatatgattgaaaaggtgagggacagatgaaaaattttcttcgctccgtcgcgggcaagaccgtcctttttgttcttgttataattatgttcgtcacagccgcagtctccgctttctccgttgcgcttttggctgtttacggcttttatgacgaaaaaaccgatatcgaaagcgcaaaacgtcgaatggaaaaagagtatttcatctcctacgttcagtccgacgcttactccgcggcgttttccgttattcgggatggggaagaaccgtatacgcccgattcgctcgattatgcgttttacgacgaaacgggaaaacagctttcgacaaattacgacgcggccgtttccgcaaacgacgacatttggagctaccgtgtttatatatggaaaaatgaaacgtttttccgcacctctttttacaatgaccctaacgaagtgggcgaaaagtatattttctgcgcaaatccggcaaatctgcgcgagggatatttcggcgttgaccgctattcgagaaccgccaacctgataagtctcggatattctttgcgctatgttgttgtggctttgctcgccgtttcaattcccgcgcttcttgccgcgttcataactctcatgtgtgtttcgggcagacgtccgaacaccgaagaaatcgttccgggggctttgaaccgcgttccgtttgacgtgctgttccttgtctgcgtaagccccgttttcgcggtgtttgtcgttatttcgtcctctttcaataaatacacgtcgcttggctttttcgcggtgtttacggctttatccctctgcaccgttctcggactcgcaatgagttttgccgttcgtataaaagaaaaaactcttatcaaaaacaccgtagtatatcgtattgtcagacttctcggacggtttttccgcgccgtgggacgttttttctcgtccgttccgctcgtgcccaaaaccgctgtcggcacgcttactctgaccgttgcggaatttgcttttatgatccgatttatatatgaccccaagtatctgataatcgtttgggtcgcggaaaaactcattcctattccgcttgtgatttattccgccgtcaacctgcgcaaactgcaaaaagcgggcaaagccgttgcagagggcaacctcgaatacaagaccgatacccgcagtttgttcggcgatttcaaacgcttcggcgaagatatgaaccgcatttcggacggcatgagtgcggaagttgaaaagcgcacacacagcgaccgcatgaagaccgaactcataacaaacgtttcccacgacctgaaaacgccgctgacttctcttgtcaactattcggatttaatctgcgccgaaaaatgcgacaatgaaaaaatatccgaatacgccgaagtcattcaccgtcagtccctgcgtctcaaacgccttatcgacgatcttgtcgaagcctcaaaagcccagagcggcgcgcttgatgtctgccttgctccctgcgacgtttcaacattcgtcaaccaggtctcgggcgaatacggcgaccgtctcgcttccgccgaactggaacccgttatacgtctgccgtccgaacccgtttacatctttgccgacccgcgccgactgctccgcgtgttcgacaatcttctgaccaatatctgcaagtatgccaaacacggcacccgcgtttatctcgatgttgcgcaggacggcaacaccgcccgcataactttccgcaacgtctccgaacgcgcgctcgacatcgacggcgaagaacttgcggaacgtttcgtccgcgccgacgcttcgcgcaacacggagggcaacgggctgggtctttccatcgccaaaagccttgtcgaactccaaaacggcaaaatgaaaataaccgttgacggcgacctgttcaaagtcacgttgacgtttcccttgtccaaacccgttgaataaaaagaatataagttaaaaaggcagctgttaaagtgttccgtctcacaaatcagtctctaaatccgaatattttgtgacgcgtgcgccgtctttcgtgttttgacttgacactcggcgggatttatggtataatcactctgttcctaagacaacaggtgcttatgcgtaaatcctgtcgaggcgtaaaaaacgaatatttttgtttttatatgtgctctttcagttcttgggaatgaaagagtttatttttttcgggaggtgaaaatcctaatgcccagtgaaaaggttttaagcgaaaagaaggctatcgttgcggctcttgccgaaaagatcaaggcttccggcacaggcgttctcgttgactacaaaggtcttacggttgcggaagataccgaactcagaaaggctcttcgtgcggcaggcgttgaatacgctgttgtaaagaacaccctgaccagattcgctcttaaagaagcaggttacgagggacttgatgaagttcttaacggaacgacttctcttgctcttgcaggcgacgatgttgttgctcccgcaaaggttatctgcaaattcgcaaaagatcacggcgacaagatctccgtaaaaggcggctttatcgaaggcaaagttgttcccgttgaggacgttatcgcgctttccaaagttccctcgaaggaagaccttatctccaaaacgctctactgcatcctttctcctcttcagggtcttgcgatcgcgctccaagcaatcgccgacaagaagaacgaaggcgcagaggcacccgctgcggaggctgccgcagaataagcgagaatacatcgcggcgtgaaaattacggtttttgcgcgttttacgggcgtgaatgcgcctgacgctctgcgcggcgttataataagcgcaagaaaatatttattatcggaggaaaatcaaaatggcaagtgaaaaaatcaccaatatgatcgaagagatcaaaacccttactgttcttgaactcaatgaactcgttaaagcccttgaagaggaattcggcgtttccgctgctgcacaggttgcggtagttgcaggcgctgctgacgctgctcccgctgctgaggagaagaccgacgcttccgttatcatcaaggaagttggcgctaacaagatggcagttatcaaggctgttaaagaaatcaccggtctcggacttaaagagtccaaagagatcgttgacgctgctcccaaggctgttaaggaaaacgttccttatgcagatgcagaggctatgaaagcaactctcgaagcagcaggcgctgttgttgaattgaagtaattcaacctcgaacaaaaaatcggagcagactttttcggtctgctcctttttgttttataactaaattttagcaacttcgattgatttttatcagtattgaaagctatcagtaaatgaaatgtcattttttcggcagcattgtaaactctgttgaaattgtcccgcctatgtgttatgatttggctgacaaaaaacaaacaggggatattcgatatgggaaaaacaggcgaagactacaaaaacgaagttgtgacttatgcaaaaatccttgatgaaaagggacttgtcaacaccgttgagggaaatctctctgttcttgacagagaaacgggcaaactttatgttaccccgtccggtacacgcaagcgctttcttgatgcggacaagatagccgttatgcaaaacggggagcaggttgagggcagtctgcctcgttcgagcgaatatcttatgcacttggaagcgttgaaagcgcgcccgacttgcaacgccgttgcgcacgttcattctccgtatcttaccgcatatgcttactgcggcaaggacatcagtataaaatgttcctcttcttttgccattcttttcggcgagaagatcccgtgtattccttacggtgaagcggcaacgtcgcacatcgcggacgggcttgcggaagcattgaaagacaatgaccttgttctgcttgcaaaccacggcgttatctccgtcggcagaacgcttgaagatgccgtcaaacttatcgaagccgccgaagaggttatgaagatatactcttatgcaaaacagatagggcagacaagcgacctttccgacgaacagttggaatccatttttgaacaccatccgggcagcaaacgcaaccgtttgagataaaacgaaaacggttcaattcttcctaacaattcttattctttcgggagtttttgcttgatttgagtaaaaacttctgtattctaataagtttttactgaatttatgtaaaaactttctttctgaatacagtaaaacggggctgtaaaaaaacgcaagtttttttacagccccatagtttttgagttttctgtcaatgtaagatatattcgccgtccgctttcatctctatgccgctttcgaaaaatgcggtgagagccgaaatcatcgcctgcgtgtcgtccgcgcccgccgtctcgtatgcggagtgcatagccaactgcgcaagtccgatgtcaaccgtgttcagcgatacctgtgtgtttgcgatgttgcccagcgtgccgccgcccgccatatccgcacggtttgcataaaactgcgtcttgacgcccgccttgtcgcagaacgatttgaatatcgcctccgataccgcgtcggtcgtataacgctgatttgcgttgtatttgataaccacgccgccgttcatgcgaaccgtgtgattcctgtccgcatattcggggtggttcgggtgaacagcgtgcgcattgtcgcacgaaacaaggaagcccgaagcaactttttctctgtatttgtcgccgtttccgagtgccgcgcaaattctttcaagcgtgtccgcaaggaacgttgacgctgcgccttgctttgtctgactgccgacttcttcattgtcgaacaggcagagaacaggcagccccgcaccgtctttcgcattcagaaatgccgtgagtgaagcaaacgcgcattgcagatcgtcaagcctcggcgcgcatataacgccgccgaactcttctccgctctgcgggttgtaaaccgaaacgtccgtggcaacgatgtctttttcatcgacttttgccgcttttgcaagcatttcgcgcaggtgcagcgtcttctctcccgcaagcgagaacaggggaatcatatccacggcggtattgtagccttttgaatcgtttgacgttctgtccatgtgaatggcaacgttcggaattatcgcaacgggctctttgagatcgaccgtcacggtctttatcccgccgtccgtttttacaacgagcctgcccgcaaccgaaagcggtctgtccgtccacgtcgaacgcagcattccgccgtagccttcaaccgagagtttaacgtaattgccgtcttcgagacgatcgttttcctttattctgaacgttggggaatcaaggtgtgccgcagtcatcataaagcccgtgaaatcgccgttcggaactctgaacgctatcagagacgaaccgtttcttgtcacatagtagcctttgcccgtttcaagcgtccacgtcgccgcttcgttaagttttgaatatcccgcgctttcaagtatttttgccgtatgttccgccgcgttgtacgccgtcggacagttttctatgtaatcaaaaagttttgcgtttatctctttcatctcgtatcagtcctttgcaatgtccgttattatcgcgttgtttcccataacgttcgggagttcgccgttccatttttcatagaacttgtttttcagcacttccgccgtcagcgattccgcgagcagtttgttcgcctttgccgtcgcttccgcttctatgagttccgcctccgcttttgcctgtgcttcgactttcttcacttccgccgcggcgttcgcttcgataacgcgctgttccgcttccgttttagcctttatcttgttctgctccgcaacctgcttcgcttctaccgcgtttgtaaattcatcggtaaaatcaaggttttcgattgccgcgttgacaagctcgatgttgtattcacgcaattcctcggtcagtttgatcttgattttgtcgcccatttcgtctctgtgagaaacaagcccctctgccgtatactgcgccgcaacgctctttaccgcttcttctatacgcggcgagacgatggtctcataatagtttgtgccaatcgttttgtatatcgtctgcgcgttggctttttctatctgaaagtttatcgaatatttcatcgtcacttcctgaatatcgcttgaaaagcacgtcaggtcaaccgccgctttctgcgttctgttgtccattttaacaacttcctgccacggaagtttgaagtggaaacccgcttcaagcgtaaaattctcaaccttgccgaacgttgtcacaacgcccgtgtgtcccgtggggactgatgccgtgcagccgaaaagtattacaacaagcgcaaaaatcgaaaggaactgctttttgttcttcttccatttgtagcccgttccgtccttgcaaacgccgagcgcaacaaaagcgacaagcgccaaaataatgccgataacaagaaatgtcatttgttttctccttttaatatcatttgtttaggctgaatatcagcctataaaatcttttattgtttttatcacccttgggtcgtcgcataagtctccgttcagacttattttaccgaaatctttcgccgcaagaaacagaatgtcgggttcgccgttcacttggtcgccgaaagcgcggacgaagttttctttgttcgtgtttgttatcgctatgaattttttcggtacggcattgaatttttccgcgatttttccgttcgttccgaaatatccgcattgccgttcactgaaaacgaaccatgccgaacacggaaaatcgcaaaaatcgggaacaacaaaaattgtttcatcgctttccgttatttttcgatagacttcgtttgctccgtcacttgtatgcgggcagttttcggttttcttaaaacattcgtagtcgcactttccgcaggggcttatgccgagcgctgcgaagtcgataacttctgcgcctgtcatatccgcgatgagttttgccgttcttccgcagttcccattttttcgcggactgaaattgatgattacccgcatattttccgcctttcgtcggtggtctgattcaacctatgataattttaccatatccgcaaaaaaaatgcaatagctgcgcaaaatcaatttttatcgaaaatgtcagccgcagtcaaaaaaccgtgcgggagcaatatcccgcacggtttctctcgttttctgtttataaatcgtctgttttcttttctgacggaatgtgtgtgtgggttacaggtctctcattttctttgtgaaaagagccgttgcggcggcacacagcacaattgcgtagcccgctacccaaagcgcgtggggcagaagcgacgcaaagtctccgttcagaagaccctgttcgagttttaccgcatggacgaacggcagaaattccgcaatggttttcagtcccgagacaagttcaaggtcgaaccatacgcccgaaagccacgccgtcagattggtaacaagcgccccgcagataccgccgacctgttttgagccgagcgccgccccgcagagcagaccgagcgcgatgaaaagcagggaaacggggattatcgcaagcagggcatagattatgttcacactcggtttcagcccgaatgcgaacgccgcggcatagcatataacgctctgtgcaaccgcaattggtatcatcggcagaatgtagccgaaaataaaatccgaagcacggagcggggtggtgtaaagccgctgcaaaaatgcactttcacggtcttttgcaactatcattcccgcaaacagcgtcataaaggaaagaccgaagacagttatacccggcgtcagtttttcaatctcaaaaagcggcacgggaacatttttctgtatcgcgctcaacagaacaagaagtatcagcggaaatcccagcccgaaaaacagcgtcaacgggtcgcgcagaatttcttttcccgtgcggcgggcaaaaacaagcgttttcatttttttgccccctttacaagcgcgatgaacgcatcttcgaatttttccgttcccgcttcttcttttatttcggcaggcgttcccacggttatcagcctcccgcttttcattatccccacacggtcggcaagcgcctccgcttcttccatatagtgcgttgtgaggattaccgtaaccttgcctttaagttcttttatcaaatcccaaagttcgcttctggcaagcacgtcaagccccaatgtcggctcgtcaagaaacagtattttcggctcgcttatcagcgccatcgcaatgctgcaccgtctctgccaaccgcccgaaagtttgcccgcacgtcgtttcattacctcgtcaagtccgaatttttccgcaagttcggcaaccttttccgccgtcttttcttttgaaaatccgtgaactccgcacatcatttcaaggttttcttttaccgaaagattgggcgcgaccgccgattcctgcggcgaaacgcctatgagcgacttgacctccgccgtgtcgtgcacaacgcttttgccgtccattatcgcatctcccgcagtcgggcgcgtcacacacgaaagtatttttatcgtcgtcgtttttcccgcgccgttgacgcccaaaagcgcgaacaattcgccctcgttgatttcaagcgacagcccgtcaaccgccgtcacatctttgtattttttagtcaatccgaccgtctttatcgccttttccgtattgatctctccttaatatctcttgcaggaaacaagtgatacgcaacatttgttatttattatatcacaaccgatttgttttgtcaatggtaacagtccaaaacgtttgtcgtgaacagcgcaggcgaaaagccgtcggagaaaattccgacggcttaaaatcttttaatagggaaaatacctttcagcctttttgcggtccgggccttttttacattccctgttttattttgcgaattggctgttgtatagatccgcatagaacccgccgcgctccataagcgtttcgtggtttccgctctcgataacgtcgccgtctttcataacaagtatcaggtcggcgttctttatcgtggaaagcctgtgcgcgataacaaacgaagttctgccctgcgtcagttcgtccatggcgcgctgaataagcagttctgttctcgtgtcaacagaagacgttgcctcgtcaaggatgagcatgggcgcgttttggagcattgcgcgggctatcgtcagcaactgtttctgacccgccgaaatgtttacgctttcggaaagcaccgtgtcaaacccgtttgacagcgaacgtacgaatttgtcaagcccgcacgcacggcagactctccacaggtcgtcttccgtcacgtttttcatattgtaaacaaggttttctcgcaccgtgccctcaaaaagccatgtgtcctgcaagaccatgccgaacagttcgtgaatactttcgcgtttgacgtccgatatgggctttccgtctatttttatgcagccgccgtttgtttcgaaaaagcgcataagcagattgaccatcgtcgttttacccgcgcccgtgggccctactatcgccaccttttgtcccggttttacttttgcggaaaaatctttgattaccgttttgtcgggtgtgtcggggtaggcgaaacgtacatggtcgaactccacttcaccgtgaacgtctttgccgagcgtcggtttttcgtcctcgttttcgagtccctcgctttcgagaaaatcaaaaatgcggtgagccgaagcggacgccgtctgcatatttgtcagtccctgcgctatctgcgcaaggggcgtggtgaacaggcgcacatacaaaatgaacgagatgataacgccgaatccgagcgacgggtcgttgatgacgagtatcgagccgaaaacgcagaccgcaacgtatgctatgttgcccacaatgttcatcaggggctgcatcattcccgagaggaactgcgactttctgtttgcgtcgtaaaccgccttgttcagtcctttgaaacggtcttttatctcatcgcccgcacgggaaatgcgaaccacttcgtgacccgaatacatctcctcgacatatccgttgagtttgccgagattttcctggtgcgccgtgaaatatttctgcgaacgcgacattattataacaaccgcgaacagtccgacaagcgttattccgagcgagataagagccaatctccattccgtcacaaacatcatcacaagacaacccacaaactgcgtcgccgaagaaattatcatcggcagcgcgtttgtcaagccctgctgcaaagtcgaaacgtcgttggtaatgcggctcaaaacatcgccctgtgaatgcgtgttgaaatatttctgcggcacacggtttatcttttgcgaaagttcgccgcgcatacggtaagacattttcagcgtcaccgttgccattatataatgctgaacaaaggtgaaaagcgcactcagaccgtagataacgatgagcgttatgcccgctttcgctatcgccgcaaggtctataccagttatcagttcctcggacattatgtttgttatttcgcctatcttatccggtccgataattgtcagaaccgctccgagcgccgccagcacaagagccaacgccgttaccgcaacgccgcctttaacatagcccgcggtttttccgagcgccgccaccgttcctttttcaccggtcaaaggcgctcttgtcgctccctgcatcggtctcatatcgctgccccctctccgttcccgttaagtccgagttctttttcgcttaactgcgatttcgcaatctgtctgtatacctcgcaactcctcatcagttcgtcgtgcgttccgcttccgacctcttcgcccttgtcaagcacgattatcctgtccgcattgcgaatcgttcctattctctgtgccacgattatttttgtcgtgttcggcaaactcttttcaagccccgcgcggagttttgcgtccgtcgcatagtcaagcgccgaaaaagagtcgtcaaaaacaagtatttcaggttttctcgcaagcgcacgggcaatggaaagtctctgtttctgcccgcccgaaacgtttcgcccgagttgcgctatcctgtgctccgttccgtcctccgtcttgtccacaaactcttttgcctgcgaaagttctattgcttcttcaaggttttcgtcactctccgccgccgcgctctgcccgaaaaatacgttgtcctttatacttcccgagaacagcaccgttttctgcgtcacatatccgagtttgttgtaaagcgtatcgaggtcaaggtctttgacgttcactccgtcaaccagcacctctccctcggtagcgtcgtaaaacctcggaataagcccgacaagcgtcgtttttccgctgcccgttgcgccgattatcgcaagcgtctgaccctttcctatcctgaaattgatgttcaaaagcgaattttccgccgcattcggatatttgaaagacacgtttctgaactccaccgttccgctttcggaacactccgtcacgctgcccgaaactatcgacgaagacttgtcaagcacctcgttgatacgctccgccgagacctgcgcctgcggcagcagcataaatatcataacaagcatcataaacgacataacaacatacgtcgcataagtgctgaaaacaaccacttcggaaaacattccgagtctgccggcggggtctgacagcggaaccgcgttgacaagcgccgcgccgagccaatatatgacgagcgccaacccgttcattcccagccccataaccggctgcataagcgcaaacaaacgctggtttttgagttgcaggttcatcatctcgccgctcggaacatcaaacttcgcgttctgatagtcctccgcgttgaaggcgtgaaccacgtttattcccgtcaggttttcacgtgccacacggtttatcttgtccgtcaacttctgcaccatgcgaaaacgcggcagacatatcgacataattgtcagtatcgttgcgcaaataaccaccacgaacgccgccgttaccgccgaaagttcccaactctttccgagaattttgataaccgcccaaaccgccatgataggggattttatcatcatctgcaatcccatcgaaactatcatctgaatttggttgacgtcattcgtcgttctcgttatcaggctcggcacggaaatatcctgcatctccgccttgccgatgtccgtcacacgattaaaaatcctttctcggagcgtgtaactgaatcccgacgccgtctgcgccgaaagataaccgcacgcaatggcaagcgccgcgctcgccaacgtgcaggcaagcattttcagcccgacggtcacaatatctcccgttgtgtcgccgcccgattttatcagcagcgtcaactccgacataaagtcgggcagccgcaggtcaaaatacacctgtcccacaacgaggacagcgcacaaaagcgccgtcagcacctcgcgctttcgcatatttttaagcaattttatcatttttcactctctcctccaagcccgttctccaatatgtcttcaaggttctttgaaaacgtgtcaaagcaccgtttcatcgtttttgcgtcctcgtccgatatcccgtcaagcatttttttcgcaaacagcaactgaatctctcttcctctctcgattatatccgtcgccttgtccgtgtaagcaagacagaacttccgtctgtcatgctcgtccgttttccgttcgagatacccctcttcgaccatcttgtcaacgtggaaagacacaatggcgggcttgaaaccccgcagtttgcatatatctttcgccgtgtcatactccgggttgttcgccaaaaacaacaacatatctatcgccggcatcggcaaacccgtttcctcgcaaagcggaaacatcgcccgtccgtaagcgtccataaacttctttgttccgccgaacacatgcgccgccgttatcctcgtccttttctcttcggcatccgctccgcctgcctcttcctcgacaccttgctttgcgccgccgctcgctttatccgttttttccgccgccttttcggcttcaagcgctgtgtttttcaccctctttgccttgtcctctgcgtcatgcaccttttttcccgcattccctgccgttttttcgttttcgctcaccgctttgtccgtttttacaatcgagttttcggtggcaaccaccgttttttcctcattcattgccgcgttttcggtattaagcgccgccttattccctttttcggcacttctattttctttcttcattgcatatcctccaatcttgaatatttcaattttgaacaattcaattttatcatatccctctcccaaagtcaacggacaccccgcaaaaatattctgtcgcttttgtgtcaggcaacctttttgtaggtggtatcttataaaattataggttaaaaacccgcagacgagagttttcgtctgcgggttgcgttattttgtttaattttcagccgagtttgagcgtttttcgttcgccgtcgagggtataggtcacggtcggggcggcggcaggagaaacggagatgttttccgcgcgctcggagagggcgagaacggttttgtattcggcgagttgtttttccgagtattcggaaaaatcgtcggagacgaaaagcaagccgccaaagagcgcgtttgtcgtggcaagcgtcgatttttgctcgggcgaaagggcggtgttgcggtcgcggagcaggaacacgtcggggtcgttcaagaacgctctgcccgagagttgacggcgaaagaccgtgttcagaacggtatttttcgttgacggacgctccgaatggaacagccgcatatacggtttgtcgtcccatgaaagcgacatatccatgccgatacggcagtattcgactttgccgaaaacgggaagcaggggaacgccgcaggcgagaatttcgcggttgccgcagagttcgcgcaggaaatcggccgcttcaaacattatctcaccgcgggttttgtcggggcggggaatcatgcaggccgcataaagaaaatcgagtttgaaaagcccgaagccgagatttttatagaaagcgaagcattcgcgcaggtattcgcgcacgtcgttgttgtaaaagtcgagcgcccacgctccgccccagttgcttccgcagccgacgggtttgccgcttttgtcgcgcagcagccaatcagggtggtcatttgccaaagcggagtctttttgacagacgaaaggtgccagccatattcccgcctcacagcctttttcctttatcgcgttgactatgggttcaagcccgttcgggaactttgttttgtcaatgcggagccagtctccgactttggtttcaaaaccgtcgtctatctgaaaaatatcgggcgttttgtcaagtcggtcaaagccgcgcaacgcgttttcgataacgctttgtgagatgtcctgatagcggtcgtaccaacttgtgtagccgttcttttttgttacggagcgcggtgtgattccgagtttttcgaaccacgcgtcaaaaacttctttttctcttccgcgcgcaaagaatatatcaaaaactttatattcggttgcggtcacacgtcccgcgcagtctttttggaatattacgcggttgaagaccgtattgaaaattattcttgtaaatcccgtgttttccgcaagactgccgaagaaaaagtattcgtcgccgcgtctgatatacgcatacgaatagccgtgcagaacgcctttgcggtattcttttttgtaaaaaccgccgtcgccgtatgcggaaaactcaaattttttatcgaggaatttcgggcagaaccgcatggagcggtcaaaatcgcggacgccgtattcacggctttgcgtccagctttgatacccgttcaaaaacagtctgtcgtcttttttgaattcaaacggcagataagccgtgacgctttctgtctttgtttcggtgttcgggcagatcgtaaagcgaaaaccgttttcgtcttcttcttttcggaacgccgcgtccgaaccgtgggcgagaacagcgtcaaaaatgactttttcaggcattcttatcttccttttccgcaatctttttcatcacgcctttttcatcgtagaagaagaacagcacggcgccgataacgcagaaaacggttgctatgatggccgtcagacggtagccgaacggctcgaccgttgaggtctgtcccgaaccggtggtgaacgccgccacaacggaagtgaaaacgagcatggagaccgcctgtcccattttcatcgcaaaggtgcgcgccgcaaagaacattccgcttctctgttcgccgctttcaacggcatcgacttcggaaatatccgcaacaacagcctgcggcagaatgccgagaattgccatgggaatacctgcgcagacagctatcgcgatgccccagaacagaccccgaccgcatacggacgcgagcaggaatacaaatgcgtaggcaaaaaagccgacgattattaactttttcttgccgacgcggagcgcggttttgttgatgagcggataaaggcaaaggctgacaagcgtcattatgaccgtgagcaaaaacgtccaagtgtcatctatgcccatgagttttgtttcgtagaacgcaagccccgtttggaaaagcgttaccgcgaaaaagtatattatatcggaaagcacaaagcgcacaaactgacggttcttgaacgttttgaagagcgagcggaatgcttttgtcttgacgggttcggatttgatgtaatctctttcttttatccaaagagagggtataagcatggcgatcgccgcgacaaggcacatgattcctatcgcaagtcttatcgatttcgcggtcgtctgtccgccgccgagcacctgcgcaaggttcggtataagataggaaacggaaagtcctgcgatatatgtgaacgagatgaacgttgaaacgttcactctgtttttctgcgtgtcgccgagttcggagataagcgcgttatacggcgtgcagtatatcgtcataaacagatagaaaagcatcagcgtaacaaaaatgataatgtcgttgagcaatacgttcgacgtttgcggaagcacgaaaacgcaagccgtcataaccgcaaacggcacggcgatgactttcataaaaggtatgcgtctgccgcccttgaagttgcttcggtccgaccagcccgcaatcatcgggtctgtcaccgcgtcgaatattctgccgaccatggtgataagtccgaacagcgttatgctccaaaacagcgttccgcccgtgatgttcttgccgaacacgcccgcttgcgagtccgtgtaatagtaaacaagccagttgctgataatgcccgaaagcaaactccaaccgaactgacctatcgcaaagatccacagcactttgtttgttatctttttcattttgcgttgcctcccattgtcttaaaataacttaaaataatttcttttataagagatatttccgcttcgtaattttcgtcttgggtcagaattttgccttccgccgcttttcgcaaaagcgcaagcatcgtgtggttgaccgccagataggtcagttcttcgtttatcccgtcgcggacgcttccgtcctcacgcccgagccgcagagcctgcgcatacggtttgtaaaaatccgccgtttcgatctgatattcttcgagtttttctttcgctatattctcttttaagcagaacgcgtcgaaatcgtcgagaaacaaaagaaaatcccgctgcttttcaaacagttccgaatatgcgtcgaggatagcttctatcctgcctatcccgttcttttcgagaaactcccgcttctcaaaccgcggcttcaaaaattcctttatctgccgccaccaaagttttccgacctctatcgcaatggcttctttcgtcgaaaaataacggtaaagcgacgcaacgcctatatcgcactcttttgcgatgtcggtcatttttacgttctcgattttatttgccgaaaatagtttttttgccgcaaaaacggctttttcgaccttttcgccgcgatatttcgcccaatatccctgttcctgcacttgacaaacctctgaaaatgtgatagtataactatcagatattgattatatagtagcacaaaatttaccgtttgtcaacagtcaacgaaaaaatatttgaaaggaaaaaacattatgtcgaaatacacaagcgtgttcggaaacgaaatgccgaaaaaggttattgcgaaagcggaaaaaacaaaagcgagatttatccgcaaattcggcgatgacggcaatgtgaaatatacgttttccgcagttgaaaacgaagtccttgccccgatcggaacaaaagttcttgtaaagggtgacggcgctcggttttccgaccgctccgttataataggtaatatccgtatgggtttcgggcattatcgcatttccatggcgatggcttcctgcgctcatgcgctcggttttgagcccgtatggcttgacctgaactcgttccccgattcgacctgcacaaaactgatatcctatcagaacgacctgtattcaatgggttcgcgcctttcggataaaagccgtctgttcaacaaactttattgggaaccgctcaacagcgagggcttccgcaaactttcgtataacgcctgcgaccaagcggcgtccgaactcacggcaaatctgcttcgggatctacccaaaaacgttcctttcgtcgccacgcatgcatggcccgcgcaagcggcggtctgcgcaggatttgagcgtgtcgtcaacgcagtccccgataactggcctatggctctgcaccttgccgagggcagtctgcacaccgtgcaaacgccgtcttcgtttctcggttataaagcgttgcgcggcatggataaaaaacgttctcttcgcccgataccggacgatgaacttgcatacacggggcattatgtcgatcacgaatttgtttcgaatttggaaaatgacacggcgcttcgcgttgacagaataaagagcggaaaagcaaaaaggtatctgctgaccgtcggcggcgcgggcgctcaaaaagagatattccgccgtgttatcgaaacgcttctgcccgagatcaaggcgggcaaagccacgcttttcctcaatgtgggcgatcataaaaacgtttgggaggggcttttgaacgaaattcccgcccttgcttctgcaacgtttttcgaaaatgattactgcgccgcgtccgcattcgctgcacaggctctcaatggcgacgtaaacggcatttacgcgttttgccacgaagatattttcgccgcggtatatataacaaatctgctcattcgcgcttgcgacgtgcttgtaacaaagccgagcgagctgtcgttttatcccgtgcccaaactgtttatccaccgtgtcggcggacatgaagcctacggtgcgctccgctctgcggaagttggtgacggcacatacgaatgtgaaaccccgcgtgagaccgccgatatgataaaactcatgcagacggacagcgaggtgctgctttcgttcaacgacgcaatactgaaaaacaaagccgcaggtatatatgacggcgcttacaatgtcatacgccttgccacgacgcggtgatatatgcgatgccaaaaagtgctcgtaccgcaaaatgattgaaatacaaaaaacactcctcacaaaatttgtgaggagtgtttgcatattggcagtatagcaaaatttttatacatttcagccttttcagtttgtcaacagcagcactgtcagcgcggctgcaagggcgcagagcccgagcgaagcgaggacggacatctttttataggaaagtatgcgctctatcctaacgcggacttttgcacctccgaaagcggaagcgaaaagcgagcggctttccgcgcagttcagcagcgccgaggcgtatcgtttttgttcttcgacagatttccctcgcagaactttttcgtcgcaggcaaattcgatatcttcggtaaattttttcagaaacagccacgcaaggggattgaaccaattcacggcggcgcagagaaatgcaagcacgcgccaaaggttgtctccgctttttatgtgcgtccgttcatgttcaagcacggcgtcgatatcccgcgccgcataattcgcgggcaggattattctcgggcggaatatgccgtaaacggcggctgtcgtgaccttttcgctgacaaaaacattgccgtttacacgctttgcgtctttcagttcgataaccgttgtgaaatacagcgtaaaaagcgttatcgctatcgcggcggcgacgaccgcccacacgatcgacgttatcccgaaaatatctgcgaaaacgtcttttttataaacgacgggaataacggtttgcgccgtatgtgtgctgtttatcgccgaaaatctgagatgacccgttccgactgccgcagagtatacaaaactttttgaggacagcgcttcaagcaatttcccgagaccgaatcccgaataaagcccgaacggcagacaaaaacgcagaaaaggcagcgcccagaacgcctttatcgcacggcggggaattttgcggaatcggcgcagaagaagaacaagaagtcccgcaacgcttccgcaaacgctcatattgaatatccaaaagaaaatgttcatttttcaggtcgggcaggctgactaacaacctatgcgccgcctacctcccgtctatcattttccgaagttccgtaagttcgtcttccgaaagtttctcgtctttcaggagagatgaaaacagcgcttttttcgaaccgccgaaaagtttgtctataagagagtgcgtctcttcccgtcttacttcgtctctcgacacaagcgacgtgcagacaaaattcggctcgtcacgtttgataaagcctttcgcttcaagtttttttatgaccgtgtacgtcgtgttcttgttccagccgatggtctgcgccgcaataacgctgacttgctttgccgttatgggttcgttttcccaaactatctccataacctttatttcgctgtcaaaaatcttgtttttcatctttcgctcccgtccgcttttccatattgcggactatctgtgtagtctatatctattttaccacaacattttcgttttgtcaagcataccgcccgccgatttcggcgggcggtatgcgttctgattgcaaaatcaaaataaaggcatatgttatttcagtttcagctgctaaattggaataacggctcaaaaaaacgtgtcttatttcagttttgttttaactcggcacatca

SEQ ID NO: 38 - DNA, 24230 bp, Unknown
  16S sequences of unknown bacteria
atttcggttttgtcatagtgcttttcttggtcgaaaaacatctactctacattccctaagccgcttgtttaactcctttagcttttatgcactggagattttaattcgcgagatcattaacaaaagaaagataatcaattgcctactgaacatattagccaatatgaggatgaaggaaatggtcaaaaaattatgagaactgcaattttttcttttagatatacaggcttgttttgaacatatataatgatatacgatatagacgagaattgagttttttaatttgctcataagatagataaatatgtgttaagttatagatataggaagtacagagtgtatgaaaaacagaattcattatggagagtttacattagactattgggttgaacaaataatttcgggtgatatagagttacccgattatcagcgttcatttgtatggcaaaaagaacaaattaagagattcatccgtgcaataaaaaacgatgattttattccgcctattaccatcggaagattgaatgataaaaatatcataattgatgggcagcaacgattaacttcaattcttcttgcccatctaaatgtattaccatccaaaaggaaattgaagagaataaatcaagcaatagattgcattgatgacgcagaagatggacaagaaaattgtgacgagaattgtgaaatttattatgaatggacatttaaagaattaatacgattaggagacaccataaaagatattcaaaaagaattaagcaagaatgaaaactatgaaaaattggatgatacagctgttgatctaacgtttttaaagaaacattatttgggttttgcttatattattccacatccagatatccaacaaaatgatctagaacgatttttttctacaatatttagaagtgttaatatagaaggtactgcactattaaaatctgaaagtagaagatctctttattatctgaaaaaagcatatgtgccattgtttgatccaaactttattcattcaatagaaataaaatcatttgggtattcttatccattagactttcttcgtcaactcgccattatgtttgattatgcaaaaacgaacaatagcgcaaatgtgatgaaaggatataaattaaaaagcgaactttattatgaaatatttatatcagatacggtgaatcctaggaaagcttcaggtatatttaagaaattaaatgatataatttcagataataatatagaagaaagaatgagtttgtttcagcacgagtttcaaaagttatcaattcctaaagagctaaatagtataattgatgcagatatttacatgtttggtcttataaattggaccctaataggaggaaaatctcttgatgaaaacaaattagattcattgaaagagaatattagaagcactataacgatgctcaaagaagatgaatcacataaaagatctccttccgcattgaaacatcttcgaaaacgaatagatttatctgtagaaatcttcaaagaaaatttaaataacaatgcataaagattttattttatctaatatatcaaacattacagacgaagcatttagggcaatttcttcattagagagtaatattgcgactttccctttatgtgaatatattttgcaaactatttttttacgtctaacaggatatcaagagcaaaaattaaaatgtatactttgggaattagcaagcagcgattttcattttagatatgaatatcttcgcgggaatctaaaatatggagaatgctcaagtcttaaagacaagaatagtatttacaaaaaattagtaaatgttcttgatgaaaaaggatgtaaatttccaatcttaacagacgatgaaaaaaaagggcaactatcagatataagagcttattttgatgaaaaatttggtaattcgttgtttgtaaagtggttacctagagattattcacgcttccttgatttttcacaacgcattgaacttaatttttattttacaaaagaaaagattttcgaagataataatattcttaaagaaacctatgaaaatacttatgaccaccgtaaccgttgtgcccataatttactttgttatcagaagaatactccttctttagatcttttaatgaaagacaaaaatggtagtgaaaattatttttcaagaatgttcatattgtttcttatagacaatgtatttacaacattatttcaacaatattgtaaagttacacgaaaaatatgggattaacaagatgtaatcatgatgactactagaagaactttgtggaagaggagtgaacttttgaaattccaactcgttattattctgtgcataagagaaaaaataaacttccaataaagatatggcatttttttgaacgagataaatgatcggattgtatttttatggaggaatagatttttcataataagaataagtttatatatttgagatattgtataacatcagtaacaaatgaatatgaattatgagtgataataaaaaaacgaattcgataacagaataagggaaaacttatattttcttaagaaaaacaacaaatatgaatcttatgtaaatattttaaataaatggggtctcgaaaatgagaataatttttacaagttagttgaatctaataaattattaaacctattcggaaagaaatcacgtacaaagagagaggaggattttgttaggagcattggagatatatataagtcaggtgatgaatattattctatatattattggattatgaagtataagggactcttcaacgaagacattgttgctgatgccactaaacttgtttcccaagaagttgagactaaacctcttactttttctaatgtcgatgacgttatgaaatttgcggaaactgcgccaaatcatctagatgtatttcctctttctataaaagaaaaagcaaaaattaatagttataaattacctgttgagtctgcaaagtatcgcgatatgacagataaatccacagatcaattccatcaacaccatatttatgctagatcattatttcccgaaaaccaaggtaaaaatgacgtgcttattatattatctaaggatgatcatgataaattacatgagtcattaaaaaatggattacaatcttatgaagatgctataataaatttgattggggaataggaaagggggaaattaaaaataagagaaacatatgagaaaaggattgagaacttattaatgtaacagtttagaatagagaatttgcaaaaatagttcgatagaggagcattcgccccgccactttaaaagctgcaagttcaaacacttgcggcttttttgtttctacacttcgcgtcaaacccagtatccacgcggtttgcggggttgcgatgcccagccgaacgccagcaaacccgcattttactggatttgctggcgttctaattttcaatgcaaaaatcgaaaatttgcaaaatgtcgcgtaaaaggggcaaaaatgggtcaacttttgacccaattctgacccacgccgcaaagccagtaaaaatgggcattcgcgggcattttgtccctttttggcagtcttcggtaaaaattggcaaaatctgtcgccggttttcaaactttgcagcgaatgggtcaagtttttgggattaacccaaaggttgcggaatggcgtttcccttgggatttatttctcattgtttcgccttttttattttactacaatcttcgctaggttcgaaaaagcattttgcgtcggcgcgggaaatgtcgtgcatattgacgtagcgcgagcgcagaagcgacaagtcgcggtgtcccatattgagttgtaggcgcggtaggtctgcgtagtttttggcgtggaagcttgcgtaagtgtggcggagaacgtcctgaacccaacgtccgcgaaagcccgaattatcgcgaattttgcgccagcggcgttgccagtctgtcgggcagattttttcctcttttaattcgcgtgaatgtgttatcaaaagtcggttgagaactggaggaatttccacttggcggacgccgcctgtcttcgagcactgcgagcggacggtgattgtcttttcttcggtatcgatgtcgcgccaagtgaggcgtctgacttcgcgcgggcggattccagtgtaaaccaataacgcggcgacaatagcgtatacggggctttcgcgctgggcggttttgattagccgttttgtttcggcaagtttgagtggctggatttccttttcgacgacttttttgcgttcgattcgctttatcgggtttttgtcgcaccactcgcggcggagcgcgaattcaaacaatccgtgcaacatcgcccgcgccttgttgaattgactatccgtatgaaacgcagcattcagccattcctcgcattcagctacgctaagctccgaaaagttgcgcttgccgagttcgggcttcgtccgcaaaagtcggtttccgatacagcgaatatcccttatggaatctggacgcaaatgctgtttgctttttagatataatgcaaaaccgtcggcaaaggtcatttcttttgtgcgaatattgcgtagtcctacttcaataaccttcaaaataaattgcgcgtcggtcaatttgctatcgcttggctttgcgtccagaatattccgaacaaaccttgccgaatcgagaaccgaaaccttcgccttccccaaaacttcctgagctgaatttactatagtgtacatcgtattacaaatacgaatgtcaaactaaattttctcaactgcccattccaaaatgctcggcggggtatcaggcagaataaattttttgcaatcagtcagatgctaaaccctgcgcgctttctctatcgtattgaattttaagtagttgaataacactccgtgggtatcgtatttgtaatacgatactcacagtttgcacataaaatgaaagaagaaaaacagtcggacgaaaaaatcggagaatatataaggggcgcaatgcgcgaacttttttatcaagagattttatcccccgaagttgtaaatgaccttaaagacaagaagttctgcaaggatacttttgggctagactttcccatgctagaggaaagcgaaagcaagttatacgacgacaaaggcaagttgcgatattggaaagatatttttggcggcaaatactatataacaaaccactggtttgagccacaacgagagctatttgatgcgtggttaaaaaaaattgtagccgacattcctcctgtatctgacacagcgtcggaaacgctaggaatggttttaagtgtgtttgtgggttattcttgggctaaagatttaagcgtctaccaagatccctattggataagtattcgcgaatatttaaggaaaattgccgaagacctcgagaaacagtataaaaaccaaataacaattagtgtaaaacggctaagggcatcgcacgcatgttttgtacacgacgaaattttacggcgcatagacgattcggcgcttcttgttttcgatttggcgcaaaaccctccgttaaacaaccccaacattgcaattgccaatgccgaccaaaacataatctattcggtttttaacagcaatgtgctttacgaggcgggcgttgccgtaggcaaaggcaaaaagccaattattttgtgccccgaatcgcttttaagcaaagtgccgtcggatttgcgcgggtatctttttactacttataaaacttcttttaagccgaaggaggagtgcccgaaaggcacaaagataaaatatataaacagggaatattcggataaaaaagggctacaagaggcagtgcggtatgctctcgaatcgaagataaaaaaggcattgaatttaaataaataagaaaaaaggaagagacgtatatgaaaaagagcattgtatacaccttggtaataacaataatgtctcaactgatagccgatgacgatatccatacggggcaaattagcggagattactctggcgaaagccatgtagaatccgtctgggagaatacctattctctggataacgaaaaagttattttttcgacaatcgacaaaaaaacaaattataaaaaagccaattttaattctgcgaggataaagggcgcggatttttctggcgcaatattaacatcttcaaatttctacggcgcaacgttaaccggcgcttcattttttggggcaacgcttggggatgcatattttgaaaatgcggaaatccgaggtgcaaatttttcaggagcttcacttaccagtgaacagatgtattcaactgcgagttaccaaaatggagatttgagcgggataaattttagcggcaacaacctgtatggatggaattttaatggaaagaatttgacgggagctaacttttccaaatcgaaattgaacagtgtagactttacagacgcagagataaaaggtgcggatttttcggggtcgcagtataatgcaatcagcgcctcgcagttatattcaactgcaacctataaaaacggagatttgagcgggattaattttgcggaaaacaaaatgaattttgattttaaagggaaaaaccttacgaatgttaatttcagcttggcacttttggaaggaacaaacttttacctcgcaacgcttaccaacgctgactttaccgatgcaaatataaaaggtgtaaatttatcagatgcattttctcatggctttacaaaagaacaattatactccaccaacagctataaagaagggagtttgcgtagtattaattttagcaacaatgatttacgtggtattgatcttaaaggcaaagacttgtattattcaaatttgacaaatgcaaatttgtctggctccgatttaactggaacattactctgtggaactttaaaaaataccgattttacagatgcaataataaaaaatgcttctttatatggtgcggttgcaaaaggttttaccagagagcaactatattcaactgcaagttataaaagcggggatttaactggtattaaattatcgcaaaacgacttaagtgggtgggatttttcctctaaaaatttaacaaaggcttcgatttatgctactatcttaaaggataccaattttgtagatgcaataataaatggagcggactttcattcaactgtcgacaaagggttcacaaaagaacaattttattcaactgcgagttataaaaatggtgacattagtggtgttgatttaagatccaataatttgaatgattggaattttaccgaaaagaatttgtcaaacgctcggttcgatgatacttatctttctgaaacgacaagttttatcggtgcggatttgacaaatgcaaatttcacgaatgccaatgcgtcttcaacttcatttaggaatgcaactcttacgaatgccaatcttaaaggcgtggattttgcttcggtaaattttacgaatgcgaatttggaaggtgccgcaatgaaaaaagcaaaactaaacgagagtatttttcgtaatgcaaatttgacaaatgccggctttgaagaggcttcgttgcagaacgtagattttacaaatgcaataatcaaaggtgcgaatttcgaggctacttatacctataattacagcagcagcaagtatgaatatagcggcagtatttcggcggcacaattgtattcgaccgcaagctataagaatggcgatttaagcggtataaaatttatcaacaacgaattggatggctacaattttacagggaaaaacctctcggaggcggactttacaaaggcaaaattcgttaatgcgaatctctcgaaatctacattagcaaacgccatatttacagatgcttcgcttgataatgtaaatttgtcctcgactacagccaatggtttttcagcagaacagctttattcgacgaagaattatcaagagaaaaatttgaaggggataaattttagcggaaacaattttgacggttggagtttcaaagagcaaaagcttaccgattcaaactttacggacgctatggtaaataacacgagcttttatggatcatcttttacaaaagaacaactgtattcaaccgcaagttataaaaagggagatttaagcgggattgatctgggagccatgactttgtctaaatgggagttaaagggtaaaaatctaactaatgcaaaatttgagaaggctaatctaacagggttggatctttcgagtacaactttaataaatgcggattttaaagaagcaaatcttagcgatgtaaatcttacatatgcaaaaattcttggggctgatttttcgaataatacatcgtttacatcagctcagctgtattcaacaaatagttataaaatgggcgatttaacaggagttaaattttgcggcaatgatattagtggatgggatttcagcgggaaaaaattgcttgatgtagatattaccgatgcaattgtgtgttctgctaatcttgaatctgctaagtttgaaaataccgtatcaaagggttttacaaaggagcagttgtattcaaccgcaagttataaaaataaatatctattcggaattagtttgggaaaaaatgatttgactggatggatttttacaggtcaaaatctgaaacaagcgagttttcgaaagtcaaatttgtcatcggcagatttttcaaatgcaaacgtaagcaacgccagttttgctgaggctaacttgacgggtgcctccttttctgatacagatgcttacggggcaacattttcagatagcaacttaactaatgtttcgtttaaaggtacttcgctgataaaagcaaactttactcgcgcaaatttgacaaatgcaatactaggtgggcgtttggacgaagcggtatttagtgatgcagagattacaggggcgagtttttctggtacatttactgcggatcagttatattcaactgcgagttataaaaaccataatttgaaaggggtttccttgattgatgtaagtggttggaattttgaagatcaagatatgaccaatgcatatttatctggacatacagataatgcgaatttcactaatgcaaaaataaaaggaatacatatcgattctatttcatttagtgcagatcaactatattcaactgaaagttataaagaaggcgatttagttggcgtcaatttttcttgcatcatggataattggaatttcgaagggcaaaatttgacaaatgcagttttagcagagtcgatgaaaaaggcgaattttacaaatgcaaatcttacaagtgcggggttgggagatagattagatagcgcaaattttacaaacgcaaatttgactaacgcgaatctcgcggaggcgatatgcttttcaacaaatttcaataatgcagacctttcaaacgcaaggctttcaagcgcatctttgattggagctgattttcgcggcgcaatattaaaaggtactgattttaccgatgccgacataggtgccgttttgtttaacggggctacatctaacggttttacagccgaacagctatattcaaccgcaagctacaaagaaaaagatttaatgaatattgatctttctaataataacttaaatggttggaatttcggaaatcaggatttgcaagaatcgtcatttacaggctctaatttaacgaatgcggtattctattctgccgttcttcaatctgctgatctttcaaatacaatacttttgaatgctgacattagaaacgccgacattgaatatgctaatctgtcaaattccaatttaagaaacgcaaacctctcaggttcgtatagtggtaatataaatttctcaaattcaaatttatttggtgcaaatctaacgagtttaaatttggatacggctgatcttaccgatgcaaatcttatgaatgcggatatgacaaatgtcaaactgggcaatgcagatttaactcgaactgatatgagaggggcaacgaccacaggtatgttccgatatgaggatcgttttatgcgctacatgaataccattgcggaggatggtacaattaaaaaatttgctatggtatcgcctaaaggtgactttgctatacgcagatatgaaccgttgaatgaaggagaagcaataatttcggcaaagatttctgaatcagatggtattataaaaggtaaagcaaaacttacgcttgaacaaggcgcgtttttggaagttgtaaacggaaaaacattgacggttgcttccgacgggttgattcaaattgataccgatttgagcggttctacgattttcaatgtaaacagcaattcgggccttgtttttgaagacggcgcgatgctcactgtaaatatcgtagacgatattatgacaagcgatgcctacacttttgcggtaatttcgttcgaagatgattcttgtattgcaggattaaacaatttcgttaaagacgaaactttgttcctaactgtaaatggagaaaagttcaacggcgcatgggactatgctattaaagcgaatgaattatccatttccatcaatgtgcccgaacccgccacatatgcggcaattttcggtgccttggcactggctttcgcggcgtatcgcagaagaaagtagaatttcataacaaccaaatacaagaagagcctttcggaatcccgaaaggctcttttttaccacttcccgatagggcattcttcggaagccaattttagttttgctaaggagcaaccgcattttaggcatttgcccattccaaggcgggcggaagccttccaatattggcatctatcgcaaattgcttgacgttttgccaaggtttcatcgtgtcccgtatcgaatctgggcgcaaatgttgcttgatctttaaatatagagcgaatccatcggaaagggtcatttcctttgcgcgcatatgtcgcacccctatctcgataaccttcaaaatgaattgcgcgtcggtcaatttgccgccggcgggctttgcgtccaaaatgttcctaatatatcttgcggagtcaagaaccgaaatccccgaaccgtctaaaatttccatcgctgaatttaatgtagtgtccatagtattcggaatacgaacgtcaacgcaaaacaattcaaatgttttatcaaatactctttcgggtattttcccgcttcggaggctgcgcccgccgcgctgcgccgttttttttatattctgatttttacggcgttatgcttttgctttggagaatcgtattccgaatactatggatgttgaatcccaaatgcgatctttttattaacgtataaaccgaactaagatgaaaaaaaccaagaacaagaaacgaggaatatcgttatccgttccattgctcttcgctcttgcagcgaatgtctatgcggacggttggacatatgatcccggcacatctggggtatcccacatcggaacgtcgacacgcacggctccgattgccaacggggagcaagacgaccaaaccccatccctatcgatgggcacggtcgacaccgcgcaggtgcagggaaccgccgaaataaaagacaccgcccagggggtcgtcttcgacggctctacaaacaagttgaccgtcgactagggggggcggcacttaacgttgaaagcggcgccggcgacgtagtcggggttgtcggagtagacgttcttgaaaacgagggaagtataaaagtcgtatcgactgccggaaacgcgacgggggtaaaggcgggaaccgccgccgccgatttcaacgcgaaaaatatttccgccgagtcggcatcgggtacggcgattgcggtcgaaataggaaaccgcaacggaaacataaccgtcgacaacgcgacagcgacaacgtgagattccaacccgtcggcattcgcgttcaagtctgacgacattaccggcaacattgccataacaaattcgacaggcaaaatttctacgaaaaatactgtcggcgatgttagcgtatcgaatacgacgggcgatttcaccgcagatgacatatcaggcaagctgagcctcgacaatctgacgggcaacgcgacaatcgcgagcgcaaacaccgtgtcgtccacggcactcactggtgaccttaacgtagcttccaacagcggtgcggtaaacatcggcgacgtgtcgggaacggcgactttcggcaacgcacaagccgatgtcacagcgacaggcacactcggcgcactcgacgcaacactcaacggcggtaacctcagcgcagcgaccgtaagcggagcgacgaccgtaaacggaacgggcaacgcgacaattacaagcgcaaacaccgtgtcttctacggcactcactggtgacctgaccattggctcagctaccggctacaccaatgtcggcacggttagcggcggacttattgtcggcagcgccggcggagacgttacttcgaccgcgaacgtgggctatgtttccgtaaagggagcagaccaaacccaaaaagtcgaattgaagaacgttctcggcggaggcaactccaaaatcgaaaacgtatcgggcgtaatcgtcaacggaaagatttccgcgggagcggacaaaatgaatatcgtgtcgatatccaacgatgtcgatttccgcgacgaagtcctgctcgacgcgctcggcattgacaccgtcggcagcgacgtgaagtttgcaaagaagctgaccgccgcaaattccgtgacaatcgacgacgtaaacggagacacgacctttacggaagacgtttcggcaaattcgttctcgatggataacgccgtcaagggaggaaacgtaagctttacgggttctctcaaaacggcaggcgacaccgaaatcgcgaatgtttccgacatatccgccctgaacgggattgaagccaaaaatctcaaaatcgacggcgcggacaatgtcgtagtcgacaggatcaaggctgacgaaaacgtaaacgtcctcaatgttgccggcttcacggccgacgcagtcgaagctgcggacgaaataaacatcgaggcatcgggcaatatcgctgtgggctccctcgacggggatgcggacaatacggaagccacgctgagtggaacgcagtcttcgtccgttataacggtcgatacggcaaacgtcgctacgaaaatatccaacgcggcggaagttgccgtaaataaagccgccaactatctcgacttggaatcggtcggaaacgccgagattcgctcgatagctgacggggtcaactacacgcaggtgaacgacagagcgtttatgtacgccgacaatgtcggaacgattgaaatcggcgccgacgaagtcggtgcggtgtacgacactggcgaaaatcccctgataatgtcccaaagcggcggctctgcaaccgtagacaaactgattctccacgcttcggcaatcaaatccaccgcgctcacgggaacggttctcgatatcggggctgcatcgacgggcgatagactgcggttgtcgtttacgcaaaacgatgtggaaatcgtcggcaagctgaattttgccagcgatgtcgaactcgtgacggaaaacaactggaccttcgattcggtaaagtccgccggacagcactccgccgtgggcagaacctccgatgtcgccgtaaacagcgttctcagcggcacggaaaagtcggtttggaactttctgaaggcgaaatcccatgcggcgttcgcattcgaagccgcggacgaatcggttgtaaacgagttcacgcttgtgggcaaatacgacgacgttccgcaaagcggctcgttcaaccacacgtacagggactcggcgggcgaaatccaaaacgaaaccgcgcagtacactcaaaacctgacggcaaccgacctctacgcgacagacatcgacacgaatacggtttcggggacaaccgacaacggtatccttgatgtcgaatactcggtatcggacggcaaggtggtccatgaaataaaggcaaacagattcgtcgaaaagacggttgcaaaaaccgcaaacgaagccgaatttgccaaaatcatcgacagcctcaaacactcgggcgatctcgataaggacagcgaaaacatccgcgacattaaaatgccgtacattacgggcgaaaagtcgctttcggcttcgcttccgaacgcaatgacgtacgccgcgcgccaacaggcggctctcgcgaattcgatagcgctctccacggtcgactacatctccgccacccgcgcaatgctcggacgtccggcgtttgcggattcgaaggaagtcgctgctgtttcggacggttcggaaaaggacatctccgacgttacctcggtatcattcaggagtgtaaacagactcggggattttgcgggaacggacggaaattcgggagccaactcctattcgaccggcggtcttgccaacctggaatacatcgtcaaccgcgacctcttcttcgggatctcggcgggcggagcgtattcccgcgcgacgggcgacaatgtatcggcaaaagccgaatccactaacctgataatcaatctctgcggagactatcagataacggacgggctcgacgcgtacatcggtctaacctactcctacggagacaataaatccgaacgcgaggcagcggccggcaaggcgaaggtcgattacgaaagcgacaccttcggggcattcggcggcttgcgctatacgataaaaccctgcgggcttcccttctcgattacaccccttctcggtgtaaactactccgcagtgcttacaaaaagcgcgacggaaaaggaatacacgggtctggacgcaatgtcctatgccggtggcgactaccacagcatcaggactcttgcgggattcgaggcggcctaccactgcgaggatattctgagaattgccgtcagcgcaatgtacgcccacgaattcctcgataacaggtacaacgtaggctattcgctcgatccctccatgtttgccgtcagcagtggcattttcaggggatcggtaatcgaaagagactacgcgattctcgggttcggcataaacggcaacgtcaccgactccgtgtcggtgggggcaaattacaacgccgaagtaagcgtatccgagctgaaccaccatatcggcggctatatcagattcgaattctaatgggtctgtaaaaacaatgcatgggggcggatttgcgaaaaatccgcccccatttgcgtataacacaaaacatgaaaaagatattcgcattttccgcatttctgtctctctgcgccgcgcatttgcccgctgcggacgtttccgccgatttcgcgggaggcaatgccgttatcgccgcttcggcgggcggaaaaatctctattgccccgattcctccggctgctcgcgcggcggaaattattggaattttcgcgtaagaaaagcgtccggcaaacttttggaaataagcgtatcgggcaaaaacgccgttgacgcatgcggggcgttcgtctcggaggactccggcaaaaactggacgccgctgggcgcacattctgtccgccgatgtggcgattccgcaaaattctcataccgcgtctcggaggacgccgccgaagtccgcttcgcttccgtcataccctatctgcattcggattttaaaagattcgcgcaatcgcgcggaatcgcaatccgacatttctgcaaaaccgagcgcgggcgcgaaaacgtgttcgttgagctcggaaacgaaaactccgccgtcacggcgattctaacctgccgccaccacgcctgcgaatcggcggctagctttgtcttggaggggtttctttcctccgcaaaatacgcgaaaaacattcgggttgccgcctttccccttgtggatttggacggcgtagaggaaggcgagcagggaaaattccgcaaaccgcgcgaccacaaccaggactattacagaacgtcaaggtacgccgccacggcaacgctaaaacggatattggagaaactgaacgccgacgggaaaaaaacggtagttttggatttgcattccccacttttttcggaaatgagcaacctcgccacgcgcgccaacggcatctatttcgtcttcgggaaaaacggcaaaaagcggaatttggcaaaagacttctcgctgaagcttgccgagtgctgcaataaatcgggcgggcttgcgaacaatcccgaattggatgtcgacttcgacccgtttttgcacgacagacggccgataacattcgccaaatgggcggaaaggttggagaatgtcatgtggagcgcggctatggaaataccgtttgcggtccagccagcgaaatgccgtcaacgcccgaccagttgcggaatttcgggaaggctcttttggaagagcttgacgcgcacgtagggattgtctgggcgcattcgggaaaataggctatttgcagcgggatttggaaatcacgctttagcaattgtgacccgcaggcagcacattgcggtaatagaagtcaacaaaccgaaatacgaagccacatcaagcatatgaaaagcgatttatccaagatatggtgcttgtcgcccttgccgtcggcggatttcccacgatatttcttgcgcgtcaaaagttcgattggcactttcgtgcgttttgccgcttggcgaacaaagtcgggatacggattgttcgggttgtatatgtctttatgtgcgtgaaaaagtttttcgtccatttagttcctttcgtatgctagttgtttgttggcaagaagccttgccgtgtggagaatcggcagattgcaatgttcgtaagctataacaaaactttgctttgccgattcgcgtttgtgtctgattttaacttcgcgcaggtatcgcaaaaatgattttgaatgatgagatttcatagattataaagtgtctttgtctaaaaatttaccgttaaggcaggcgttaaaatctattgctttcagatggacgcgcagaacatttgcgcacttgtcgatttccgattcgcgtttgctttctggcattggcggcgcatcgacgaagagacgctcaatttcaacaagaccgttcgattggaagccatcggcaagctttatcgcggcgtagcccgcgggagcattcgaaagcgttatcggttcgcgtttcttgcaagattgagaatcactgccgaacccaattttgcccctctgaggctcgcaaaagttcaggtcatcaaccagttcgagcacttcgcgttctttgcttttgaagactaaaacgttgttaaaattcgtcataagcctgcggcgagcagactctcctaacgccaaatcaagcccgacaagcccctgagttgcggcaatcacaaagccgcgtttagagcgaattgtctgcatattgaagccatcgcccgagatgttctccccgtcacttgccacaagcggaaattcatccattacaataccaacaagccggcttggatttttccgcgcctgaatgtgtccatagacatcgctcttcaagagcttgcaaattgccgatgacgactgcctgttggaaataccgtcgaagctcgccacaacaatctttcccgaacacacaagttcgccaacgtccaagcacgtcttgttctttccctcgaaaatatgcccgtttgtaatcgggttgccgaagttcgaaaccaggttcgacatcgtgcttagctcattgctcttggttcgcggatcgagatgttgccattcgttaacgcccgcccgcgtgttctctaaaagttcgcgtaagacttcgtaggattcggcgactgtgcctttcgacttcttttcaagcgcgcgtaaaaccatctcaaccgagtccatcacgtcgcaccaattactgtttgacgaatccgccgttgtaaactctcgcatctcttccaagaacagtttaaacgtcatccttccgtgccgaaacaaacaataagtcagcacagtcttgaaccgctttcttaacgactgttcccaatagacctcgctgctctggaatgggaagatgttgtaaagccgttcgacatattcggggattttgcggaaactgtccaagcctccgagcgggtcgaagtagaacttggaatcggcgcaatagtctatcacatcttcctctcgtctgaattcttccgcccattttcggattttgaaaaacgtgttgtcgcccttcaaatcgaagacgagtaatccgactttctgcgtttcgtcttccacgttatatccgatgatatcgcgcaaaaagcacattgagcgaagttgtcttcccgctgccagtgctgccgataaatatcgtgtgtttgcagagtgcgtcttcggaaagttgcagctttcccgcgcttgttttgattgcagaaactattttatttttcatggcagaaaatgtctcctactcacaaaatttacttcgaaagatactcggcatagcgcgactgcgctaaatctgcccccatacgttcgagtgtggggattatctccgggcagtccaaaatcactgcgtccataaagttccacccgcgtttttgtaactcgccaacaagctctgtattttccgccgcgcgatacgcgttgatgaaaatcctcgcaaattgcccttcatcgattcgcctgaacaaccccttcgctcttgccgcaggcaaaagcgagaggtcaagacacagcaactccaacatcactgcatcagtcaggtttagtgccgacatcattttgcaatcgaggtcgtcgcgcatataaagatagcacgcaagctcgttgctgtttggcgcatatcccatcgcaggcaacgccaagaacgcctcctctccaagccgattgtcgcaaagcagcagctcgcacagcaagctgtgcctggctataaaatgcaaactttcgtcattcaaaagcccgccgttattgtcgattagttcgtttaatatgtaatattctttactcataaaaaatagcttatagagctatgtcttatgaggtaaaaatttgcccgagtttatctgtcgctatgaaaaacgatgggtaaggcttttgcgattgagcccaacatttggatatataatttttaatataacatgttattttgcttggcaatacgtctgaaagatgcacttacatttgcatttgcggcgattgacttccaaaagttttttgccatctcgcgcgattctttcgttggcggaatggactgcaacggttcattgcgcaatgtgccgtcgcttagcggtgcgtagaacataggcagcatatcgtagattggcgcgagcgcaaacggcaaatcgtgttcaacgtaaaagctgatgttgccgaaatgcatatcggtgttgccgatggcaagtccgaaatcgtaaatgcgttcggcaagctcaatgtcttccgcgcgaaaataggcttcccctttgcgcattgcttgtgcccacgggccgccgccatcccctataaacgccgaatcgattcccgaaagcgaactagtgccgtgtctgccgtatctgccaactcggtcaatgcgcgagtattccaagaatacgcgattcttggcaaacacaagttgagctttggaggcggggaatccgtattttctcagaacttgcaaagcggtgtattctgcaatgagcaggtctgcccaacggcggttgatatcgtttgtcgtctcacccgaaaattttacgataacattcctaaactctccgtttttgccctgcaccgttgtgcaaaatttcggctgatcgcctgcggtggaagaacgcggaactccgttcgagaccgcatttagcgcaagttcgggatattcgtcttcgcgccgcgattcggggataaagaaattgttgcccgccaaaaatgccgattttgcggtttcacccaaaatcagagaacccgccaagtcgccgccaaagcggacgtcatattccagaatgtccgaatcgccccatgatttcagttcttttgagatgccgaaagttttgttgaggttgcagacgatattcctgcctacaaatccctgcggacggtgttcaaacaaaaaccacggaagcgacgggaatattttgtttttgaattcgtccccgaagaaggcggggtagtctccgtcaagatagaagcccgcactggttgaatagagcacgccgattctttcaacattctccgattcgtctacacgatacaaattccattgcgaaccgacagccccgacaggcttcggcaaagtatatgaacggcttaccgaattgcctattgccacgcaagcaagtttgttcagaagctttattgcggtaggttttgatacgccaaatgctttcattacatcggacgaggaaaccgcgccgttggcaacgatgaaatttcttatttcttgttcacttggcgattttatttacgctttgaaatatttatcgtatttaatggtaaattagttaggggaatgcagccaagaaatatttacgcatttatttacgcttttgctggtaagaatattcccatttcaaacaaaaagcggcgggaaatcccgccgcctgcacttttattaacggtcaaaatacattccgttgtctttttggggaggttctttgggctttaaagagcccatttcgcgagaactcctctctacgaataacctgctaatctcttcccatattcggataaataatattctcagtgatgatttccccggccgtagtaattctccaagtacatttgcaaactcctcaaaagccctgtcacttttattacatccgatttcaggggacttaactcttccagtttggcctgcagttttgcacatttcagcgataaggaattcaccgcatcggtcaaatccttcacgttttctaccattggattccaagccgattctgcaaaaagcttcagctctttttgccttgccgctttcatctccagcatggcattctgtttgattgtttcgcacacttcgcgaagcaatggttctaagaatttcatttcctgaggtatttctttcatttgggttaatttcctttgttgttaggtttttatactttttagcgagtatttttcgcggcgttggttttcttcacgccacaatttagtatagtctacgttgtgtaaagtatggatgcctcttgaatcctttcgggacaaaaatgtatccatattaaagccatcttcggcagcaggaccgcggagacgaactttcctgttttcgtgaagaatcgtgatatagtttttccctatattcgttatattgattccacgattttccaaggtgtgtataatgtcgttcttgctcttaattccggagaataaaacgttcctcgcgcaattgttcacaaattcgtatgttttctttgtgaattcgttgcttctcgggttcgggacaaagagacgcaatctttctattccattgggatttttcaacgcagggtatttttgatggagcattttcaatagcaatttatgcgcccgtaaatctcgttttacaagatagggtgaaaattgtttcccatccgctatcccgaccatatagaagttaagctcataacttttatccggattgtgatggcgaataaacaaatagttgaatttgcttcggtcaagccccggcaagaatgtttccagtatcgcttcctgcaattcatcttcaaatttgcccccccatttcctctatcgggtttgggtcgcgatatgaaaatgtaatttcgggttctttgaattttgaagcagcctttcgggcttctcttactgccggcagaaaacatccgccaacaatttcgctgcggcgcgttcttccggcagaatcaatgtttccccaaagatactccaatccatctttaagctttatgaatttctcaatcatttaacattttcctttctgtttttaaagattcaataatttggtatagcgcaaagagcacttcaaacagggtcgcttgaatggctatcgcatcaaaattttcgccatacttaatggctgtgttgacgctccttgcgagttggttgacgtttgtgccgattttgtttacggcgattatcaccttatcggggacggcaactatgttcatggcgggctttattttggtctgggtccgcccgatatatccgcaaactgcattgcggattaagccggataatttcattccgcgtttctttgcggcctcaaaaagctcttctctttcttcgtcctgaaaacggatttttatgaatttatccttgttgggctttttcgccttatccgccggttgccccatattttggtatgaacgcgtagcgtttggggaggttcgaaggaggggtgtaaaaccctcctcgcaagccggcttgtgtccactttgtgggcacaagcctgagcttgcccccgtaatctcaaagttttcgccgatcattatttgagctcctttcttacataatattcataataatcggatgttgcatgctttgaaatctttccgataacggacgctacagttgtgtatccggggctgtctttcgtgtagataccttggaatatttccagaagttccactattcgcttggcaatatcaacgcgttttgtcacatcgattttgccgtcaaccgatacacccggaatatcaaaccaagcgtattcttgaggggcattgtttgccttatcgtcttcgggatttaacaacgtttgcccgtccgatatccccgtggggggctcaattccaagccggcttggaattttgttttctgctttcggttcttccgtttgcggtgtatccgatacgtctatcacatccgaggtgattgcaacttttccttttctcttacctttggattttacggatggtttcttgtatttattcaaaaaatcgatagtgtaatccctgcttttggaatcgctttccagatattcatccaaaattgtatcaaaattcggataatcaataatcccttcaaatggcgcaattaccgtaatgccaagttgactcatttgctttttcttttcagcatccgttattttctctaggacatagaaagccagatgaacctgacgaaacatttcgcctgatatcctaatttttaatcccgttcttttttcaagttcatcaaacgaaagttcagtaagatcgggagatttttgaaataataacagtagcaaccgcgatatacagttctcatgaactttttccttatttcttatatgggcgattatatcgccaacgacatttgcgtcattgcgttcggctatcgaattgtaaaattcatcatcttcatttcctgatttttgtaatgtggttcctccttccttttggttattgattgtatttcattttttattaaaaacgtggcggggagggggtatttgttcacaaaaaaacggaacgaactgagtgtccgttccgttgcaaaacacctatttaccaacgtagcttatagcattacgggcgaaatgtgtttattcttggcgatttgaagaactaccgctttcttgtagcttttgctcaacgggcctccgcttatcatttcgggatacttgtggcggtatctgttcaatgtacggtcggagattccgcccagcaacattccggggtttgttacggaatacttagcggtcaagtatgatatgcattcgtcatatgcggcgggcacttcaagtttaagacttgcgcaaacctcctgaaaacgggcttgatggacaagccccgtgaccgagaacttgatgtccgacggaatagaccttgcactcttaatgcaatttacaaacgattccgcgcttactctgtctttaaacgactggctgcatctgtgtgaattctcaaaataacgaacgcgaaacgatgtcgtttgaccgaatttgtctttgcgttcctcaatagtgatatttgtctggcgtaactttttcataattacagcatagtctctgcccgtcaaaatttaccctatgcccatttgccagatgaggaacgaaaaattgcagtcataacagcataactattaaaaacttttgaagaaaattaaaaaaagttgccgatttcgcaaaaattacggcaactttttcctatactatatggctttgcctctttaccacgttattagcttacctttttcataaaataatactagtatccccaataactggtcccataaggattgattgatttgttctgacgaatcaaaaaataaacaaggcttgaagcagaaaaccaaatagctaggatagctgacatccagaacattagcgcgacaaaacaggggaacaaaacgcatttgcagatatccgatacgcatttcaaaaatccgttttccgaactttcggtatcagacggcacattgaagttgttggcgtatataactacacccgattctcctctcttacccaaatattaggtaaaaatgtgtaattttgc

SEQ ID NO: 39 - DNA, 9425 bp, Unknown
  16S sequences of unknown bacteria
gttgacgagcccgcagacacggaagcgaacgaaaaattgataaaagcccttgcggcgggaataagcggctttgcgcccgacataaaaaatatcgtaacaacgaacaattcaaaatatgacggatacatctcatgctggtgcccgctttggaatatgatagacaaaagctttgttgcgggaaaacaggcgctcggcgaacacgtttggtggtacggatgcgctgttcccgcggcgccatatccgacatatcatctcaacgataatctgctttcgcctcgaatagttcattggatgcaaaaagattacggagttgagggagaactttattgggctactacgctttttgattactacaaaggcggcggcaactatgttgccagagacgtgtggacaaacccgtacacctcggaaggacttcccggagacggctatctttgctatccgggcaaagagggcgacggcatagtcggcaggaatatgctggttccgacattgagacttgaagcgatacgcgacggaatggaagactatgaatatctgacgcttgcggaagcaaaaacgcggaaattcatcgaaaagtattcgatagacgcggacgcgaaagaacttctttccacatatactcaggctctgttcagaagcgtcgggaattacgagcacgactcttccctgctgacacagatgagaaaactcattgctgaatatctgatgagcaatgacacaacgcttgtcacgacaaaaatgaatgagaacggctcgaacacggtaacagtctattccgaaaataatataaatgtttcggcaaacggcaaagactttgaaaaggaagcaaaaaacggatatttcgtatatacgctgactgttccgaagtccgcaaacacggaaaaaataaccgtcacggtcggtgataagaccgttgaaaggcttctcggcgttgcggaatgctcgcacgagttgaaaaaagttgacgaagttatcgccgaatgcgaaaagagcggcagctgcgaatactatatctgcgaaaagtgcgcggggaggttttacgacgcggcgggagaagaacgcatagataacatagaagacattgttgaaccgaaactcggctatcacacggacgataacgaagacggcatttgcgacgtgtgcggcaaagagattgaagaataattacataaaaaaatctaaaaatgcttcggcctttcggtcgaagcatttttaatacatattattcaatttccaacaaagtgcgtatgacctcgcccgcacatatcatgcccgcaacgggcggaacaaaagatatgctgccgggagtctgctttcttttcgacgggtcaggagtcggcggtttgggttccgtttttgagtaaacgactttcagttttttgacgccgcgcttacgcaattctctgcgcatgacacgcgccaagcggcaggtatcggttttgtttatatccgtcacgcagaactttgttgcgtcaagtctgttgcccgtgcccatgcaacttatgcacggaacgccgaggcggtcgcagcgaacggcaagttcgagttttgcggtcacggtgtctatggcgtcaaccacaaaatcgcagaccgaaaggtctatttcgtctgcggtatcgggcatatagaacatttcatatgtttcaacttttgcagcggggtttatatcaaaaacacgcgcttttgcgacttctgtcttcttctttccgagcgtcgaatgcagagccacaagttggcggttaatgttcgattcggcaacggtatcgttatcgacaagaataagatgtcctatcccgccgcgcgcaagcgcttcgcacacaaatgagccgacgccgccgaggccgaacacggcaaccgttttttcggagagtttccgaacgccgtcttctccgacaagcagcgcttctctttcaaaaatactcatttatttatccttttcgttcttctcgcgaacgataaagcgtatcggggtgccttcaaggccgaaagtctgtcttatctgattttcaagatacctctgatatgaaaaatggaacagatccgcgtcattgcagaacgccacaaacgtcggcggatttgttgcgggctgtgtcatatagaatatcttcaaacgtttgcccttgtccgtcggcggctgaacctttgtcgtcgcgtccgcaagaacatcgttcagaacgcccgtcgaaacgcgtctgccatgctgttcgtgaacataatttataagttcgtaaagtttctcaacacgctgtcccgtttttgccgaaataaatataacaggagcgtaggacatatatttcaaatcttctacgactttttcctttatcttgttcatggtcttatcgtctttttcaacgatgtcccatttattcacaacgataacggaagccttgccgcgctcatgcgcaaagcccgcgatcttggtatcctgttcggtgacaccctcgttcgcgtctatcataataagaacgacatccgcacgatccaccgccatataagaacgaacaacgctgtaacgctcgatattttcgtttactttgctctttttgcgaagtcctgccgtatcgatgaacacgaatttgccgtacttgttttccttgacggaatcgacggcgtcgcgggtcgtgccgggaatatcggaaacaagcatacgtttttcgccgagcatatagttgacaagcgacgatttaccgacattcggctttccgatgagagcgacctttatcgcgccctcgtattcgggttcctcgggaacgtctttgagttcttttaccacctcgtcaagcagatcacctattccgagaccgtgaacggcggaaacgccgaacgggtcgccgagaccgaggttgtaaaactcatatatttcgggaggttccgcccccggtttatcaaccttgttaacgcaaagaacgacctttttattcgctttcaaaagcatttgcgcaacgtcggcatcggttgaagtcataccggactgaatatccacgaccatgataacaacgtcagccttatctatcgccacctgcgcctgtgcgcgcatctgtgaaagaatgacgtcattggtgcgcggctcgataccgcccgtatcgacaagcgtgaattttacgccgttccactccgtgtcgcagtatatacggtcgcgggtaacgccgggagtatcctccactatcgaaagtctctgattgactattttattaaaaagcgacgactttcccacattgggtctgccgacaacagcaacaatcgccatatcccctaacctctcttctttgaatgtttgacgcaaaattcaacagcgtccaaaagtccctctgcgccgtctgacgcaacgcgcacgggaacggcaagttctctttcgacgtccgaaactgtcagatcgtcaaggaacgtatcgtcacggagcataacgtcgggaattatgagatacgccccgagatttttgcctttgagctgcgcgataatatcggtagcggtcacaagtccggcaaccgttatcgtgcgtccgaaataatcgttatatatggtatataaagtataatcaagtcccgggtatttatccgaaagcgtttttaacgcgccgtcaatcgtttctgcggcggcgacacccgttacaagcgaaattttcacctttgaatcattcggtttcttttcttccgaataatatgcaaaatcgtctttgaagcaggaaagcatccccacgccgttttcatactgttccatgtcctcgtaaaatgaaacgtcgggcacggggatttcggctttcagataaaattcgtccgcgccgtaaaaaatgcgtgtgccgtactttttcaggcactcgtcccctatctcgttgatacgccgcagggcgtccgcagcagtctctttcgtgaacggcacaagcggggcaagcccgtcgcggaatttggtcagtccgacgggaactatggaaacgcttgaaaccgcgggataaagaaacgcaaggtcttccaaggactttgtcagaccgtcgccgtcgtttattccggggcaaagcactatctggcaccgcagatttattcccgcatctttcagtttgcgcagatttttcataatatctttcgcacgcgggttgcgaagcattttatatctcgtttcggggtcggtagaatgaaccgaaatattaagaggagaaacatgaagttcgcatattctgtcaatttcttcgtcgtcaacgtttgtcagcgtcacatagttgccgtacacaagcgaaagacggaaatcgtcgtccttgaaataaagagtgtcgcgcatggcaggcggcatctggtctatgaaacaaaaaacgcatttatttttgcagctgcgctgtttgtccatcagaaaattcgaaaaagaaaaaccgagatctccatcgcattttccggaaaagcaatgctgttccccgttgcggcagacaatgacggtaacatcacccgaaatatccgccgtttcgaacatataatccaacacgtcgcggatttttcttccgttcacgctgataagttcatcgtcggctttgatttttccgtaaaaaggactttttctgtcaacggaaattatttttgccataaactctccccataaatgattaaagggaaaacgcggcgcgcactgaaaaagcacaccgatgttttcccatcaacaatcattttccgaaaacgtccgaagacgttttatcattcggcgtctaccttaataacctgtttgccgttgtagtagccgcaagccttgcagactctgtgcgacaaaaccgcctcgccgcaatgagaacacttaactatgccgggcatatcaagtttccatgtgctggatcttctcttgtgctttctctgtttggaaattctgttcttcggaactatcattcaaaaacacctcccgctcgtaataaatattatttttttaactatgttattcaaagttctccgtcgttttgttcgcagcggcaagcctcgtgattgagatttgcaccgcacccctggcatatacccttgcaatcctcggagcagtggactatcagaggaatttcaagcgacagcgcatcgtatgcggttttgacaagatctatcttgccgccgtttaccgtaacggaatcgtccttggactcattttccgtgacaattgtatctattaccgcttcaagcggaacggaaacctcgtcaaggcaacggtcacattcggtcttataaagcccgcttacggtcactttaaggctgacaacgtccgcggtattcttcatttttccaacaacggtaacatcggaaaactccgactgttcgggaggcatcggaacggagaaatcaagagtttcggtcattcccgtactcttaaaaaacgacgctatatcaagcacggttttaacttctctcatagcgtacctccgcaaaaagtgcatacctatcccattacagtctgcctattcattatatcatacttcgcaaaaatgtcaatacccgatattgaaaaaaaattatgaatttgccgatttttgcgaatttcggctcacaaaagaacttcatggcaagggctgtcggaattaaaataccgtatcgaaagaaaccacgcccgaggaatacatttcgttgagcaagacagaaacttccgtcaatccgtcgcgcaattcttccccgtccgcgcccgaggaatacatttttgaaagttccgaaagtttttttcctatctcggacaggtactctccgtgaacgaaaagcgcgagcactttacgttttttcgagaattttccgaccatatccgaaaacgcctcttccctttccgtcggagcctgcgaaacgtattcaacggacgcaagaaaagattccacacaatttttcagatataaccgagtcccgacggcaagcgcaacaagaaccgaaataacaacaaccgaacctatgagttttttcatttattcttagccaccaccgtaaatttttcaccgcaaacggtcatcaaaaagacccctttcacgccgagtccgtgttcccgagcgacctcggatatatctttttttgtcagccccaattttttcagattgcgcaaaaccggtctgccgtcaacgacaagcgaataagaaagatgtttttggtccgatgttttcggaataacgctcatttttccgctcgtttcgagaatacagaacctgacgtcgcagatgtccaaaatttcatgttgccgcagttcttccataagttcgtcaaccgtcaactgcgcttttttcatctgctctatgtcgatttttccctcgtttatgacgatattgtatttacccgcaagaaaagagcggtaacgcgcgctgttcagagatatgacgcttgaaatcatttccagcccgacaagcgcaaaaacgggaacaaccgaaaaaagcagcggcagttgcatatcctgaagcggaagcgtcgctatttcggaaacaagtattgttgtaacaagttccgtcggttcaagttcccctatctgtctttttcccataacgcgaagcgcaacgaccgtcagcagataaaggataacggttctgataaacattatacccataaaaatccccctctcggaaagtgtttccgaaacagggggaaattattaaatatgtatcgtcagttatccgtatttcgctttatcttgtctataaatgcgcgataataaatattacggaaatcaataaattcttttctttccgagccgagtgtatctttttcgggaagcgccgtaggaagagcgacgcgaaccgttgccataacggatttacctcttccgtcggtctcaattttcagttcaccgcccgcggtctcaaatatacgttttgcgaacgccagcgtatcttttatttctccgttttcgtccagactgaaagaaaaggcgtcattctcgtttatatccgaacgcagaaccccgcgtcgggatatctccgcaacgaaaaaacaattttcttcgcacagacgggtcgttatcggatgttttgttttgaacgcggagcgaagccccgaaacgtagcaatatatgtcaagaaacgatttgcgaaaggcgtctttgtcaagaaagaccaatattgaatgttcatccgtttcgttcgaaaattccgttttcagttctgccgaaagtgcgcggagaaacggaacaggatcgaatgcggaaacattgaaatgaccgtaagaagcaaaagtagaatatatagccgcaatacggctgacaccgcgttcgagcaaaaacgcattttcgccgatgctttcaagatagagtttgcttttctcatcaccgatgcgtttttcgagcaattcgacaacagaactcataacaccgatggggcgcaacagcgaagaggctatcatggaagcgagtttgccgcctgaaaattcggtattcagaaaatcttcggaagaatacgcttcctcggcttgaaattttataaaaggaagtctgtttccttttgagtcaaaaacaaggctgaatataaacgctttgaaaaccgttattttttcgggtatcagacgaaagaaaacggcatcgcgcaaacctgccgcgacacgggatttttcatcgtcggaaaggtgacggttcaggaaatccgaagttacaagatacttgtaaacagcggttgccgccctgttgtaatatacgggcgaaaatgttctgtcaagcaggatcacgggaatcttactgtcgtcataagcattcgacacatcggaaagaattatgttaggttcaccgtatatcatacctttcaacactccaaactgcaatattattgtgcaaattatacattaaagtaaattttttacattaaaaattctacacattttttggttagaaatttaacaatgtgtcttgtataaaacacaattttagtttacaatataattaggtaaaaacaaaaacatattcaggaggactttactatgtcagttaaagttgctattaacggcttcggccgtatcggtcgtcttgcgttcagacagatgttcggcgcagagggctacgaggtagttgcgatcaacgaccttaccgatccgaaaatgcttgctcatcttcttaagtacgataccgctcagggcggctactgcggcaagatcggcgaaggaactcacaccgttgaagcgggtgaagattccatcaccgttgacggcaagaccatcaaaatctatgcaatgaaagatgcaaaagatcttccttggggagagatcggcgttgacgttgttcttgaatgcaccggtttctactgctccaaagaaaagtctcaggctcatatcgacgcaggcgcaaagaaagttgttatttccgctcccgcgggcagcgacctcaaaacaatcgttttcagcgtaaacgagaaaactcttaccgctgacgacaagattatttctgcggcttcctgcaccaccaactgccttgcacccatggctaaaacccttaacgattacgctcccattcagagcggcatcatgtccaccattcacgcttacaccggcgaccagatgattcttgacggtcctcacagaaagggcgacctcagaagagcaagagccggcgctgcaaacatcgttcccaactccaccggtgcggcaaaagcaatcggtcttgttatccccgaactgaacggcaaactcatcggttccgcacagcgcgttcccgttccgacaggttcgaccaccatccttaccgctgttgttaaaggcaaggacgttaccaaagaaggaatcaacgcggctatgaaagcagcggcttccgcatccttcggttacaatgaagatcccatcgtttcttccgacgttatcggaatgagatacggttctctgtttgacgcaactcagaccatggtttccaagatcgacgacgacacctatcaggttcaggtagtttcttggtacgacaacgagaactcctacacttctcagatggtaagaacgatcaaatacttcgcagaacttgcgtaattaaaagtataattcgtttatatccgccgcggaacaacagtttcgcggcggaattttttaacaataaaaaaaaatcacgaatgcaatatccattatctctccgtcgcagatgaaacattcacttatatgatatattatagcacaccgaatatatttttcaacccttttcagacacatttttgcaatttttattccgtttttaatttatcgcagtaataagcggtacaaaagaaaatttttgattcgtcataccttgcacaagaatacaaacaaaggaaaggaataaaggaaaaaaatcaatcaattccgctcaaactgttttttgcataacaaaaacattgcagccccgcacctttgaatgatgtgcggggctacgctattcatttataacgattttttaatcgtcctcatcatcccatgacgaaataatgtgaagctctccgctgtccatgtccatagccatattgtcgcccatgcgcatcatcatattgccgtcggagtcgattg

SEQ ID NO: 40 - DNA, 21308 bp, Unknown
  16S sequences of unknown bacteria
gaacacaccgtggcaactgccaacatcaaaaccgctgtccgctgccagaaaaccggaaaatctttggcttttatccagcgggcgctggctgaatgcgatacgctcgatgtttccctgctggcgcagaccgcagtggaaagctttgaggtaatgatcgaatatttaggtcggacttgttacagcggagcagcagaggcgctgacccaatctgcttcagcgtttgagcgctggtgcgacaaccggctgatcgaaaaaatccggccacagaaatatgaaacatccaccatcggtccgctggccgcatggcttttggcaagagaaaacgagatcaaaaccgtccgcatccttctgtccggtaaacgtaacgggctttcggacgacgcgattcgggaaaggttaagggaaatgtatgtataagattgcagttttaggcgaccgcgacagcatttatgggtttgccgcgctgggtctggatacctaccctgtctatgaccccaccgaagcagtccgcaccctgcgccgcttggcagagggaaactacgcggtcatttatatcacagaggcactggccgccgagatcgacgaggagctggaccgttaccgctcccagcggctgcctgccattattctgatccctggtgtgtccggtaataccggccgtgggatcgccggcgtaaaacgctcggtggagcaggctgttggctccgacatcattttcggcaatgataactaacgaaaaagcaggtgaaaatacatgagcaaaggtaccataaaaaaagttgccgggcctctggttatcgcccagggaatgcgtgacgccaatatgttcgacgtatgccgcgtcagcgaccagcgtttgattggcgagatcatcgagattcacggcgatcaggcctcggtacaggtctacgaagagacctccggtctggggcccggcgagcccgtagagtccaccggcgctccgctgagcgttgaactgggtccgggactcatcggcagcattttcgacggcatccagcgcccactggaaacgattatggcggtttccggcaataatctacagcgcggcgtggaagttccgtctttgagccgtgaaaaatcctggcactttgtcccctcggtcaaggcgggcgacaaagtaaccggcggcgatatcatcggttcggtgcaggaaaccaaaattgtctctcataaaatcatggtgcccaacggtatcatcggaacggttaaatccattgaagagggcgattttaccgttacccagaccgtagcggtaatcgaaaacgaaaacggcggcgaatcagctttgactttgatgcagagctggcctgtccgtaaaggccgcccctataaagaaaaacttccgccggatatgcccctggtcaccggacagcgcgtcatcgacaccctgttccccatcgccaaaggcggtgttgcggccgtaccgggacctttcggctccggcaaaaccgtagtacagcaccagctggcaaaatgggcggaagcggatatcgtagtctatatcggctgcggcgagcgcggcaacgaaatgaccgacgttctgaacgaattcccggaactgaaagaccccaagaccggctactccctgatggagcgtaccgttttgatcgccaacacttccgacatgcccgttgcggctcgtgaggcttcgatttataccggtatcaccatcgccgaatatttccgcgatatgggttattcggtggcgctgatggccgactctacttcccgctgggctgaggctttgcgtgaaatgtccggtcggttggaagagatgcccggcgaagagggttaccccgcttatttgggcagccgtctggcgcagttctatgagcgtgctggacgcgttatcgcacagggtcaggcaggccgtgaaggcgcgttgagtgttatcggcgccgtatcgcctcccggcggcgatatttccgagccggttgcccaggcaactttgcgcatcgtaaaagtattctggagcctggactcttctttggcttatgcccgtcacttcccggcaatcaactggctgaccagctactcgctgtatgccgacagcaccgcaaaatggttcaacggcaacgtccatgaagactgggcggaactcaagcagcagctgatgcgtcttttgcaggaagaagcggagctggacgaaatcgtcaagctggtcggtatggacgctttgtcccccgctgaccgtctgaagctggaagccgcccgctccattcgtgaggacttcctgcatcaggacgcgttccatgaaatcgacacctacacttctttggaaaaacagtacgccatgatgaaactggtactggtattctaccagtctaccgtcaacgcattgaaagacggcatcggcatcgacgaattggtgaaactgtctgtccgggagcgtatcggccggtttaaatacatgcccgaagacgaaatcgccaaggaattcgacgcgatcgtattggaactgaacaaagaaattgaggaacttttccagaagaaggaggacttctaatgccaaaggaatacagaaccattcaagaggtggcaggtcctctgatgctggtacgcggcgtggaaaacgtcacctacaatgaactgggggaaattgagcttgcttccggcgaaaaacgccgctgcaaggtgctggaaatcgacggcggcaacgccttggttcagctgtttgaaaattccaccggtatcaacctgtccaacagtaaggtccgctttttgggccgtcccatggagttgggcgtttccgaggatatgctcagccgcgtgttcgacggtctgggccgccccattgacggcggtccggaaatcctgcccgaaaagcgcatggacatcaacggcctgcctattaacccggcagccagaaactatccgcaggaatttatccagaccggcgtttccgctatcgacggactgaacaccctggtccgcggccagaagctgccgatcttttccgcctccggtctgccccacgccaacttggctgcgcagatcgcccgtcaggcgaaggtgcgcggcaccacagaacctttcgcggttgtattcgctgctatgggtatcacctttgaagaggcgaacttcttcattgaaagctttaaggaaaccggcgcgatcgaccgtaccgttttgtttgtcaacctggcaaacgacccggcggtagagcgtatcgctactccccgtatggcgctgactgccgcggagtatctggcgtttgagaagaatatgcacgtactggtcattctcaccgatatcaccaactacgccgactctctgcgtgaggtttccgccgcccgtaaagaagttccgggccgccgcggatatcccggttacatgtacaccgacctggccagcttatatgagcgtgccggacggcagaaaggcaaaaacggatccattaccatgatcccgattctgaccatgcccgaagacgataagacccacccgatccccgacctgaccggttacatcaccgagggacagatcatcttgagccgtgagctgtatcgaaaaggcgttaccccgcccatcgacgtactgcccagcctgagccgtctgaaagacaagggtatcggcgaaggcaaaacccgtgccgaccatgccaacaccatgaaccagctgtttgcggcttatgcccgcggcaaggacgcaaaagagctgatggtggttctgggcgaggctgcattgaccgatatcgataagctgtacgcccaatttgccgacgcttttgaggcagaatatgtttcccaaggttatgaggccaaccgcgacattgaagaaacgctggctatcggctggaagcttctgtccatcctgccccgttcggaactcaaacgtatcaaggacgagcacctcgacgaatactacggcaaataagaggggggattttcttggcaaacacacaggtaaatccaactcgtatggaattgacccgcttaaagaaaaaactttccaccgccatgcgcggccataagcttttaaaagataagcgggatgagctgatgcgccagtttttggacatggttcggcaaaataaagcccttcgtgaaaaagtagaagcaggcattcacgccgccaacaaaaactttttgctggctcgcgccgccaccgacgcacaagtgctggatgtagctttgatggcgccgaagcaggaggtttttctggaggcctctgagcgcaatgtcatgagcgtagaaatcccggtgttcgagtataaaacccgtactgccgatttaaacgatatttactcttatggttttgctttcacttctgcagatttggacgatgcggttctgtccttgtccgaagttcttccggatatgctcaagctggcggagatcgaaaaatcctgtcagctgatggctgctgagattgaaaaaacccgtcgccgggttaacgcgctggagcatgtgatgatcccggatctgcaaacaaatatcaaatatatcacaatgaagctggatgaaaatgagcgaagcacgcaaatccggctgatgaaagtcaaagacatgatgctggaacaggctcaccactattcggaacgagccgcacagtaaaaatctttcgcttgaccaaacaaaaagacctgccaataggcaggtcttttttgatgattactaccgcgcagagcaacccttcttttttcataacggactattcctcatccgaaattaaaaaaattttgagaatctgttccgcatatgccctgcgtttactgctgcattgagacagcatcaaggaaatttgatccgctgtttctcccggcttttccccaaacaacaaaaagtcagtggaaagatgcaaaacttttgaaattttacataaggttggcagagacattcctttcaatcccaattcaatatctgaacaaaatttgggtgttacgccgattttctctgcaaacgcttcacgggaaagccccaaatattcccgctgttcacggattcgagaaccgatctcactgtaatttgggtccatctcctgcctcccgttcccttttacgtttattgtaaccctatcagtggttctttaacataaactatcagagttgacaatttagaacttatagggtgtaataaagaaaactatccggaggaagtgagaccgattcacaaagaaacccagctggttttattgctgcaaaaacgaaaccgaattcgtcggaaactgtgctttatctgcgctatgtgtagtgtagtcgctgttatatggtctatattttgccttttaactggattcgcctataccatcccgatttttttagccgctaccatagttcttctcgctgtcgtaaaattcccggcgggctggcgatattgtatccagaaaaattggaatggccccaaaaatttcgcaggcatttttttcttttaccttattctgtttttagtctcttttctgatcggccctgttctttttttcgcgatttatacaagcagctgcaaaacaaaggtcctgacttttaaggcataatttttcaaaaattcagccttgcatccaaaagcacacagtatttctatccagcgtttgatgaacaacattcccgaataggcttgcaatgacaaaatcgcctcaatagatacttttgcaccgaaacaaagacaaaggctcctctatgtaaagggagcctttgtttcattcataacctgaaatctcttagcaaatataatctatattacagtttttttatcagtttcactttgagcggtcgtttggtaagaaattccgcattcttatctattgttcttcccggatgatgacagatatcatgatccactgtgatcggttcatcaattatatataaaaatcctttttctttttccattatgagtgatgataccattatcatcatatcctaattcagtaggtttatgcgaaaaagcctctgcaagtgctctccactgtgtaaccgtactacctttctcaatacatcaaatattacatttgaaccatggtatcatactccattgggttctatttctaacttcatgctggattcccaccaaatcagatttgttgtatgaaactaatgtatcacggcattcaccgaaaaacaagtttgcgttaaaattatcataagggcaggtgctttatctgcccttatgcattgttttatatgcacctcattgcctttgtttcaatcatttatcctgcaatttttaccggcgcccggcggatgagcagccaggaaaaaatcccgaagaaaaccgttccgcccagccacaacagggccagattataaggagaacgcaccacccactcgattgcagagaaaaaccagtttcccagagtttccactacaccggcaggcgcggcaaccagcagtagcggcaatccaaaaaccagcagggccggtacagtaatggatacaacaatcttccagattttattcatccggtaatacgcaccgccgataaaataacccagcatccccaaggcccagccaccggcaatctggctgacgattacgccaaagcgtccgcccaatcccgtcaaagaaggatagaccatcttctcaaccgcatcggtgttcaatcccatcgcactgcctgcccattggcccagcagattgaccaatgtcatacccaccgaaagagcaagcagaaaaagaaccattccacaaaaaaccgtcttacgggaaacaccgttggacagcccaaaccttgtcccggccgggaagaaaataatccccatcaccagcagcataatctccgcggaaaaggcaaatccattgaccgacacttcttcggttgaactgaaagccatgatgacaaagcccagcagcatcaaaaacagcatggcgccataaaaccctaccaatccccaataagtgttttgccagtaccaacgaaacatttttccaattttcattttctttgccctcccttatgcgttggtcaactgcacaaacagcttctgtaaatctaacgccatcatttccaacgatgcaggaacattttccggttgccccaacaaacaagcgctcttgaacccgcccagcagttcttcacccaaaacctttttgccgacacagtaagcatctacttccgacgcttttcccgatacctggtatcccatctgctttacctgctcggcaggccgatccagcaggatttttccttctttgatgataaccacctgttcaatgatatctgcaatttcctcaattagatgggtggaaatcacaatggtgcggggctgctcgctgtaacggtgaatcagctcccgataaaacatttcccggtggttggcgtctaaaccaagtaccggttcgtcaaaaaaggtatacggcgcgttagcggccagcgctgcaatcaactttgcaatcgtcagatagccggtggacagccccttcaacttctttttgggattcagtccaaactgtccggccagttgaaaggcatattccatatcaaaatccggataaaaatttttactccatcgaaacagctgctttacagtggttccctccggataaatatttttttctcccatatagtatacttttccctgcgcccggtcgttgtccatccctatctcaccatcaataaccaccgctccctcgctgggatacaaccggttaccaatcacgttcagcagggtagactttcccgctccgttgcgccccagaaggccgtagatacgattttcctccagtatcagatcaacccggtccagtgctgtgatattgccaaaccgtattgtcagctcttttacctcaatcccttttttcatctgctggtccctcctcaatcatccggataatttcctgctgggaaatggaaagttttttcgcttcctccagcaaacggacaatgtaactgttgtaaaaagcattttttctctgttttaaaatagttcccgccgcaccctttttcacaaacattcctacgcctctttttttgtaaaggatccctgcgtcggttaaaagggtcattccttttaacgctgtcgccggattgattttgtaagttacggatatctcggtggtggaaggaacttgtgtttcttccaaaaatgcaccggataaaatcgcatctttgatctgttctgcgacctgcatgtaaataggggtatcgctttcaaagttgaattgcacgactcacacccttcccgttatatagttaattacttgtgtaactaactatatgtcattttactcctgttgtcaatacctttttcatcgttcatcttgcctatctgaactggataaaggaagatcctttatttcccaatcgctgttcttgctatcttgacaccggatattcgttatgctatgttatactagaataagtttgcaataaacaacttgcagtttgaagcaagtggggggttttaaaatgacattagatcagcttccgatcgggaaggaagcgcgtattctcactgtaggcgggcaaggcgctttgcgccgacgcctgctggacatggggctgactccccataccaaggtgatggtccggaaagtcgcgcctatgggggatcccattgagttgcatgtaaggagttacgagctgacccttcggctggatgacgcgcaaaaaatcgagattgaggaggaaccggtatgacttttgcactggcaggcaatcaaaactgcggcaagactaccctcttcaatcagctcaccggctccaatcagcatgtgggcaattttccgggcgttacggtagagcgcaaagacgggcagatccgtggacacaaagatgcgaccgtggtagaccttcccggtatttattctctttccccttataccagcgaggaaatcgtaacacgggattttttgatccattcccatccggatggcatcatcaatatcgtcgacgctaccaatattgaacggaacctttatctcagcctgcaactgatggaactgaatattcccatggtcatcgcgctaaatatgatggacgaagtacgggccaacggcggtaccattaagatccgcaaaatgcaggaggcgctgggcgtgccggtggttcccatttccgccagtaaaaacgaaggggttgccgagctgatcgacacagccttagaggcggccgtcagccgtcagaagccaaagcgaatggacttttgctccgggccggtacaccgttccatccatgcagtggcccacctgatagaggaccacgcgcagcggatgaacattccttcccgttttgccgccaccaagttggtggaaggggatgaaatcatccggcaggcgctgcaactctcggaaaacgagctggatatgatcgagcacagtgtcaccgagatggagcaggaattaggcacagatcgggaggctgcccttgcggatatgcgctacacctttattgaagaagtgtgcgccgaatcggttgtaaaaggccaccaaagcaaggaaagcctgcgtagcgtaaaaatcgacagcgtactgacccataaatacttggccattccgattttcttgggtatcatgatgctgattttctggctgacctttggcgtgatcggcccggttctcagcgattggctttcttcgggaatcgacgcgataaccaatttaatggatcgcgccctgactgcttacggtattaatccagtggtacatagtttgattattgacggcgttttcgccggcgtgggcagcgttctatcctttttaccaatcatcgtcgtgctattcttctttctgtccattttggaggacagcggctatatggcccgagttgcttttgtgatggacaaactactgcgaaaaatcgggctgtcgggccgcagctttgtccctatgctgatcgggtttggatgcagcgttccggcaatcatggctacccgcaccctatccagcgagcgagatcgaaaaatgactatcctgctgacaccctttatgtcctgcagtgccaaacttccgatctatgcagtattttccaccgccttctttccagactatgctgcactggttatgatcgcattgtatgtgttcggtatactcactgcaattttatgcgggttgattttcaagcacaccctttttaaaggccagccggttccctttgtcatggagctgcccaactatcgcctccccagttccaaaagcgttctgcggctgatttatgacaaggcaaaggactttgttgtacgagcctttaccgttatttttctggcaactttggtcatctggtttttgcagacctttgatacccggttcaatgtggtggattccagcgcccagagtatgctagccgatatcggccgtttgatcgcgccggtattcatgcccttgggcttcagcgactggcggatttccaccgcgctgattaccggattcacagccaaagaagcagtggtcagcactcttgctgtgctcaccggcaccagtatcgctactctgccccaggcgctttccggcctattcacaccattggcagcagcagcatttctggtattcaccctgctgtatactccctgcgttgcagcaatcagcgcagtcaagcgggaaatgggcagtggatggcatgccttgactgtggcggtctttcaaaccggtgtcgcttggatcatggctttcctgctgtttcaaatcggcagcattttcattcattagggggatttgcagatgtctttggctgattatatcattgtggctgttgtcgttttagctgcggtaggcgcgtttgtttatacaaggcgccatcccaacgattacggctgtggaaccgactgcgccacctgccggaaagcctgtgccagaaaacaaagcgtttcgcaggactacactcagtcaaaaggttaagttacactgatttatcgttaatccgcctttgtttcaaaaaacaaaagagacagtaccgcaaaaatgcgctactgtctcttttttactcagccaagcctttttatttttgatgacaaaaattccttttactgatacaatcggactgcggcacacaaaagctcccataaaagtttttgtttctccggcggctgttggcgaaacagttcatagctttttattggcagcgtctcttcctctttaccggttccaattttctcaaaaagtttttccaacgtagtgtccaacgcaaaacaaagtttcagcattgtctcaatactggcgttcttttctccccgttcaatctgaccaatataagtataatgcaggcccgcccgctccgccaacgcctcctggctcatacccagaacaagccgacgggcgcgaacccgcttcccgattgtttgtaggaaatccatttgatcaccctaatatagtctatcgtctttttatttcattttacatatactatgacattattcccgtgcttgtatatactataatcatgattttttgaaaaaagataccacaatctatcgaggggacctatgaaaaaaatactaaaacagcaaaaaaagcggaaatacgaaccgctgccctgcgataaagaaatgcatactttctgtgtctgctaggaggatgggccggcgcgcataaattctatgaagggaaaaccgcattgggagttctctacctgtttactttcgggttgttcggtacaggctggattttcgatctgattgccattctctctaaaaaaaagaagatacttattacacataaatgcccagtttaaaaataggacaacaaaaatatcctgcctattggaaaggcaggatatttttattagatcagtgacaggttattttatttcacagccacaatgtggacaatactccccaccgcaaatcggggcaatacggagctgcttatgacagaaaggacagcgatttttaaccgcgattaccacaatatcacaagccaaaagtataaatccggcaatcgcccccgccgtccagtctgcaacgattgcaatgatcgttatgatgccaaacaaaattccggctattcagcaaatgcttctgagcaaaaaagaagatttcatcgcatttttcccctttctttctatggagcagtgctttttttcggcacataatagttttccttccatgcgccttccaacttcagcaacgctatctttctgcgaatcccaccagcatatcccgtcaagctgccatttgtccccactacacgatggcaaggcacaataatagaaatttcattctttcctacggcccctcccactgcctgtgctgacattctgggaacctctctcctttgagccagctgttttgcaatttcaccataggttgtggtctgaccataaggaatagcagaaagaattccccatacctcattttgaaaatcacttcctgcgaaatgcagcggcaatgaaaaatccggttctctgccggaaaaataaatatccagccatcgttttgcatcggcaaagaccggcagctctttttcctcatgttctggctccagatggagcgcgaaatacttctgcccttcaaaccaaaggcctgtcaagccggttttatctgctgcaagagtaattttgccaaggggcgaatgataatgggttatgcactgcattgcttttcctcccagagaaaaccttttccattttacacaatcccgcttattgatgggaatgtggaacgctaaaatcaaaggattccttcaatatggggctttacgtcatctggcaccgcacacacataaacgccgccggtcgttttttggtgctcctctcgcgctttttccagcaagtcgggatctttcagcactgttacggccgcatgagccatcgcctttgcagcggccagcattcctttttccccaacgctggtgcccccctgagcggccagctgccaggaatggcccgacgtaccaatggcataacaggcggcattgagccaagcagtaggcgccacatagctgacgtcacccacatcagtagaaccaaataacggcgtggagggaaaacgcagcgggaacaccacatcctgcaaaggctgcccggtaaacatcggcacatattcttcaccgaattttgcgccataggctttgaccttggcctttacctcatctgccggataattttgctggaaggaacgggcgatctgtcggtccttttcatcaaattccggtgcgccagtggcttcaaagctctgctgcaacacctggctgagcacatgattgggcaaataatcgcacataccatctatcggcaggatatccactgttgttccggtcatcaatgccgcgcctttggcacaattattcacccgttcacgcagttccagcgcctgactgattttgggtgaacgaataaagtagtaaagcgctgcgtgatcttgcactacattaggcgcgccgccgcctgcatcccggtaagcataatgaatcctcgcttcctgaatcatatgttcccgcagatagtttacccctacgttcatcaattcgcaagcgtccaaagcgctgcgccccagatgcggctgacccgccgcatgggtagcccgcccatggaaccgatagaccacgctcaccgctgccagagaatgttcccccataatggagttgttgctgcccggatgccaggtaaatactccatccagctggtcaaataccccttcccgagacagatacaccttagcactgccgttctcctctgccggacaaccataaaacgcgattgtaccaggcaatccgctttcttttatgtaatccttgacagctaccgctgccgccgccgcaccaacacccaacaggttatgcccacagccgtgtccggcaccgccaggcaccaactcttcccgatgagggcagcccgccttttggcttaaagaaggcagcgcatcatactcccccagaatgcccaccatcggctttccgctgccgcattttgccacaaatgccgttgggattcccgccagaccggtggtaatcgtaaacccttcctgtgtcagcatctgaatcagcgcctgagaagacttctcctcatgaaaggcaagctccgcataacgccagatttcctggctgagttgacagtatttttcctcattttttcgcacaaattgcgtgattttttctgcgaaataatccattttcttctcctttttctctcttgacctgctttttatttcgaaaaagccccagcgtatgccgctgagcttttccttattttacaccgtccaacatcggcttggtatctgccggcaccgggcagatatatttaccgccggtagccttgacgtattcttccttcgccttttgcagcagtgccgggtccttcatagcgcaaaccgcagcataggccataaccttggccgctgccagcatcccctcatgcccaatgctgcagccgctttgagctgtcagctgccaggaatggccgggcgtaccgatggcataggtagccatattcagctgcgccgtagggcagacatagctaacgtctcctacatcagtggaaccaggactcgctgccgggtcaaactgaagaggcagaacaatatccatcagcgatttccctgccaactgggccgcaatttcagggccatagtctttttcatacaactcgtttttcgcttttagctccgcttgcggatatccctgctgaaactgagctgccagcgccctgtctgcgtcggtaaaacggggcgctcctactgcttccaatccctgttgcagcagagcgctgagggtctggttaggaataaagtcacacaaaccgtcagtagtggtaatttccagcgtagtcccagtcatcaacgccgctccctttgcgcagttgtccaccctctcccgcagttccactgcctgcgacactttcggcgcgcggataaaataatacagcgccgcatgatcctgcaccacattaggcgcaccaccgcctgcatcccgataagcatagtgaatgcgcgcttccggaatcatgtgctcccgcagataattagctcctacgttcatcagttcgcaggcatccagcgcgctgcggcccaaatgcggctgccccgccgcatgtgtggcccgaccgtgaaaccggtacagcacgccgatacacgccaggctgctgcagccatccacagcgtttttgctggaagggtgccaagtgaaagccccatccaattcatcaaatacgccttcttttgccatatgcattttaccgctgccatcttcttccgccgggcagccgtaataaaccaccgttccagccagaccctgctcctgcatatactctttcactgccagcgccgatgccaacgcaccaacacccagctcattatgcccgcagccgtggccggccgtaccgttttcgaacaaagctctctgggggttgccgggctgttggctcaaatcaaacaacgcatcatactcgcccaaaaatccaatgaccggttttccactgccgtatctgcccacaaaagccgtcggtattccggcgacgcctttttcaagggtaaacccctcgtcttccagacagcgttccagcgcctgagcagaccgaaattcctgaaatcctacctcagcatagcgccagatctcctcgctcaacgccgtgagcttctgccgctttttctcaatatacccatccaaaatgtttgccaaccgatccaaaaatgccactcccttcgatttttcatcttacgtttattctactgttcccggttaaaaaagtaaagcttttcccgctgcaactcttgtaaaaacaaggttttttcactataataagaataattattgttgttgtctgcctttgcggcatcggtggctaagattcgtttcttggccgtttttcgtacgtgggcgttcacaggaggaaaggtatgtgcttatgaaagagatcgggtttgacaatcagaaatatgtgcatctgcaatcagaacatattaaaaaacgcatcgctcaattcggcggaaaattgtatctggagtttggcggcaaactgtttgacgattttcatgcctcgcgggtattgcccggttttgagccggacagcaaggtaaaactgcttttgcagctgaaagagcaggcggaaattgtcattgtcatcaacgcttcagacattgaaaagaacaaaatccgcggcgatcttggcattacctatgatttggatgtgttgcgcttgattgacgcatttcggggaattggcctgtatgtgggcagcgtagtactagcgcgctatgcgggacaagccgcagccgatgcattcatccatcggctggagcggctgggcgttcgggtattccgccactataccattgaaggctatccttccaacattccgctgattgtcagtgagcagggctatggccgcaacgaatttatcgaaacctcccgccctcttgtggtggtaacggcaccgggccccggttccggtaaaatggccacctgcctttcccaactgtatcatgaatacaaaagaggggtaaaagccggttacgccaagttcgagacttttcccatctggaatattccgctgagccatccggtcaatctggcttatgaagcggctactgctgatctaaacgatgtcaatatgatcgatccgttccatctggacgcctacgggatcactacggtcaactacaaccgggacgtggagatttttccggtactacgggcgatgttcgaaaaaattatgggggaatgcccctataaatcccccacggatatgggggttaatatggcaggcaacgccatcgtcaatgatgaagtctgccgggaagcatcccgtcaggagatcatccgccgctactaccaaagcctgtgcgaacggcgtcagggacttttggaggaggatgtggtttataaactggagcttctgatgaatcaggccggtgtttccacggcggaccggccggtggtcaaagcggcaatcgaccgggcggaatccaccgggatgccggctgcggccatccagctgccggacgggcagatcgtcaccggcaaaacctccaacctgttaggatgttcggccgctttgctgctcaatgcactaaaggtgctgggcggtatccatcacgacatccacctgatttcccctatcgtcattgaaccgattcaacagctgaaaaccaaagatcttggcggccacaacccgcggctgcataccgatgaaatcctcattgccctttccatcagcgcagcgactaaccccaccgcggaactggcgatgaatcagcttcctttgttgcggggatgcgaggctcattcttcggtgattctctctcaggtcgatgacagcacctttaaaaaattgggcgtacacctgacctgtgaacctgcttatcagaccaaaaagctgtatcataagtaaaaggagcgggtataccatgaaaaagagcggattttggacggagttccgtcaatttattgccaaaggcaatgtgatgaatctggccgtcggcgttatcatcggcgcggcgtttcaagccatcaccacatcattggtcaacgatatcatttctccggtcatcggcctgtttgccagtgccgatatgagcgactggtcggtcgccgtcggcggtgcggaaattcgttatggcgcttttttgacagcagtaatcaattttttaattatggcgctggtgatttttctgctggtcaagctattgaatcgggttatgaccatcagaaaaaagccggaaccgcaagcagcgcccactgtcaaaaaatgtccgttttgctgcagcgaaatcccgctggaagcgacccgttgcccgcattgcacctctgaactgaacgaataaaaaacaggccggatattctcccctaccaaaaaggatcattccggctccaaacaacgatacggaagaggctcataaaattttacattgtcgattgctttgccgaagaaaaatatcaggggaatcagcttctgattctgcttgccgaccaaacgataatcgattgggaacaacagcagattaccagagaagtcaatttttctgaaacggcgtttattttatccggcaaacaggccgacggtggatatcctgttcggatttggacgcccaacgcaggagaaattccttttgcaggacatccaacacttaggtgtgcctatgtgattcaaccgctgatagaacaaggatacccagatgaggtgaaactaaacctgaaagtcggtcagattacggtcagccggtctgtgcatggcatggtgatgaggcaaaagcctcctgttttcggtgttaaaataaaatcaaaaccactggtaaactagtggtttgctcaaaccccggaggggtcagtacttgttgacccctgaaaggggtactgagagtttgccatcgcatcactattacaggcagccgctaaaagcggctgttttcttttgcctactttctcttgctacccgtaaacgggtccatatactcctttagggaaatttggtcacttgccaaatcttcttccaactggttttggatatactcctggatcatcttcgcattctttcctaccgtgtccgcaaagtaccccctacaccaaaaatttcggcttccatatttatacttcagattcgcgtgtctgtcgaaaatcatcagtgtacttttactcttgagtgtccccacgaactgtgctatactcatgtacggcgggatactcactagaagatgaatgtgatcggggcatgcctcgccttcgatgatctctactttcatctccttgcacagctttttcatgatttcgatgatgtccctacgcagagacttgtaaattactttccggcggtacttcggtgcaaataccaggtgatattcgcaccgatagctggaatgtgccgtatactttacctcatttttcatttgcgtaaaacctccttgctctttcgtgatgcagttgccaaaccatctcgattgttgcacggaggctttatttgccatggcttttttatttacccctggttcctaccaggggttttgttaagcctaaaggcaacaaagagaggaaatcgcagcaatttttggaatttccctgggcgagatacgggaagattatcccattcagctggtcagcaccagtctggaatcggttctcattccactaaaaagccgcgggagcttatcaaaactgcaggttatccctccaaaatttcaggaatacactgcaagacatcccgaatgcaattgcaatcatttcttctttaccgatatgggggaccatatttttttggtgcgctgtattatggaagatttcatagaagatgctgctaccggcagcgcaaacggaaatttggcgggttatcttttgtcgtatggctactttggtagtagtccgatttcttatactattcatcagggagaggatatgggaagaaagtctgttcttcatatccttgccaaccgggaatccgacgattggctcattgaggttggcggaacctgtcatattgttgcagagggggattggcgttaagccgatccctttttatcgacaaaacgacacaaaccaatgctctaatatgataaaacggcatgactttttgccatgccgttttatcatattagatatttccgccaaacggatagtcagtttctttcttgcattacttcgtttctccgaaggtttcctgataaaatccaattgccttttggataatttgcacggcgtcctctgggcccaacacttcatctaccaccgtatctttattttccagagctttatatacgctaaagaaatggcgcatttcgtcataaatatgccgcggcagagaaaaaatacttttgtaatcattataattcgggtcctgaaatggtaccgcgataattttttcatcccggcggccattatccagcatctggatgacgccaatcggataacaacgcaccagcgtcagcggatgcagcggctgtgcgcaaagcaccagcacatccaaagggtcaaaatcatcgccgtaagttcggggaataaagccataactggctggataatccgtagaggtatgcaacactcgatccagaataatcaatccggtttctttatccatttcatatttgttttttgaccctttgggaatttcgataacagcgataaaatcctcgggcgaaatccgtttgggatcaatatcatgccagatattcactacgttatcctccctttgcctttatgccgatgctgctgtgcctttttcctttttctcctgctgcagcttttcccgaatggcaatttcctgtgttaacgttcgaattttcgtatccaactgagaaatccgcaaagaaagcgaaaatgtttttacgatcaaaataaaaataacggccagaaaaataaaatttaccggcgactgcactcccagcattttggctgcccaggtagcaataccggggaaaacactcagaatgaccagcgcagcgggaaaagccatccaaaaaatcgaatcctctatctgcaactgagctttgcggatctttctggctgtataccacaaagtcaaaagcgatataacaatcaacgcggtacgaagcatgatagacacggtctagaccctccttttccggaaccactgaatcaggacaatagacgtacacatgcgaaccatatactctacagcccgcttcaggttaaaatagctttctcctgcaatccgttccttcatttccacctgaacttcctgcacactagccccattgcgaagcaaataggcaatcgtatccggttccggtccgtaattcaaattatgagcaaactcgcgaatcattgaccggttaaacattcgcatgcccgatgtggggtctttgatggtaacacccgtagtaatttgaatggccagctgaatcatctgatttcccatcatccgcagactcaaaggcttctttttgtcccgaaagcgggaaccaattaccacatccagcgcttcttcttccattttggccgccattgcctcaatatactgcggatcgtgctggccatcaccatcaaactggattgccatatcgtaatccatccggtccgcataccgcatccccgcctgaaatgcccccgcaaggcctagattaaccggtaaatccaaaaaatggtatcctttttcccggcaaatcgcggcggtacggtccttagaaccatcgttgactaccaaataatcatactgcggataattttgaatcaggtcatccacgacccgctcaatgttttcctgctcattataagcaggtatcacaattaaaactttcaaactaacctctatccttcacaaagtattttttccacccgatgcaacggatgaaaaacaaattgcaatcctggaactttattcattcctttttccaacaatatcggaattccaatccccatagcgctaaaaataacgaaatatgctgcagctggcatcgatggaaaacccgcaaaaaaagttttcgaaaaagcaaataaaatttggtgcaccaaatatatctgcatcgtataatgacctaacctagaa

SEQ ID NO: 41 - DNA, 19909 bp, Unknown
  16S sequences of unknown bacteria
ctggatttgccagctggaaaagcgtttgtgtaaaaccagttccgccatagggccacctcgcgttgaatctttttctctattatagcaggcccggcaaaaaacgcaagagggcaaatccagggcagggcgcagcggtgccctgccccaacggcggcggttaaccgccgcagccacagccgctgctgccgccgctgccattgcagctattgcagctattgcagctattgcaactattgcagctattgcagccgcagccacagccacagccacagctgcactgactgctttgcgcccgctccatcgtcgcggtcacgccgcagtgattaaattccggcatacagccaatgccaatcccgccgaaaaattgcccattccagcacataaacggtacctcccgacttagaatttggaagctctctccaccgagttcttccgcctcatcctatgtcggaatggtaccgtttgtgtcaactacagggattctgtggcgctggtctggggcagcggcagatcggagcggtgctgcgacgcgccattgcccgggcatccggcatggatgaccggcagcttcgggtcctgcagctgatccggcagctgcggtttcttttccattttatcaccccggctatagtatgcctgccggggcaaaaatgtatgtatgccgcgctactttgcccgcagctgctccaccagctgcgcatccggcgtcacgtagccggtgcgataggtcgtatagacgaccatgcccggctttgcgccgccgggctttttgacaaagcgcaccggcgtataatccaccgggacgccctgcccctcccgggcctgggaataataggctgccagcatcatcgcctccgtcacagttcggtccggcggcgtctgcccatggcaggagatgatgacatggctaccgtggatcttctgggtatggagccagaggtctgatttataggctagcttcagggtcagctgatcattctgccggttgttccggccaacataaatataaaagccgtctgaggagcaaaactccatcggctttgccggggccgtcttcggctggctgcgtttgccgccgcggcgaagatagccgcccagctccagctctgtgcggatctccgccaggtcccgctcacactccgcccgggcgatagtctccagtacgctggccagataatcctcctccgcccggccctgggcgatctgctcggtcaggacccgctgggctgtcttcgccttggcatagtccttatagaacttggccgcattttgctgcggcgagagcttcggcgaaagggggatgtcgatctggcgcatctccgggtcgtaaaaatccgtcgccgtcagccggacctggccccgctgcatctgccataggttcgccgtgacgatatcgcccagctgccgggtgcgctcccgatccgtggaggcggccagctccttttcctgcagcgccagcttgcggacaacgcggctgtgcagattcgaaacggtcttgcgcagtgcctgggatttctgctgcatcagctcccgccggtcacgctcgccataaaaatcatccagcagcttccagcaggtctcataggccacctgctgccgggccgcaccgtattgaccgatgggcctccaggagaaatccgcaggctttccatccggctgacgcagcatcgtcggctggaattcaccctggcggaccgaggcaaacagtgccgccagccgctccggcgcatccggcggcagcgcctgggccgatgcttccgtgctgcctgtcagcgcaaaggcgatctcccggcagatcagcggcgacaggcctctaaaatgcgccagcagccatttctgcagcggcgtatcctgcgcagcctgcaatgccgccgcccaatcgtcccgggtcagcggcaaggggtcacgcttgttctgccccggcggcgtgtgatagaacagccccggcagtacctgccgccgctcggacatcagaatatctacccgccgcaggcagtcgatgatccgccccgcgccatcgcataagattaggttcgaggtgcggcccatcagctcggcatagagccgcttttccgccggcacgcccatttcatccgtgcagtcaaaggtcaggcagaccgcccgctccatcggctgctgcgtgatgctccgcaggcggccgccgcccaagtgcttgcgcagcagcatgcaaaacatcggcggctgggccgggttttccaggctcagcgctgtcagctgcagccgggggtgggcggggttggccgtcagcagcaggcgctttgccccctggctgccccgcagctgcagcacgagcgtatcccgctccggctgataaattttatccaccttcgcaccctgcagcggctgctgcagctcctgcgtcacggcggagagaaaaatcgcatcaaagggcattggtctcctccatcccaagcaaaaacagttcattgatccggtctcgcgcgcccagcaggtacagcgcgccgcacagcgcctccagcccggtggccatggcatattgagcatgggtcgcgtttttcggcaccgcatgtacatgggtgttgcggccccgcttgtaataggccaactcctccggtgtcagcacctgcaaaatacgttcgacgaacgctgcctgggccggagctgccacatgccggaccgtcgcccggtgcagatcccccgactttgccacgccatgggcgcacagccagctgcggaccagcagttcaaatacgccgtcacccaaatgggccagcccgaggacggagatctccccgatctcctggggcgtcatgtgcatctcaaaatagttttccaaggaagcctccttctatcccggcagcggcgtttcgctgccaaaacacgcaaaagggaaccgttctggttcccttttgccgcgcggctccggtcaggagccgggtttcaaatgcagaaattctttaatagaccaaaactgtcgagcccagcggtacattgaacagccagcgggcctcctccgtattcatccggatgcagccgtgggagatcatcacgttcaggtcactggtgacatacgcgccggtggctgtgctcttcatgcggctgtggaaggcatatgcgccgttccagcggctgatggaatcgacataccaggtgccgtagtcccagcgggcgtagggctcatgggtctgcattttgtacagcccggggggcgtccgcgtgctggctgcgccgatgccgcagttataggtcttgatcagcgaccagtggccctttgagcccttgaatacattgacctttgtccggtacaggttaatccagaccatgtagctcgtgttgctgctgtagcccatggcattgacgaacgtctctttctgatactgggtgtagtccccggaggcgatggaaccgttgacctggggaatggaaacggccttgttgatcttgaccgtcgtcgtaccctcgacttgctcgtcatcatagattaggacagccttgatcgatgaagaggtaggcatgctgtgagagaaataataagtatggcggaacgtgctcgtcgttccctctcggatggagatgctctgggactgggtcagattgccgtccacataccagcgcagtgtgcaggacctggcgttgctctcagcgccgtaacccgtgttgacgcctgtgaccgttgccgtgatcgccgccgtcggtgcggtggaggagacggtctggccactgctcagggtgagcttcgtgccggtcaggccccggtcgagctcttcatccagcttgccatatttgcaggtgatggtgtagcccttgccgtggacgaggatatgctctgcatagccgccgccggagagggtgacatatttgggattgatggtgacctccttcgccgtgccatccaggacgaagctgcccttgcgggcgtccagcgtcaggctgccgatctccgtccccttctgggccgtgacaccgccggcggaaaccgtcacggtatcgtatttgccgaggatcgtgctgctgccgccgatggtaagcgttttggcatcgccagcgtagaccattgagttttggcaggagagatacgcctgctgcactgcggtatcgcaatccacaatcgaatgggagagcaccaccagattctgcagcgtgcagccgcgcagcgtgatgcgggcgccatcctttgagaggacgacaagattgccgctgatcttgacatcctggagtgtcagatctcccatagcgcaggtcaggaccaaattgccgtcaatgactgcgccatccgcaatgggctcgctgctggcatagagcacattccccttctccggcagctgatccggcgccgtgcagatcttgccgtttttgccaaagagattatagagcacctgggccagctcttcacgggtgatggtcgcctggggattcagacgatttctcgtatcgccctgcacatagcccgcacggaccagcgcaccgacacagccagcggcatacgcgctgacacgggatgcgtcttcatagccagcaaagtcaccggcagagccgtcccgcaggccgaaagcccggccgatgacggtaaatgcctgctcccgggtgatcttcaggtccggtgagaatgccgtcgccgaggtgccgtagaaaatgcccagctgcactgccgccgcaacatacggcgtataccagccgtttgccaggtcctggaaggccgagagatccgccggggtaatgactgcctgcttctggccattcactgcaccaaccattacggtcagcatcgtcgccatctgggcgcgggtggcagagtctgtcggatggagttggccgtcaccgtagccggagaggatgctgtgctccacggcaaaggccagcgcatcatgggaccagcccgccgggatctcgatcttctgcgcagccgcaggcagcggtgcatccgctggctctgctttctcggccggcgcaggggcttgctcaggctgggcctcctgcgcgctctgctgcggctccgcctccggcggctcctgctccggtgcttccgcttccggcagcgtctggctggtcgccgcttctgccgcaggcgcctccagcccatcgccgggcaaggccagcgctgtcatctgcagcgcgaagactgccgccagtgccaggcaaagcagccgaatatgtaatgtttttttcatgtttccaccctcttgctttccaatgggattcttgttctcagtatagcggaaattctccccagaatcaagcactcaaacagcagattcagaaatatttaagtgcttggtcttttctctaaaagagtgatttctttttgcgttcggatgtgctatacttgacattacacatcttttcccattggcgcaatgggcacgcaagggagcggagtatcatggagatcgccaaatatatcgcagccgccgcagcgggctacctgctggggtccgtcagcgcgtcggtcctgctgtcaaagctcgccttccggcgggacgtccgggcagagggcagcggcaacgccggtgcaacaaatgtcgcccgcgtcttcggcatgtgggccggtattgcaacgctactggcagacgtcggcaagaccgtcctggccattttgctcggccagtggctggcgggcgatatgggcctttgcatcgcgggcatcgcctgtattctgggccactgctggccgatgtatttccactttcggggcggcaagggcgtctccgttggcgcagccattgggctgatgatcgattggcgggtctttgttattatttttattgtattcttcgtaaccttcgccctctgtcagatcgtctccgtttgttccatagccagcgccgcggcgttgccggtggccgcctgtctgctgggcgttacaacgccaaaactggtgctggccatcgtcaccggggttcttgtgattttcatgcaccggggcaatatccagcgcctgttacacggcaccgaagcaaaattcaagccgcacacaaaaaagcgcaagccttaaaactgcgaaacagaggagccgcgccgcccggtgcggaaaaaacactatggggtttattgaattctttctgaccggcatcggtctgtctatggacgccttcgctgtcgccatctgcaaggggctggggatgcgcaaggtcgactataagcagatgctgcttattgcgctgtttttcggcggcttccaggcgctgatgccgctgctgggctggctgctgggccgccagtttgagcagtacatcaccagcgtcgaccactggatcgcttttgccctgctggtcctcatcggggccaatatgctgcgggaggcctgcaaaggggatgacacaacggacgccgaaacggtctacgacgccccccttccgctggggcagctactgctgatggccatcgccaccagtattgacgcgctggctgtcggcatctcgtttgcatttctgggcgtcaacatttggctcgccatcgccatcatcggtacgacgacatttttgatctccgccgcaggggtcttcattggcaatcgcttcggcaaccgctatgaaaaacgggcgaccatcgcagggggcatcatcctgatcctgctgggcgtcaagatcctgctggagcatctgggtgtcattgcttttaatgtacattagacaaaacctgacccccggcgtctttgcggcgccgcgggtcaggtttcttttctatacagtcttcacgctaggtcaacatcacccgaattgagcacgtcgttatctgctgattctgcatcaccgtcaccgggcattgtcaggcagatggcattttgcagcagcgccgcagcaaggccgccgtatgtgaggcatgcagtcaagccgccgtctgccagggaaatggcgcagaaaaagacgcccgtcatgctccaaaacagcgtgatccgccgcttgccccggtctgccgagaagccagacgcgtggaacaggcccagcattgcgcacagcaggccgaagagctggaagcaatagtccagcaccgccggatccgtgctccagcttttaaaatcgccgatgatccgcgccaccagccaggcgacgaccacgcagcccaccagcagccccgggacgcggccccgggcccggcagaggccatgccacaccagctgcaccgccggaagcagcgccgccaggccgatggcccgaccaaagcctacctgcatcgccgcggcgctcaacccgccaacggtcagtagaacgccgccagccagatagcccacgccgctggccatgccgggggcaaaattcccgtcatacgccgcccggggcgcggcgcgccggctcagcagccaaaataccacgatggtgatgacacacaacgccaacagcgccaggacagacgcgctgccgcccagccaaaggccgttttcatcccgcccctgccgcagctgccacagccgcagggcaaagcccagcaccgccgctgccagtgtcgccaccagcaccgctggccgtaagttttcttctctccgcatcatactgccctccccgctgcgcgcagcgcgcactattttggcaaggctgccccaggtccacgccggaacgcgccgccttatgaaagtcctatccaagatgtacgcttagtatagcacaacgaccgcctgcaatgcaagaactccccgccgaccgcctgaaaaaaaccgctgcaggggaaaaaagttggtttcccggcaaattttctgtgtttttccagcagaattcccttgcaatcacgaaaaaaagatgctatactcatagtgacctttggaatgtagcgcagaagggcttttgttttttctgccgcttccaccgcgcggcctttggcagcgcagggcatcgcccctgttttccgggcgttgccagctttcggttcttacgtttgatcggtagactgagactggggttttccccagtctttcttattgagaaaggcagttattatgaaaatcacagagcaagtccggcaatttgccgagccagttgtgctgcaatacggctgcaccctgtgggacgtcgaatacgtccgggagggcagcgactggtttctgcgtctttatatcgacaaagacggcggtgtgaatatcgcagactgcgaggccatctcccgggcgatggacccgattctagatgaaaaggaccccattcccgacagctacaccttcgaggtctgctcggcggggctggagcgcaccctcaagcggccgcaggacttcgtccagtttctgcattcccctgtcctggtcaagctctaccggccccgggacggtgccaaggaattccccggcattttagaggcctatgagaatggccgcattaccatctccatggggcagacaacatatacgttcgaacaggcggaggtcgcattggtccggcttcgcgtcacgttttaacaggagggcataccatgaatagcgaaatcttcgccgcattgaagcaactggaaaaagagcggggcatccccacggactacatggtcgagaagatcacccaggccctggtcgctgcgtataaaaaggaccgcgacggctataccgacaatgtctttgtcaccctggatgaagacgccctgcatatgtatgcgcaaaaggaagtcgtcgacgacgtcatctccccgcagaccgaagtcacactggacgctgcccggaaaatcgacccgacggtccagctgggcgacctcatcaatgtcgacattcagacaaagggcttcggccgtatcgccgcgcagacggcaaagcaggtcattatccagggcatccgcgaagcggagcacggcatgatcttcgacagcttttcctcccggcagcatgagatcttgatgggcacggtgttgcgcatcgaccccatcacccgggatatgaccgtccgcatcggccagggcaatgaccggaccgacgcgctgctgagcgccggggagcaggtccacggcgaggtcttccgggaaggtgacctcatccgagtctatgtcgtcgaggtgcaccgcacaaaccgcggcccgcaggtcatcgtctcccggacccatccgggtctggtcaagcggctgtttgaattgaacgttcccgagatcgaatccggtctcgtcgagatcaaggccacggcccgggaggctggctcccggacaaagctggccgtacacgccacagaagagaacatcgacccggtcggcgcttgtgttggcccccggggcggccgtgtcggcgccgtcgtcgaggagctgcggggcgaaaagatggatatcgtcgtctggtcggaaaatccggaggaatttgtcgcctcggcgttgtccccggcagacgttctgtccgtccggctggtgcccggcatcaaggcatgtcgcgtcattgtgccggacgatcagctgtcgctggccatcggcaaagagggccaaaatgcccgtcttgctgcccggctgaccggttataagatcgacattaagcccgaatcccaagcagatgtctgcgaggaggacgagtttgcccaggccctgcaggaggcccaagaggcggcagaagctgcggctgaggcagaagcccaggagcccgcagaggaagctccggccgctgcacccgcggaagacgccgcaccggcagaagccacagaatctgcagaacccgtggaggaacccgcagaataaatcacccattcgaccacccagggaggaggaacctacgtgccgaaaaaaatacccatgcggcagtgcctcggctgtcgggaaatgaagccgaagaaagagctgacccgcgtcgtgcgtgcgccgggcggcaccgtatccatcgactcccgggggaaatcgccgggacgcggcgcttacgtctgccccaacacggcctgcctgcaaaaggcgctgcgctctaaagcgctggaccgcagcctggaggttgagatcccgcaggagatatacgagacgctgattgcgcagatggaggcaagccggaatgaataaagctctacagctgctgtcgctggcccgcaagggcgggcgcatcgaggccggggaagaaccggtggacacctgcatccgcatgggccgtgcccgtctgatcctcctgtccagtgacgcctccgagcacacctgccgccggatccggggcagtgtcgccagctccaagcagccttatatcacgatcccctttacgaaagaagaactcggcggcgcgattggccggtccgccatcgccgtcgccgcattgacagatcctgctctggcgcaggcttttatccgggcgctggacgatccggcgcagtacacagacctgctggccggtctggacaaacgtgtcacgcgcatccgcaagcatcaaaaagaaggcaaagcgcagcgcccgtacgcccatggcaagaagtaatatggaggtggctatatgagtagtttagtgaagtatcgcatccgtgaggtggcagccgattttggcatgacacccaaggaagtttcggagatcgtcggcaaatactttgaaaagcccaagagcaatacccaagtcctggaggacgcacagctgaacgtggtttttgagtatatcacccggcagaatcaggtcgcctccctggagcaggtcgtcgccgccacagcgaaggataagcggcccgccccggcggcagaaaagccgcaggacgaaaagcccgcagccaagcagcccgccgcccaggcgcaggccccggcaagccaagccgctccggccaagcagccggagaagaagccccaggagccgcagcgcaaacgtgagcgccgtgtcgtcgacacctctgcggtcaccgtcaatgccgaccgctttgacgaccgggtcgactccctcatctccgagcgggcgcagaatttctccggcggcaagcagcgcattggcagccgcaactccaaaaagccccaaaagaagggcaagtacggtggcaacaagtcccgcaatgaagagcaggagaagatgcgccgcctccagctggagatcattaagaagaccccgctgaccgtcaagatccccgatgagatcaccgtcggcgagctggcctcccggatgaaaaagacggctgcagacgtcatcaaatgcctgatgaaaaatggcgtcatggccgggatcaaccagaatatcgactacgatacggcagaatttgtcgccacagagctgggctgcaaggtcgagcgcgagatcgtcgtcacgatcgaggaccggctgtttgacgaccatgaggacacggaagacgagctggtcagccgtcctcctgtcgttgtcgtgatgggtcacgtcgaccacggcaagacctctctgctggacgcagtccggaagacgaacgtcgtctccggcgaagctggcggcatcacgcagcacatcggcgcttacactgtcaagatcaacgaccaccccatcaccttcctggatactccgggccacgctgcatttaccgaaatgcgtgcccgcggcgccatgtgcaccgatatcgcgattctggtcgtcgccgccgatgacggcatcatgccgcagacggtcgaggccatcaaccacgccaaggcggcggagattcccgtcatcgtggcagtcaataagatggataagcccggtgcaaacccggaccgggtcctgacccagctgactgagcacggccttgtccccgccgactggggcggagatacggaggtctgccgcatctctgcaaaaatgggccagggcattgacgagctgctggagctggttatcttgacggccgaaatggcagagctcaaggccaaccccaatcgcgccgccaagggcaccgtcatcgaagcgcgcttggacaaggccagaggccccatcgcgacccttctggtccagaacggcacgctgcaccagggtgataccatcatcgccggtaccgccgtcggccatgtccgcgttatgacgaacgacaagggccgcacggtcaagacggccgggccctccatccccgtggagatcaccggccttgccgaagtgcccaccccgggcgatgaattcaacgccgttgccgacgagcgcatggcccggcagctggtcgagcagcgcaagcagaagatcaaggacgatctcaacaagctcaaccagaaggtcacgctggataacctctttgccaagatgcaggagggcgagatgaaggagctcaacctgatcgtcaaggccgacgtccagggctctgcagaggcggtcaaatccagcctggagaagctcacaaacgaagaggtccgggtccgggtcatccacgccggtgtcggtgctatcaacgaatccgatatcctgttggcctccacggcgaacgccattatcgtcggcttcaatgtccggcccaatgacgccgcccaggtcgctgcaaagcgggaccatgtcgatatgcggatgtaccgtgtcatttacgacgcgatcaacgagatcgaatcggccatgaagggcatgctggcgcccaagtaccgggaagcgatcattggccacgccgaggtccgccagaccttccacgcctccgccgtcggcaccatcgccggctgctatgtcaaggacggcaagatcacccgggacgccaaggtccgcattctgcgggacaatatcgtcatccacgaaggcgagctggctggtctgcagcgctttaaggactcggtcaaggaagtgcaggccaactacgaatgcggcattaccattgaaaaatacagcgatatcaaagaaggcgacgtcttcgagtgcttcatcatggaggagatcccccaataagcgccgaagtaaagacgccgcagcaccgtgttttttataaacaaacggcgcaaaccgggtacaccgcaccggtgtgcccggtttgtacaagcgccgccatctcgcggcgcttggcggtgcaacgccaaaaaggaggttcccgatggcttcgaatcgaattggaagaatcaacgaagaaatgcaaaaggagctggccgcgctcttgcgccagctgaaggacccccgggtgcagaagacgatgatctccatcacccgggtcgataccacctcggacctgcgttacagcaaggttttcgtcagctttttggataaggactgcgcccgcgagggcctgcaggggctgaaatccgcctccggctatctgcgccgggagttgggcagccgcctgcagctgcgctataccccggagcttgtctggcaggaggaccactccattacctatggcgcccacattctggaccttctgtccacgctggacatcccaaaggatgacgacggtgacagccatgatccgcaagaccctgcctgaggcagccgcctggctgcgccagaacgactgctatctcctgctgacccaccggcggcccgacggcgacaccattggctctgccgcagccctctgccgcggcctgcgccaattgggcaaagcggcctggctgctggaaaaccccgaggtcacacccaaatacgcgccgtacctcaccggcctgaccgtcccggccccgccggagggcgcgacagtcctggccattgatacggcttcccccggcctgctgccggaaaacgcccagcccctggcaggcaatgtccaactctgcatcgaccaccacggctcgaacacgggctacgccgccgcgacgctggtcgcccccggctgtgccgcctgcggcgaggtgatcttccgcctgctggaggcactgacggtcccggtggacaagggcatcgccgaggcgctgtatctcgccatcgcgacagataccggctgcttccgctattccaatgtcaccgccgagacgctgcgcatcgccgcccagctgatggactgcggcgcagcagcctaccccatcaacaaagtcatgtttgagacgaaacgcctgccccggctgcggctggaggcgtatttgattgagcatgtcgcatttttcagtgccgggaaaatcggcgtttcgatcattccggctcatctgcgccaggagctcggcctgacgagcgacgatctggacgatatctccggctttgcccgggatatcgaaggcgtcgagatcggcgccatgctgcgccagcagccggacggcagcacgaagctctctgtccgcagcagcccggcctttgacgcctgcgccatctgcgcaaagctgggaggcggggggcacaaagccgccgctggcgcttcccttaccctgccgccggaccgcgcacagacggcgctgctccaggcgatctatgacgtttatccatccctgctcccccaataaggagaactatggccaacggaatcatcattgttgacaagcccgccgattggacgagccaggacgtcgccgcgaagctgcggggcgtcttccacgaacggcgcatcggacacggcggcacgctggaccctatggccaccggcgttttgccgatctttgtcggccgggccactcgggccgtgccctattttgaatcggcggaaaaggaatatatcgccacactgcacctcggcctggagacggacacccaggatattaccggcacctgcctgcgtactgcaccggtcgcggtcacccaggcggagctggaacatgtgctgtcccaatttttaggcccgcagcagcagctgccgccgatgtactccgccgtcaagattggcgggaaaaagctctatgagctggcccgccagggtaaaacggtcgagcgtgcgccgcggcagatcgagatcttcgcgctggagctgctgggcggtcagggcgcagattggcgcctgcgggtgtactgctccaaggggacatatatccgcaccctttgccaggatatcggcgcggccctcggctgcggcggctgcatggcggccctccggcggacaaaggccggagccttctcgctggaccaagccatcccattggcggacctcatcgcagacccggacgccgcttcgcgtctgctgggcgtcgataccctctttgcccagtatcccgccgtcacgctgacggcccggcaggagcagctgtgccgcaacggcgcggccttcacaatgcggggcctgcctgcaggatttgtacgggtctacagccagtccggcgcatttttaatgctgggccgggaatgtgatggccggttggccacagaaaaaagctttttcgaggtgagcaccacttgaacggacgcgtgattgcactgggtttcttcgacggggtccatctgggccacggcgcgctcctgcgacggacccgtcagcgtgctgacgagaccggcctccaggccgccgccatgacctttgacgcccatcccagcgccctgctgcagtgccagcctgtcccgctcctctccaccccgcaggaccgcgccgctctgatgcggcggttatacggcatcgacgaggttctgttcgcccattttgaccgggcgatgctcacggagccctgggataccttcctttcccagcgtctgaccggccagctgcatgcccggcatgtcgtctgtgggcacaattaccactttggataccgcggcctgggcgacccggagaagctgtgcgcctggtgcagtgcgcacggcatcggctgcgatgtcatcgaccaggtccgctggaacgggcaggatatctgctcgacccgcatccgcgccttactcgcagccgggcagctggaacaggccaactgcctgctggggcacccccactgcctcaccggcccggtcatccccgggcagcatctggggcacacgctgggcatccccacggcgaatcttgccatcccggcaggcatttgctgcctgccctacggcgtctatgcggcaaaagtctgggtcgaggagacgccttacaccgccttgacgaatgttggcacccgtccaacggtcggcggcgaccacgccaccgtagaatcctggctgctgcactttaccggcaatctttacggccgccagattcgggtggattttcatcttcccctgcgcccggagcaaaaattcccctctcttgccgccatgcaggcggagatccgccgcaatgcgcagcaggcggaggcctactttgccgcgcaggagaaaaaataaacacccgggtagtatacggccgggcatttctatggtataatattttcaaagaggcgcaaagtgccctgtcgtagcagcaagcaaaaacggcaaaaccacctttacgcaacctacgcttacagtgcaaaacgctgcaagcctgattttgagatcaaagcaccctggtgcttttcttcatagcaacccatataaactgaaaaccgcacagataacgcagatggtgcaggtgcagaccgcgcacgaccggcgcaaaaagggaaacgggactttttgttaaggcgccatccgcgcggcttttgtgcgcatttgcgggggcaatctcccgtgatcggacgccctgccttcagccggcaggtgcgataaggacaaaaggagtcgtgatattttggctgaaaaactgaaaattatccccctggggggcctcaatgagatcggtaagaatatgaccgtcttggaatatgggaaggatatgatcgtagtcgactgcggtctgggcttcccggaagatgaaatgtacggcgtggacctggtcattcccgatgtgacttatctggtcaaaaacgccaacaaaatgcgtggctttttcatcacccacggccatgaggaccacattggcgcgctgccctatgtgctggaggcgatcaatgcgccggtccatgccacgcgcctgaccagcgggctcatcaagctcaagctggaggagcaccgcttgctctccaaaacgaaggtccagacccatgaggcaggcgcaaaggtcaaggccgggtgcttcactgtggaatttatccatgtgaatcactccatcgccgatgccgtcgccctggctatccatacgccggtcggcgtcgtctttatgaccggcgacttcaagatcgaccccaccgccgaagacggcagggcggcatgatcgacctggcccgcatcggccaattgggcaacgagggcgttttggccctgctgtgcgattcgaccaacgtcgaacgccagggctacactccgtcggaatccaccgtgacagagagcctggaccgccaattccgcaactgcgaccagcgcattatcgtgacgaccttcgcctcaaatatgcaccgtatcaacgcaattctgcacacggcgaagaaatacggccgtaaggtcgccgtcaccggccgctcgatggagaatattctcaaggtctccacggagctgggctatctgaaaatccccgaaggcctggtggtggatatcaatcagatcaaatccctgccgaagaataagatcgtcatcgtctccaccggctcccagggcgaggatatgtccgccctgtaccgcatggccttctccggccatcgccaggtggagatccagcccggcgaccggatcattatctccgcgtcggccatccccggcaatgagaaatccatctcccggatcatcaacgagctctaccgcaagggcgccgacgtgatctacgacaagctggaagggctgcacgtctccgggcacgcctgccagcaggagctgaagatcatccatgccctgtgcaagcccaagtactttatccccgtgcacggcgagcagcggcacctgcaaaagcacgcccagttggcccagcagatggggatgtccccgaagcggattatcattgcggacgtcggcaaggtcatcgagtgcaccgccaagacctgcaagctggctgggacggttccctccggccaggtcatggtggacggcgccggtgtcggcgatgtcggcagcgtcgttttgcgggaccggaagcatctggcccaggacggcatgattgtcgtctgcgtcaacctctcctcagaggacggcagcgtcctctccggcccggatatcatcacccgcggctttgtctatgtgaaggacaatgaggacctgatggaagctatgcgcatcatcaccctctcctctctggaggactgccaggcccgccgtatccgcgaccgcaacgccattaaaacggatatcaaaaacagcctctcggccttcctctacaagaataccaagcgcagccccatgattctgcccgttatcatggagatttgagtctgatacgtcaaacgccccgccttcccggcggggcgtttaatctaggcggtgtgctgcagggcagccctgctgtttctcggcttacaagctgccttcatcccttatactttttataaattcgtttatagagcccgagcatagccgggaggcccaaggcgcatccgacgacgatcaagacaactgccaaggtcccgctccacaggcccgcaaacgcagcggcccagaaaattagggagtacacaatccacatccggccattggcgcgattatacgctgggatatctgcaatttccgacgcttttacttccgaaccggtccaaaaccacatcggcttttccctatgccacgcatatatgccgattcccgttaagatcgcactgcacgggatcataatgataagccaaatcaaattttccatcttgtaaccacccgctctgccacgttgtttggtgccatcgtagcataaaatcgaaaaccgcacaagcacagccacagcggcgcggaccgctgtggctgtttgactgtttccgcagcatgctgcacgttacagtgtgcagaggaaataaatgaggatcagcgcgcccagggcgatgcggtagatgccaaaggcggagaaggtatgccgcttgacaaaatccatcaggaagcgaatcgtcacgacagagaccaggaaggagaccaggcagcccagcagcaggatgacgacctcttgcccgttaatcccaacgccggtgccaataaacttgacgatcttcagcaggcttgcgcccaccatggtggggattgccaggaaaaaggagaattccgccgccgcgccccgggagaggcccagcagcatcccgcccaggatcgtcgagccggaacgggaggtcccggggatgatcgacaggacctggaacacgccgatcagcagcgcatcccggtatgtcacctggtcgacatgggaaagtcgcggctctgcctcggcgcggcgccgttcgatgacgataaatgcgacaccgtagacgatcagggcgatggccacggagacgtaattgtaaaagtgcgcattgaaccaatcgtccagcaagaacccgatgatcgccgacggcaggacaccgacgatgatcttgaaccacaggttccagatccggcgctttttcttctccggcttattcttgccgaagggccacaggcgcttccagaacagcagcaccaccgccaggatcgcccccagctggatgacaacctcaaacatgtcccaaaactcttcggaaacatcaagcttgataaaattattcagcaggatcaaatgtcccgttgaagagattggcagccactctgtgatgccctccacgataccgagcaaaatcgttttcagcaattccagcaagaacatagcttaccccccatctgcacaaaacacttcgaattccgtaccagtataccacacctgccctgccctgacaaggaaaacataccttctatttcatttcttcaaaaaacatatgaaatgccgtcggcagagcaaagcgctgcgcgatctcagacggcgctgcccagataaatgccgccggggccgcaccgcattggaaataatatgccgtcatgcgccaggtgatgtgggtaaaaatatgctgccgttcgacgcttttttccagctgccggggccgcacgccccactgctccgcctgcgcgattgcttgggcgaccgacagctttcccagcacattggggtactgccacagcccggccagaagcccctcgggcggccgtttttccagtgcttgccgaccgtcgcaggagaaaacaaataccgtccgctcctctacacgcctggcagcctttggcgcgcggactggatatgcgcaggggttgcctgccgcactggctcggcagatcggctggagggggcactggccgcacagcggcgcgccgttgggcaggcagacc

SEQ ID NO: 42 - DNA, 8619 bp, Unknown
  16S sequences of unknown bacteria
tggcgggcgcgctggccacgattcagaccggggaactggatcaaatgattcaggacggagaagatatcgaggtgaagtgtcacttctgcaattccacctataaattctcggtggaggagttgaaggaaatcctggcaaagcgagacgaagaaaaatagtttgttaaaataaacaaaaagcaatatagaatttagtgaaaaatactggacaagtgcggcgggcggtggtatcattatactcacgttcacaattattggggaaaggagatatgaaaccatgagcaatctgtattttgcggcagtatttttcttcttttttgggtttttctttttcaagaaagacgtcttttgctgcggcagattcaggtagagttggtttctttttctgaattggaataatggcctgcagcttgctgcaggctttttttagttacggagggtatgaatgattatcacactgaaacctcatacagaggaagagcagaaagatcaattgatgcgttggctgtccggaaggggactggaggttgatgtatcggaagaggacgaccatgaattgctgcggctgattggagatacatccgtagtggatgtgagcatggtggaaatgctgaacatggtgcagaacgtgcgaaagatttccgcaccctataagaaggccaaccgcctgtttcacccaaaggataccgtcgtggatgtgcacggtacaaaaattggcgggggatatttttccgtaattgcgggaccctgctctgtggaatccgaagagcagattatcggaattgcccaacgggtgaaagccgccggggccaccatgctgcgaggcggtgccttcaaacctcggacgtccccctatgcgtttcaaggaatgaaagccgacggcattgaacttctggtgaaggccaagaaagccaccggtcttcccatcgttacggaaatcatgaatgagaaccacctcccgctgttcgaggaagtggatgtgattcaggtgggggctcggaacatgcaaaatttcgaactgctgaaagcactggggaagacgcgaaagccgattctcctgaagcggggattagccaacaccttgaaggaattgctgatgagtgcggaatacatcatggcgggaggcaacgaaaacgttatcctgtgcgagcgaggaatccgcacctttgaaccgtacacccggaacaccttggatatttccgccgttccggcattgcacgagctgacccaccttccggtggtggtggatcccagccatgccacgggcaaggcatccttcgtggattccatggcttcggcggcagcggcctgcggagcggacggcatcatgattgaagtgcacaacgacccggcccatgctttaagtgacggcccccagtccctcacgccggatcagtttgatggagtgatggagaaaatccgcagggtgcgtgctgcggtgggaatggagaattaacatggagttacgacaaataggaaccgctctcgcggagattcagcgagggggaaaaatatgcatcatttccgaccgcaacgtggcgtcgctgtacatggatatctgcagagagagcctggaagaggccggctatggtgtgtgggaatacgttcttccgccgggagaagcctccaagaacggcacgaattatcttcggattctggaatatctggcggcggtgcccttcacccggagcgacggcatcgtagcgctgggcggcggcatggtgggcgatctggccggcttcgcagcggcaacctacatgcggggaatcaacgtgtatcaggtgcctaccaccttgctggcggcagtggattcttccgtcggcggaaagaccgccatcgaccttccttctgggaagaacctggcgggagcgtttcatcagccgaaactggttttacaggacagtcgcctcttgaacaccttgccgtcggacgtttaccgggagggtatggcggaagtcatcaaatacgggatgattcacgatcgaaagctgttcaaagggctgaaggatccgacggaggttcgaaattcgttagacgaggtgattgaaacctgtgtgggtataaaaaaagaatacgtggaggcggacgaattcgaccgaggtctccggcacaagctgaatttcggccataccctgggacacgccatggaacaggcggagggttaccggttgagccacggagatgcggtggccaagggaatgtactggataacccgaatttcggcagaacagggctggtgcagtcgggagacgctggctgcgctggagcagctgcttcggaaatacgattttaatctgacattgccggagaatcgggaagaaatctaccgaatcctctgttccgacaagaagcgccaaggggataccatccgaatggtgattccggaggaagtgggaagatgcgtcatccgggaattccacatccgggaggtgaaagatctgctatgaagagaattgatatcctgccgtccaaatcggcagcgcatcgaatgctgattgccgctgcgctctgtgaggaaccctgtgatgtaatcctttcggaacgttccctggatatagaagccaccgaaaactgcctggcggaaatccgtcgggtgcgaaaggaaggggcgacgccggaaggaaatggggaagcggcagaggaagcgcagctgcactgcggcgagagcgggtccaccttccgctttctgattcccttggtggcggcgcttgggatggacgcgaaattctatcccgcgggacgactttctcggcgccccctgtcgccgctggtggaagaactggaaaaaaagggggttacattttcacctttgggtgcgaatccatttcatgtaaaggggcagctggagccgggggctttccgcatcccgggaaacgtgtcctctcaatacatcaccggattgatgatggcactgccgctgctggcggacgacagcaccattcgggtgaccggagaacggcagtccatggggtatgtgaatctgaccctgcaagtattgcgcgaattcggtattgaaatcattacagaacgaatgggagaggaattggtgtatcggatcccgggaaatcagaaatatcgaagtccggaaacctgcaaggtggaaggggactggtccaatgcggccttctggctcaccgccggtgtgctggggaaggaggcggttcaggtgaccggcctgaatccgaattcggcccagggagaccgaaaaataacggaactgctccgtcagtttggcgcaaaaatagaagttcaagaggatacagttaccgcttatccatcgagaacgtctctgcgggggatcgtcatcgatgcgtcccagattccggacatggtgccggcactggcactggtggcggcagtagcaaatgggacaacggaaatctgccatgcggagcggcttcgcctgaaggaaagcgaccggctgatgtctgttacggaagtactgaacgctttgggcggccgggtggaagagcggccggatggattggtgattaccggaagggacgttctctccggcggacgggcggatggattcaatgaccatcgaatcgtcatgatggcggccatcgcctccctgattacaaccgataaagtaattctgaccggcagcgcggcggtaaacaaatcctatccgactttttttaccgtattggaagagaataaaatgggaaataaccttgagaggagatagagagatgactaatttagaagagtacagaaagaaaatcgatgaaatcgaccgtaccttgattgagaaggtggatgaacggatgcgcgtgtcggaaggcattgcggaatacaagcaggccaacgacctggagatcgtggatccgctgcgggaacgtgcgctgatggagaagattaccgaggattcggccaacgatatggcgtattacaaccggatgctgttcagcctgctgatggagatgagcgcggatcaccagagacaggtgacccatacggagtctcgggtggtaaaagaaattcgccgggcgctgaaggacacgtcgccgattttcccggagatggcagtagtggcgtgtcagggcgtgcagggcgcgtattcacaggacgcctgcgagcggttcttcaagatgccgaaaatcatctatacaaagaattttaaaggggttttcgcggccatcgatgagggtctgtgccgatacggagtgcttccggtggagaacagcactgccggttcggtgaaccgggtctacgatttgatgcggacctatgattttcacatcgtgaagagcatcaaaatcaagattgagcacagcctcctggtgaacaagggcgtgcagaaggcggatatcaaggaaatcatttctcaggagcaggccctgtcgcagtgcgatgagtacctgcggagggaattcccggaagcgaagattacggtgtgcgaaaacacggcggcagcggcgaaatacctgtcggaatccggccgaagggatgcagcggcactgggtgcggaaatcaacggagcgtattactccttggaatgcctggaacgggcggtgcaggatagcgataacaactatactcgttttatctgcatcacgaaaccactggaaatctatccgggcgcaaataagaccagcttcatgtgcaccacggaccacacgccgggttccctgtacaaagtgctctccgccatcaatgcctgcggaatcaacatcaccaagctggagtccagaccgattccgggaagtgacttcgatttccgcttctatttcgactttgaagaatccgtatacacagagcaattcatccgactgatgaaccatttggaaggggtgtgcaaggaatttcgctatctgggaagttacattgaagtgtagaaaattgaaaaagttgatatatagacaaggtaagtccggtgttttataatatctacagaacaaaagattaaggaaagatattagaatatgagtatattagcggatttacagaatgggctggaacagggaaagatgctggcgggagagaaggcggatgtcgtcttcgaccgggtggcgcagcacaatcccatccccgatgaagagagccgaaacgccttggttctgggagataatttggcctatatgcagggtcttttggaaaatggatatgagggtcggtttcgtctgatttacatcgatcctcctttttttaccaaaagcaaattcaacgccaccatcgacctgaaggaccgaaccgggaagaatcacaaaatcaagcatttggcgtacgacgatacctttgagcgaagcctggaatgctacgtggagaatatgacggcacggttaatcctcatgcggaagctgctggcagaggacggactgatctgggtgcacctggattggcactccgcccactatatgaagctaatcatggatgaggtattcggggcgaaaaatttccagaacgaaattatctggcagtacaaatccggcggcagcggaaagaggcatttctctcggaaacacgataccatcctggtgtacagcaagaccgcctattaccacttgaacgtgccgaaggaaaaatcctacaaccgagggctgaagccgtaccgtttcaaaggcgtgaaggagtacaaggatgagtacggctggtataccatggtgaacatgaaggacgtatggtccatcgatatggtgggacggacctcggcggagcgaaacggatacgcgacccagaagccgacggagctgctgcggcggattatcgaagccaccacggacgaaggagactactgtgcggatttcttctgcggctccggaacccttccggagacggcagaggcgctgaaccgccactgggtgggctgcgatacggagcctttggcaatttccactactcgaaaaagactggaggctcgggagggaacatacgactacttccgccagcggaccggcaacaaatacggttggttctcggtagaagtggaggattctgttcctttggaaaacggcaaaaacatgtatacgtgcaaggtcaatcagttccgaccggaaatcgattacggtcacattccgttgaaggatcgggatttggccatgaaaatcggcattgaagcgccggagcaatatatcgaccatgtgatggtggacccggattatgacggtaccttccgggggcgacaccttatcagtgaaactccgagtcaattccaattccaatcaaatgggaattatgcaataattctggtagacgtgttcggaaaggaatatttctatgatggacgaaaagaaaagcgataagggaaagaagtttttgcgttctgcgattgtggtggtatgttccgcttttgccggttctgccgcccagattttcgtgatgattcctaacggactgacctccggcggcctgccgggcatcgtgcgaatcatcactcattttatgccgtggaactattcgctggtgtactattgcttcggcatggccgtggtggcattggtgtacttcaccttggggtggaaggatgtgcagaaaatcatcgccctgtccatcgcctatccggtcatcatgtacggcatggagcaggtggatttctgtctgctgtcccacaaggatccgttcctggcttccgtactggtgggtgtgctgtacggcaccgccaccggtatcggttacatcgacgggttttcctccggcggcacggactccatcgctcgggtcatcaagtttcggctgatgaaacacgttccaatcggacgtattatgcttttcctggacggatcggtcatcgtgatgtccgccttcgtcttcgaccggaacgtggccttctatgcgttaatcactgtttttatcaccagtaaaataacggaatcgattcttctgggtatttccggggtacaggtgtccgtggcggtgattacgaaggagccgcagctgctggtggatttcgtgatgcacgagatgcaccgcggtgtgaccacctatacctccaccggagaatatacgaaaacggaacggaggtcggtgcagattatctgttccccgcgggagagcttgcagattaaaagttttctggcggagcacgatgagcatgcctttgtgacggtgacgaagctgagcagcgtctgggggctgggaagaggcttctccgatatccacgaggtggacaacaactagaatagcatgaattaaaaaacgcatccgtacgggattagaatgtacggatgcgtttttcgatgtcttcggcggtgagctgagccagcatgttgagggcggaataggaaatgtcgtccccctctttgagaatcagatagccgttcacgtattcgcccatctgttccaaaacctcccgatgggcgtctcgaagcttcaagccggagacgtctgcatacagggcgttatcgtaggattccagtggcagggtaatccggtagtcggcggtgcgtgcccgaaattccccttggagaggattgtgggcgtccgggaaaatcgatgcgttcagagggaacggcagttcctcctcccggtaatacacccgggtgttcacgtccggatttaacgccgtcatcttctctacggagcaatgctgaagaccggacagctgtagtttgtttccggaaatcttcggccgcagggaaagaccggcatccggcaggagcggaaatccgtagttggcctgggcttgatgaaaatccccgtgaagcaggagagattgcccttcgtaggaaaacagacgccgcagaattcggtagagctgcaccacgtcctcccggttgtgggtgagaagaaccttctccagcatcccgctgtggcttgtgacgtattcgtaataaaggcgaacgctttcccggccggagatggcatcaattcggtcggttccgatgtgaaaaaaattctccacggatttctgggagagggcggacagttgtcccggaagtccggtgttccgacgaatccaggagtacaggtccaggttgtacatctttagtgtaaaaggaaaatgaagggcctccagtcgccggttcataaaaggaatatcgaaggacgtaccgttgtaggttaccaggaagtccgttttctgttcattcagaaaatccaaagtggcccggagaacccggtcttcttcatagggatcttccgccagaaactgagttacggatatttcgttttctcccgacggaatgagcagtgctgtcatgatgacgcggctggtattccgtccgttggcgaaaccggtggtttcgatatcgaagatgcagggcttgagagaaccgtagtatcgccggtacagggaaccgctcagttccggcattttatattttctgcaaaattttttcaaaataccccttcctttccggtgaatgaagtgctataatgtcagagttgctttctgcagagaattataacacatctgcagcgggcggacaggtcaaaattttgaaaacaaaaaagtttgaaaaagttgttgacatgagcccgatactttgctattataatatggcgacgtgagtgagaacgaaattcacaaagcaatggagatggcggcgtagcttagttggctatagcgttcggttcatacccgaaaggtcagtggttcgagtccactcgccgccaccactaatgtggacgcttagctcagctgggagagcatctgccttacaagcagagggtcataggt

SEQ ID NO: 43 - DNA, 3302 bp, Unknown
  16S sequences of unknown bacteria
taaaggctaccgacaaaatgaatgtcgttattccgaattgcgaggtttacatcggcgagagcaacaatatcgttgttgacttgccggacggcattaagccgacaagcgacgcacctgttattataaccgtaaccgaccaacacggcgagccaaagcaaggcattaccgtaattgcattaggtgatgcggattatataggtgcgacacgttcgtaagtgaaaagcttacgcactaatcgaacctcaattatatatacaatttaatatgaggaaaaattaggagaactaataattcgacaggtggaatgagagggtaacgccttgaaacgcctgcactgatactccgacgtgcgttagttggtgtaatacaactaaggtacgaagctcggtgaagtatggctgagagtaccccctaacagataatgctgaggaaatgcgaaccagaggtggtcgagggtatgataggtcgggtgtcggtcatatatggtgagaatgatagaaatatctggcgaacttctgaatgtacgggtctataagtcgaatgtatagaaatgtgcatactgctaaatgcagtgattgtgagggtgagtaaaactcgatgttatgaaaatccttattgtgttaaaggcacaatcaagcaaccaggctcataggaagcacctaagtatgactaatgatagaattattggaacgtggtaaggttagaacactcatcaataaacctattacaagggagtgttattgaggaaacggctctaattgaataaaggaagtcgagggaactcaattttatctaactgaaggtagtggcacagtaccgttgaagctatggataacatagtggagggatagccacaagtcattttacaattactaaattctatgtactaattcacaaagtcgagtaggacaatagaaattgtcatactccgtaaggagatgatgtatatgtgaatgtgaaaaatcataaggcgacaatcgctaattattatgatatgcagactttgcaagacgaactatatgcaaaaagttcaaggggatataacttcaataatctaatggagctaattacatcacctaataacataaaacttgcatataggtctataaaagcaaataaaggcagtcatactgccggaacggacaagaaaaatattgaatattttaaaaatatgaatgaagaaatgtttgttgcatacatacagcgaaagttgcaaaactaccatcctaaaatggtaaaaagagttgaaattccaaaaccaaacggaaagaaaagaccgcttggaataccttgtattgaggacagaataatacaacaatgtattctgcaaattcttgaaccaatttgtgaagcaaaattttatgaaaaatcctacgggtttagaccaaatcgaagtgcagaaaatgcaatagctgaaagtgttagactaatgcaaaggtcgcatatgcaatatgtagtagatgttgatataaaaggtttctttgataatgtcaatcatcaaaaattgctaaggcaactatggactttaggcattaccgacacaaagctaattcaagtaataaagcaaatgctgaaagcaccaattttattacctgacggaacagtcgaacacccacaaaaaggaacaccgcaaggtggtatattatcaccactattagcaaatattgtcttaaacgaattagattggtggattgcttcacaatggcatttacagtggaaagtaatgaaaaagccaccacaagtgcagataaggaaatcaggagttagagatttgtcacacgaatacagagatttaagaactacaaaccttaaagaaatgtatattgttagatatgctgacgacttcaaaatattttgtaaaacaagaagtgatgcgaataaaataaaattcgccacaacacaatggttaaatcacagattaaaattagaagtgtcggaagaaaaaacaggtgtaacaaatctaaaaagaaaatacagcgaatttctcggctttaaattgaaacttagagaaaaatcaaataagaatgtagcaaaaacaaaaatgtgtgataaagctcggttgagggcaaaagaaaagctaaaagaacaaataaaagcaattcaaaaacccgaaaacgatatgcaattgttcacaagaatttgtaaatacaattcaatggtaattggtattcaaaattattattgtatagcaactcacatttctgaagattttagagagatacaatttgaagttagaaatacaatgcaaaataggctcaatacaagtaaagagggtaaatttgacagtaaatttcttttacaaagatatggcaaatcaaaacaagtaaggtggttaatggacaagccaattatccctattggatattgtaaatacagaacaccaagaggaataaaagcaagtataagcccatacactcccgaaggtagaaatgaaatatataaatcctttgacattgatattgatattatgagatatatgcttgaaaatccagcaaggaatatgtcgatagaatacaatgacaacagaatttcattatacacgggacaatgcggaaagtgtgcaataacgggtgaaaaactaacaaaaggaaatatggaatgtcatcacaaaataccaagagaagttggtggtgatgatacatataaaaaccttatattcgttacgaaagatattcacattttaattcacgcaaaaaatacagatgtcatttcaaaatatgtaaaaagtttaaaaatgcctgaaaacggaatgaaaaaactcaacaaactgcgagtgttagcaggattagaagaaatcaaatgacacgaataaatatgattaaaaagcaaatacatagaataattagttaaagtaaaatgatgggacgctgtatgcggtgaaagtcgcacgtacagtgttaggcgggggaaaagcaagagataatatcaatggcttacctatcgcaacaaaaaggcgtaacagatatgttcggaaaaattacattgccgacagcaaaggacggatttacggacaatacgggtaaagtaagaattgacggaatgtatgtgtttgtcaatgacgagagcggagctattgaaaatgcttttgtgaaattgaatgatgacagcacaatttctgtaacattgccggacgaaacaagtattgactatgcaaaccgcattacagtaaccgtaaccgacaaagacggaaatccgcagaaagatatttccgttaccgtttcggacactgtggaaaatagtctgacagacaaaactgacgaaaacggaaaaatggttgtgccgccgctttcggaggatattac

SEQ ID NO: 44 - DNA, 2681 bp, Unknown
  16S sequences of unknown bacteria
cgagattcgccttagtctcgtgggctcggagatgtgtataagagacaggctgtgggagcgtctggttctgattctgctgcggtgggggaagctgggcctggccgcgctccaggatgccgccggaatacgccagcagtaccagcgcaaggcaaagccctataatggtgaagcggccgatggccggacggaaatgccagcgttttttctgtttgccgctgttggcggagaaatcaccggggccactctcctgttgaatacggtgaataatataggaggccatgtcgccgggcacctcgtgtttcatcaccgccaaaccgtggtgaatggcgctcatagctccgtaatagccccggcagccggggcattcggccagatgtgccgagagcgcgcgcttttcttcactggtgcacaggccgtctgtggcggcggacagcgtggaaagataggacttgcaggcgcggaactgtgccggtgcggtctcgtttccctctgtgctggcggggaaaaaaccgccgctgagcatgatctgccgccgcaccagggcacgggcacgaagcaggtcagcgtgaatggcttgtgcggtgcctccgagaatatctgcgatctgcgtgtcgggtacgttgcccatttcatgcagcagcaggatctgacgcagacgcatcggaagggcatgcagcgcgtcctcgatgtctgcctgcagtgcgatgtgctccatattggtacgcggatcatagcgcagggggccgaaagggaaattcagagtatcttcatcggtttgggcgttcagatttacccggtgccgccgctggcgtttagccagttccgtgcagtcgatgcacaccagctgcagaagatgcgtgtgaaaagacagatttatggccggaagaaattccagctgccgccaggcggtgataaaggcgttttcagtgacggtttgagcatgctcttcgccaatcatggcccaggcaaaacggtagacggcagcctggtgcagatggatcagttctcgataagccacctggcttccctgggtggccgcagccagcagatcccgttcgttgacagatgccatgttcatggtgcaattcctcctctgggggcttcatcggacagatcccgcttgatgcccgcagtgatacggtaaacgtcttccatggtgttcatggcgacgatttgttctttgtaatagttggcatagggcacgcccttaagataccagcaatagtgacgccgggcttccagcacggcaattttttcgcctttgtcagcggcggccagttcaatctggcgcacggcggtgtcacagcgctgggcgagaggcggcagcggaggaacggggcggccatccaaagcggcctgggcctgctgaaacagccagggattgccgaatacgccccggccgatcatggccatgtctgcgccggtccatttcaaaatccgcacagcgtcctctccggtgaagatatcgccattggcgataacggggatggaaatggcgcgctttacttcaccgatagcgtcccaatcggcccgtccgctgtacatctgcacgcgggtgcggccgtggacagcgatggcggctacgcccgtgtcttccagggcgcgggccagttccgcagcgttcaaatgtccccgatcccaaccgatgcgcattttgactgtgaccggcacgggaacggctttgaccacggctttcgccacctgcagcgctttgggaatatctttcatcagcgcgctgccgtcgccgttggaaaccacttttcccacaggacagcccatgttgatgtcgatcagatcggctccggagtattcaagagccagctgggcgcctcgggccatgcactccggatcgctgccgaaaatttgggctgcggcgggatgctcgccgggaaactgcttcaacagtccccgggttttgcggtcctggtaacacagagccttggagctgaccagctccgtgcaggtcaatcccgcccccagttcactgcagatctggcggaaagcaaggtctgttacgccggccatgggtgccagcgccaggcgtgaaggaatgtcaatcgatccgattttcatgtgctgtcggctcctttcgttccaaatcaggatatgctgccgatggggcagaggataaatatacagtctgctattataacaaaatcgtctgaaagtgcaagggaaaacataaaaaagagacgaaaaaaggggaaaccgccgccggccagtgcaggatcaaaacctacactggccggcggcggttagtatggaaggaaaaatcaaaaaagaagggatgggacacgagaagaaagaacccagatcagagccatgagggcagcgcctgcggcggcccagaggggggctggaatccggagcggcgggcgcggggcgttgcgggccgcacagcgtcgggcgatgcggcaggcttcttccactgccacgctcggtacgccggagtccggcccggatgtatcgctgcgcaggataaagatggcctcgtcaaaataccgccggtcgggactggatactacgataacccgacgggaaatgccttttaccataattgtgtccgctccttttgccgccgtttcgggcttttgcagtcagtatgcccagactgcggcgattttataccgcttggaccggatgctgcggagcgggactcaggcgcagcaccaacaggctgg

SEQ ID NO: 45 - DNA, 7941 bp, Unknown
  16S sequences of unknown bacteria
gatcgatgcacttcgcgaagtcaaagtgctccagcgcctcctccttcgtgcccacgtaggcaaatttgccgtccttcagcactaccgcgtccttgcagatatccggcgcctccatcgtgtagatcttgccaccatagaacaacgtatcagctctggccttcattttgtacacctctctaattttaacatgacatgattgtgattttgcacagttttacgcgcgttagttttaacttagtctccattataacgaaaagcggagcgtgtggcaatttgccgcctgttccccctgcggaacagtttgtgcaatttttgtttcctgtgcagaacgtttattgacacatttggtactttttgatataatcattaaaaaattgtgaaaaagtaagcatggattgattttgaggaaatcgcttatgggcaccgaaagagaaagtatcacaaaagaagtcggcagccgaatccgctacgcccgcaagagtcggggcatgtcgatggacgagttggctcaggctatctacaagacgcgttctgccatctccaaatacgaaaatggccagatatccgtggatatcgccacgctttacgacattgccaatgccctgaagatcagcatctatgatctgctgcaccgcaacacgccggacatcaatcaggagtacaatgcggaggtgcccgcctttttccgtggtgtctcccagctatatatgtatttcttcgatggccgggtcaaccgcgcccaatgcactgttatcgacatatttcctacggaggaaagcaacaaggccgaagtcctcatgtacatgaatatcaaggatctggcccactaccggatctgcgagagcagctaccgcggcatcctgacccactatgaggcattcagcgccatgctttttgagaacaacgatatgcccatggacaaataccagatcggcatccgccagccctatatggacgacgaccagaagtgggtgctgacctacggcatctcctgccgcccgttgatgccctctgcagccaagcgacttctcagcaaaacaccgctttccatcgataagacactggttcaagagttggtgatatccaaagaggacatccgcttgatgaagcactacaatatgttcgtcatggtgtagtctccattgtccggcttagaagtatcgatgtgtttatctgcttttttaataaggcttgattgtaaagggtaagaagaaaacacagaaataatcgaacacaaaactgtcagggtggcagcgcaggacggaggatgtttttcactgccctccgaggatagtgtggcctacacggagttctgtttgatatttgccagtaatttggcacccactattacgcagcaacaaaaaagagcgctttttgtcgaggcaatgacccttgtcacttggacgaaacaacaggaggagaactccggtattccccagaacaccctctccgctttctccgcatgacccgcatttgccccccatacgggaaacatagccagaagttacagggccacccggcgggagggtcccgcccggtggctctatttcttcgttttgataccctttcattgtttccagcagcgcaaaatgtgaccattccactgccagagaaagttgacccacaccgacgatgccggtggctctgacccacaccttgacccacacgggaaaacgaacgggtggaacacatggaacaaagagtttccgaccgcatcctttttgcggtaaaaatgcccacaaagccttacaaatcaagggctgggaggacttttatcacttggtaaggatgaggtcggcggttcgaatccgcccagcagctccaaaagatcctgttttctatcgaaaacaggatctttttctttgcctatttttcctctatgggtgagggcatgaagcgaggcggccgcatatccttacccttgcggtaaatacggcttgcctatagggcgaatagcgcctgtcacacggtaattatcttcagccactcaatatattccagcgccaattctgacagtactcgagaggggttacagatatacccgatctcgatttgccccaaatccgtgatgggcacactgaccaaggcgcggcggcgatcctcttgtgtcagatagccagagccggtcacataggcatcgcccagtgccagcagtgaatacgccatcgcccggtcggataccgagatgacctgctgctgggggttccactggcgcctggtcgtcgtgaatcgggccgaggagggatgacactcctcataagaaataaacgggtactgctggatgtccgccagtgtaacgcttttacactcggctaagggatgcgtattctggatgtaaatatgcagcagatcatatttcaggtgctgaaaaaatatattccgccgattgcatgccttgataatggcgctgcggctgtcgctggtgaaaaacagcacgccgatgtcggagcgattcgtttccacatcctgcagcacctgatccatgtttccctcaaaatatcccagatgatatttttgattcttaggctgacatacaatgtgctcaaaggcatcgataccggagacatggtgcagggaggatacgcaaaaatactcgcactcccccttgtggtttttatacttgtcatccaaatcctggtagatatttgtcagcagctgtgtgtccttcaggaatgcctctccctggcgcgtcagcgatatgcccttactggttcgctcaaaaagaaccataccatattcccgctccaagtttcggatcgactcggatagactggattgggagatgaacagcgactctgctgccttgccgatagagcctgccttgctgacggcccggacatatagtatttgctttaatgtcatcgttttcacctcatacttgcgctgttgccgcagatggagacctctcgccactgtttgccccaaccgacaccgctggaatggtaattgtgggacatcttcctgattttagcagcatttttgttaaaaagcaacctccaacattataaatcaacttccccaaaaccctgtttttacctgaaagccatcggtcttaccgatggctttgcatcgcttatttgttcttcaaattctacgggtgctggcgtataatgagttcacgcaaaataccacccatggaaaagaaccggactgcttgtccgtatcaaccaatggagggagcgaccctgaaaggaggagcctatgatagccgaacacacgcaaaccgccaccgaggcccccgttgttttgcagtgtgttgacctgtgcaagtgctataacggtgtcgtacaggccagcgatcacatcaatttcaccttgcgccgcggcgaggtacacgcctttctgggggaaaacggtgcaggaaagagcacactgatgaaaatgctctacggcatcgagcagcccgatgagggtcagatgttcctttccggcgagccagtggtgctgaaaagccctgctgacgccattgcccacggcatcggtatggtacaccaggaactgatgctgattccgcacctgacggtggcggaaaacattaccctggggcaggaggccaggaccagaagcggacggctgaaaaagcaggaagcgtcacgcagtatccgggagctggccgcttcctatggcttagatatagaccctgatgcgctagtggacaaactgaccattgggcagcgccagcgagtggagatcgtcaagctgctgtatcgcaaggcggacattttgattttcgacgagcccaccgccctgctgacgcctcaggagtccgacgcgctgtttgatgtgctgcgccgcctgcgggagctgggcaagtccacaattttcattacgcataagctgcgggaggtctatcaaattgcagaccgcatgaccgtgatccggcagggccggatcatcggcaccaccacccctcaggaaaccggcatggaaaagctaacgcagatgatggtgggcaaaacggttcctaccgggcgccgtcggccccaccccattggggaggaagaggtgctgcaggtaaagggcctcagcgtgcagagccgtggcggcgccgctgtgcaaaatgttaccttttccattcgctccggcgaggtgctgggcgtagcgggcatcgagggcaacggacagacgcctctggcgcaggcccttctgggcctttgccgctcctcctccggcagcattctgctggacgggcgggagatcaccggccgcacgaccaagcagattcgcgatgccggcgtgggcagcattcccgatgaccggcaaggcatgggtctcatcctcagtatgcggctctttgaaaatatgctgctgaatgcctacgacgaaaagccctatgccaaaagcccgctgctggaggactgggcggccgcccgccgtgatgcgcaggctaagatcgccgattacagcattgcggccaccaatgagtcggttgtggtcggcacgctctccggcggcaatcaacaaaaaatcgtcgtcgcccgggagcttgaccggggctgccggatgctcattgccgcacagcctacccggggtgttgatatcgcctcggcggattacatccaaggccgcattttggcagcggcggaacagggctgcgccgtgctgctcatttccagcgatttggatgagctgatcaaggtctcagaccggatcatggtgctgttccgtgggcagatcatgggatttgtggatgcagacaatgccacccgtgaggccttaggacgcatgatgctgggcgaagcccactgatcgatcctttattgatcctgctgccgattaaacggcagcttagaactaaccaaggaggaactaagatgaagtttacaaatgtgaaaaagtggctgtccatgctgctggtggtctgctcgatgctgtccctggcggcctgcgggaagtccgacaaggatccggcaggtgacgattccgagaaaggcaccaaggtcgccgttgtgttcgcctccagcggcctgggagataagtcctttaacgatgcgctgtatgacggcatgaagaaagcggagagcaccatgggcatccagtgggtatattccgagcccaaggatgacgccgagtacgagggtctgatatccggctatgccgacagtggagactgcgacctcatcatctgcctgggcggcagccagagctccagcctggaaaatgtggcccccaactatccgcagcagaagtttgtgatcctggacgctgtggtggagggtgacaacatccgcagctacacatggcgtgatcaggagctgggctttttggccggcttcctgggtgccagcctgtccgacaccaatactctgggctttattggcgcccacgacatccccttgtgcaatctgggcgctgccggtatgatcgccggagcccactatgctaaccctgactgccaggtgctggtggactatgccaacggctgggcagaggtcaacggctgctatgagctggccacatccatgcatgagcagggcgccagcctgatataccacaccgccagcgccggcggcctgggtatcctcaatgccggcaaggagaagaacttcctgaccgtcttctttgacggcaacctgaatgcggacgccccccagaccaacattgccagcgccatccgggacttccccgcttgcgcccaggaagcgattcaggatgtcattgacggtaagttcaccgccggtgccattgaaaagggtctggcagaggacagcctgtatctggattttgacggctctgcctatcagatccccgctgatgtgatggagaagtacaatgcagcggtggctgccatcaaggacggcaccatcgtggtccccagcaccattgaagaagcaaaggtgtggaaggcggcgtaaatccaacacggggctgaaggcctatctggccttcagccccgcaccttatcggcagagacatatcatctgcgcaaggagggacactgtgaaaaaaacaaggattcgattgtcgctgttttcgttggttctggcgctggtgctgttcggtctgaccatacggcttaccggacgggatcctctggtcgtatactggaacatactgaccggctctttcggcagcaccaagagctttctgaatgtgctggcatatatgctgccgctgatcatgaccggcctcggtgcggcggtggccttccagagcggtgttttcaacatcggcggtgagggacaggtgctggtgggcggactggcctccgttattgtgggcctgacggtgccgctgccggcgccgtggggctggctgctggcgctgctggcgggctttgcggccggtgctctgtgggcactcctgcccaccctgtttgccgggcgaaacctgacctcactgtccgtggccaccattatgatgaactccatcgccgcactgctgacggagtatattgtcaagagctattttcagcgtcccggcgccagcaacacggagaccgtggttgtgaacgagggcagcattttgccgcgcattttccccagcacgcagtttaactacggcatccttgtggcgctattctgcgtagtcgttgtaacctggatgctgtataagaccccttttggcttttccctgcgggccatgggcagcaacccccgtgccatgcagcaggccggactgccgatctatggccggacgattgccgccatgtgcatcagcggcggcctgtttgctctgggcgggtccatccagtgcctggcggtatataagcgcttcgtcatgggcttctcccccgggtacggctgggacggcattaccgtggccacccttgccatgaattcgcctgtgggcgtgctgctgagcgccttcctgtttggaatgctgcgctccgcctccatcagcatgagcctgaccagccaggtgacaacggagatgatctccgtgctccagggctttatcgtcatgctggtggcctctccggatgtgtggaatgtgctgggccacctgtggcagcggctcaagggctgtgtcggccgaggccggaaacaggaaggagctgctgaataatggatttttggatctcatttgccaacttttttgcctctgccatccggctgaccgcacccattgcactgggcactctggcctgcaccatcagcgagcgggcgggtgtcatcaacatcggcattgagggttccatgctcttcagcgggtttctcgccgctgtgggctcttactatacgggcagcccttgggtagggctgctgtgcggctgcgccgccggtgcatttctggcgctgatcctgggggtgctggccatttactgcaacggccagcagatcgtgatcggcatcggcctcaacctcttcggcccgggctttgcctatatgatgatgcgtgccctgtgggacaccaccggcatctctccgtgggtggagggctttcaggccgtgaatattcccctgctctcccgcatccccatagcgggcaccatgctcagcggctacccggcctgcatctatctgggtctgctggcggtggcggttatgcagtatctgctgcatcgaaccgcatggggcctgcggatccgtgccgtgggcgaaaaccccgccgccgtggccacgctgggcatcaatgtctaccgcctgcgaatgcgtgcggtgcttctgggaggcgtttttgccggcatgggaggcgctgtcatgtgcctcagctccgccaatgtgtttgtcaatgatatgtccgccgggtccggctttatggcctttgccgccaaccagttcggccagtggtctcccgtcggcggctatcttgccacgctgctgtttggcgtgatgcaggcactgcggatgcgcctgcagagcttcggcatcgccacgcaactgacccagatgctgccctatctggccgcgctgatcggcatcaagctcaccggtatgcggatgcgggcaccggcggccaatggcaccccctacccccatccgctctccgctcccctgt

SEQ ID NO: 46 - DNA, 32759 bp, Unknown
  16S sequences of unknown bacteria
tgtctgtcagatacgacgaagcaagcggcgaaatgcgtcttttctacggcgagggcgcaatgcaaaagccgccgtcaggctcgggttccgctttcgacatccgcgagtatctcaggtggcgttacatagcgttggcgattttcctcttaattgcgataatagtgtttatagtgcctgtcgtcaaaaaaatgaaaatcaatatcaaagttacctcaaaaagaagatgaaataaagtcttacctacgctttaaaaaaatcgaccgcaatgtaaaacacgttgcggtctttttttatgggttttttacgtttttgtttaatttaaagaattattgataaagagttatcagctttgtttagtgtgaattaggcattttgttccgcttgtcaaacagtgagaaaaaaaggaatgagggacaaaataaagtgagtgacgaagagagtgaggaacaaagacaacgagcgacaaagggaataaagcacaaagtgagtaagacgcaaagacagcgaagggtaaaggggaataaagcacaaagggagtatgacgcaaagacagcgaagggtaaatgggaataaggcacaaagggagttatgaaataaaaatttataaatatttattttttattaaatagatttattcgtttttcagtgagaaatttaccggattgttttcagtcgtttatcttacaaaaaaatttttatttctgtttgattttaaacttgacatataccctatatgggtatataatgaaaataccctacaggggtatagtgcgcatatattttatttcggataaaaagcagaggaatttacgtcggctggaaaaaagcgttaaagtcgcaaaacaatccgtaagcgtaaaaaaggagaaagcaaatatgagtgaagacaaaataaacggcgaaaaaaattgcataaagtgtgattgcgtaaaaaccaaacaccgcgacaaatcggaatacgataagcttataaacaggcttaaccgtatcgaagggcagattcgcggcattaaaagcatggtggaaaaggacgcgtattgcaccgacatactggtgcaggtttcggcggcgacggctgcgcttaactctttcaacaaggaattgcttgcaaatcacatacgcacctgcgtgacggacgacattatagtcggaaagaaggagactgtggacgagcttgtggacgtattgtacaggcttatgaggtgaaagtatggaaaaattcgatgtcggcggcatgagttgcgccgcgtgcagcgccgccgtggaaaaagcggtttcgggcgtggagggagtgacttcctgcacggttaatcttttgacggggtcgatgggcgtggagggcgatttcaactccgaaaaagttattgccgccgtggaaaaagcgggatactccgccaaaatcgcgggcggacgggcaaacaaatcggcacaaaacgacgaaagcgacaaaaaatcggtcagagctcttgccgcgcggcttatttcatccgtagcgtttcttttactgcttgtttacgtttccatgggtcacaatatgtggggctggccgcttccgccgtttcttgaaaacgacatggtggcttcggggcttactcagttactgcttgccgccgtcataatggtaataaatcaaaagtttttcgtaagcggattcagaagtcttttccgcggggcgcccaacatggacacgcttgtggcgcttggctcgggcgcggcgtttttatacagcgtttacgcgctttacgccatgagcttttttgtggccgcaggcgacacgacttgcgcttccgcttatgtgcacgagttttactttgaatcggcggcgatgattctgacgcttgtaacggtgggtaaaacgctggaagctcgcgccaagggcaaggcaaccgacgccataaaaagccttttgaaacgcgcgcccttgacggcggtcgtttgggaggacggcgaggaaaaaaccgttcccgtaagccaagtgtcaaaaggcgacgtgtttatcgttcgacccggaggagtggttcccgtcgacggagttgtcataaaaggcgaaagcgcggtggacgagtcggctttgacgggggaaagcgtgcccgtcgacaaaaaaaccggcgaccgcgtttcggcggcgacggtcaacacgggcggatatcttgaatgcagagccgtcggagtgggggaagaaaccgcgcttgcgcgtattataaaactcgtggaagacgcggcggcgaccaaagcgcccgtcgccaaaatcgcggataaggtttcgggcgtcttcgtgcccgtagtggcgtttattgcgcttgtttcgctgattgcgtggcttatcgcgggcgaaagcttcggatttgcgttagcaagggcgatttccgtgcttgtgatttcctgcccgtgcgcgctggggcttgcgactcccgtcgccataatggtaggcagcggtatgggcgcaagaaggggaatacttttcaagaccgccgcggcattggaatcggcggcaaaagcggacatagtggcgcttgataaaacgggcactattaccacgggcaatttctcggttacggatatcgaggcttacggatgcgacgaaaaaaacttgttaagcgcggcttattccgtcgaaagcaaaagcgagcatccccttgccaaagcgatatgcgcatatgcgcgtgaaaataacgttaccgcacttgagacgacttctttttccgcgctgtcgggcagcggggtcacggccattgcggacggtaaaaaggtgtacggcggcaattataatctgataaaaagcgttgtttccgtgcctgaggagtatgcactgcgggcggaagaacttgcaaatcagggtaaaacgcccatgtttttttcgtccgacggcaaatttacgggaataatcgcagtcgcggataccgttaaacccgatagccgcgaggcgatacggcagcttaaaaacatgggtaagcgcgttgtcatgcttacgggcgacaacgaacgtaccgccgcagccgttgccgcagccgtgggcgtggacgagataatttcgggagttcttcccgacaaaaaagaagaagtaatacaagatttgaaaaagcgcggcaaagtcgtcatggtgggcgacggtatcaacgacgctcctgcgcttaccgcagccgatacaggcattgccgtgggtgcgggtacggacgttgcggtggactctgcggacgtagttttgtcaagcaacagtcttaaagacgttgcggcggcgttacggttgggaagagccacgcttaccaacattcacgaaaaccttttctgggcgtttttctataacgtggtaggaattccgcttgccgcgggactgtggattccgattttcggctggactcttaatcccatgttcggcgcggcggcaatgagcctttcttcggtttgcgtagtgcttaacgcattaaggcttaatcttttcaatcccgataaggagcgtaaattaaggacaaaaagcgcaataaaatcagataaaaaatcaaaggaggtaataaaaatggaaaaaactttgaaaatcgagggcatgatgtgcgcccattgcgaggctcgcgtaaagtccgctttggaaaacgtcaagggagtagagtcggcaacggtttctcatgctcatggaaaagcgacggtaacgcttaaaaaagaggtttcttcttccgctcttcaaaaagctgtggaaaaagcgggctataaggttacggaaatcgactgacttgatgccgctttcgttttgtagcggcggttaagcgcagtaaaggaaagttaaacgagataaacggaaaaaacgaaatccgcccgaatgtattaaacgcggacggatttcgttttaagaaaaatcaaaacaggtttgagtttccttaaatttcaaagtgatcgccttcggactgcgtgggcggcatggtgtcgcctttgcgcacgtaaacggtgccgaccatggtgccgttttcgtttacgacgttataagtgcccgaaacaggtgcggtgtctccgcttttaagcttcgtcatcgtgattttacctcctctgggattattatgcgtaatagggttgcggcatatacggaatcaaattgacaaatattgctttttgtgcgataatcgatatcggaattattttatcgaggtgcgtttatgattacggttgtgggcgtggggttggaaaaaggcgatattaccataaaaggcagaaaagcgataaaggaggcggcgtgcgtgttttcgcgcgttaagctctggtttaaaaccgaggtgcttgcggataaattccccgacgtttcggattatgcagctttagacagtcttattgcaaataaggtcttagacgcggaaaaacaatcgggaaacgtggtctattgcgcccttggggacggatttaccgactcggcagtcagcgaaatggcaaaaatttccaccgttaacgtaattgcgggcgtaagcgaataccgcggcagaactcccgactccgaggcggttttttattccgcttacgacgttacgggcgatactcttatcgacacaagggttccgcttatcgtgtacggcattgacgacaagctgattgcgggcaaccttaaactcgtgcttatggacaggtacggcgacgaagcggaggcggtttattcctctggaaaggagcggtccgtcattcgcctttacgagcttgaccgcatgaaaagctacaagggcggcgcgctttttataagcgggaaaaggtctttgacgcaaaaaagccgttacggattaagcgaccttatggaagtaatgagtcggcttacggcgcctgacggctgtccgtgggataaggcgcagactcacgaaagcatacgcatcaacatgattgaagaagcttacgaggcggtggacgccattgacaaaaacgacattgacaatttgcgtgaggagcttggcgacgtgcttttgcaggcggttttccactgcaatatttccgagcgaacgggagaatttaccctttgcgacacggtcagcgagcttgtcaacaaactcgtgaccaggcatacgcatattttcggggagaacaaggcttccgacgccgattcggcgctggggttctgggaacaggccaaagcaaaggaaaaaagttacgactcgctttcgggacaactggacagactgcccgacagttttcccgcgctgcttaaagcggcaaaagcttataaaaaatcggtaaaagcgggcgcagatttaagtaaggaagcggttttaagccgtcttaacggcatattaaaagaaggtatcggtaaggaaaacgcgggcagatttttgctgcttgcaagttttcttgcgacggagagcggcgcggattgcgaggcggagcttaacaagcgcgcgtcaaaattcattgaggacatgaaagccgccgaagccgcgggagagcttaaccgcgcgtccgaaaaaatctgaaaaaggacaaaaataaaatcaggaaaatgtcaaacgccaaaaacacaacgacggaggcttcggttgcggaaaaactgagccgacccttttatataaaagacgtaaggataaaaaaccgtcttacgcttgcgcccatggcgggttttacggattcggcgatgcgcgcgcttgcggcggagggcggcgcgggacttacggtaacggaaatggtcagcgcgaaagggctggtttacaacgccgaaaaatgcggcggactgctgattacttccgacgcggaaaaaataaaatgcgttcagctgttcgggcacgagcccgattatttccgtgaagcgcttaaactcgactgtcttaacaagtttgatataatcgatataaatatgggctgtcccgtgccgaaaatagtgaaaaacggcgacggcagcgcgcttatgaaaaatccgttgctggcggcgaaaatcgtggaggcgtgcgtggagtcggggggcactcggcccgttacggtaaagacgcgcatcggcttcgacgcggacgaaaacgtcgcggtcgagttctgccgcacgttggaaaaagcgggcgcggcggcgattacgcttcacggaagaactcggtcccagggctacggcggcaaaagcgattgggataccatcgcgcgcgtagccgactcggtttccgttcccgtaataggaaacggcgacgtatgtgaggaaaacataggcgaattaattgaccgcgcggccgctttcgctgtgggaagacgggcgataggggacccgtggattttttcgcgtctgacgggggaaacggatactccgcctgtttatcagacgcttttgcgccaaatcgtgcttatgcgcgataattacggcgagcgttatgcgtgcgtaaacatacgcaaacaccttgggtattaccttcgcggcgtaaagggaggaaaggaaataaaaacccgccttatgaccatcgattgcgttgacgaacttatcgcggcgataaaaaatgaaacaggacaaaattgactttttgattgcggtaaattcgacaatattgtttttcggaaaagggttttaaaagctttacctttaatggacaaaaagttataatataaaaagctcagataaaaaggagaagggaagatgcttaaaaagtattatgaacaaagcggctttgtgggcgtattggatacgcgcgcgtattacataccgttcaaagcgggcgaggacgcttttgccgacaggaagcaaagcggcaggtttaccgaccttgacggtaagtggcagattaaggattacgaaagcgtccttgacgtaaaagacgacttttatcttgaagaaacgaatgctgaaatcgacgttccgggctgcgtgcagtactacggctacgaccatttccagtataccaacgtcaactatcctttcccgtataatccgccttacgtccccaatcagaaccctacatatcattatcgcaaaaaattcgaccttaaaaaagccgatcagaagtattaccttaatttcgaaggggtggactcctgcttctatctttacgtcaatgaccgtttcgtcggattttctcagattgctcaccgtcagtcggagttcgacgtaacggattatcttaccgacggcgaaaacaagctggacgttctggtgcttaagtggtgcatgggctcctatctcgaggaccaggacaaactgcgctttacgggtattttccgcgacgtatatcttttgtcgcgccccgcgggtcacgttgtggattacaaaatccaaaccgcccttgacggaaccgttactttcacgttgcttgacggaaccgaggctaccgtaagccttttgggcgaggaaaagaaggtaagcgcgggtaaaaccgttactttcaaggttaaggacccgattttgtggagcgcggaaaatccttacctttacgatatgaccattacttacaaggacgaagttatcggtgaaaaagtgggtatccgcaccaccgaagtaagcggaggcgtttatcttctgaacggtaaacccataaaactgaaaggcgtaaaccgccacgacttcaactgccgcacgggcgcttctgtcacggtggaaaacgttatcgaagacatgacgcttatgaaaaagctcaacgtcaacgccattcgtacgtcgcattaccccaatatgcccgagttttatcagcttgcggacaaattcggtttttacgtcatggacgagtccgaccttgagtcccacggcgtggtttcgcgctttacgggttacgaaaacgccaattacgaccagattgccgacgacccgcagttcatgcaggcgattttagacagacaaaaatgcaatataggcagggacaaaaaccgccccagcgtaattatctggtcgctgggcaacgaatgcagctacggcgaaaacttcgcgcgcgcgttaagatgggtcaaggcaaacgactaccgtcccgtgcattacgaaagtctgtggcactatgaccgcaaaaaacgcggcgaggattattattactccgagcccgtggatatggtcagccgtatgtatccgccgtattcctggatggccgaagagtattttaaagacccgcgcgaataccgtccgcttgtgctgtgcgagtactgccattcgatgggcaacagccccggcgactttaaagattactgggatataatttattcttccgaccgctatatgggcgctttcgtctgggagtgggcggaccacggcgtgctttacggcgacaagggattaagatatggcggcgacttcggcgagactttgcacgacggcaacttctgcatggacggcatcatcaccgcagacagaaagcttacgcaaaagtccatggagatgaaaaaagcttacgagcccgtgcgctttaaccttcaggacggaaagctgaccgtaaaatcgcttaactactttatgcccgtcgaaggtatgcttacgcttacatacaaaaacatgggcaaggaagtcaagcgcgagaatttcgatttgtgcctgcagcctgccgaaaccgtgacgttcgacgtggattacgaccacgtcctcatcgcgtcgattacgcttaaatccgactttggccttttgaagaaaggtcatgaaattgcgcgcggcggctggacgaagagggtggacgtttatacacaaaagaaggcggctactcccttaattgccgacgagggcagatatatcacggttaaaaccgcttccgcttcctataaactggataaaaccaacgccgccgtcgtgtctattgagggcaaaaacggcgagattctggagtcgcccatagagcttaacttgtggcgtgcccccaccgacaacgaccgtaacgtcaaaaacgattggattcagtgccgctattacgaaattttcagcgaagtaaggcgcgtggatgtcgaaaacaacgtcgtgcgttttaccggacacattgctcccgtcaagcttgagcccgtatcgagttacacgcttacttacgagttctacgacaatgcggtttcggtaaaaatcgattacgagtttgcttcctacgcaaaatacccgccgagagtgggattaaagaccaagcttagtaaaaaattcgataaagtcaaatattacggctttggcccttacgaggcgtatatcgacaagcgaatcgcctccgttaaggacgtttacgaggataaggtcaaagatttgatggtgtcttacgtccgcccgcaggaaaacggaagtcactacggcaccgagtttatggaaatcaccgacggcaaaacggttttgcgcgccgaggacaatttctctttctccgcgcttccgtattcggcggaaacgcttacagactgcgcccacgattgggagctgcctaaatccgacggcacgtatctcagtcttgacttctttatgtcgggcataggttctcactcctgcggaccggtgctggacgaaaagtgggaagcccccaaaaaaggcaagggcagcattacccttattataaaataaattccgatttaattcgcataaaaagggaagagcgtgtaaaaaacgcgcttcctttttttggcggtataaactttaaaagttaaaacttttttttgcgttcgcggacgatttgacgaggaaaaaacgaattctgttttattaacgcaaaaaattgtaaaaaagttaaacgagttcttaatttttgcggcagaagccgatttggcttcttatcggttaaagccgataacgcagcacaaaaaattcgggcgaatcgggtttattccgagacgctgccgacattaggcaaaaggcaggtttttattatgaaaggaaaatggattacgcatcctctttatgccaagctaaagccgttaaacgtatttcacaaacagctggataataatttttcgtattctcaccccgaggatatgaagaatatacacacgctttttctgaaaaaatttactcttgacggattcggccgagtaatgataaaaattaccgcagacgacttgttcaagttatacgtcaacggcaatttcgtgctgtcggggcccgtgccggggtattatttcagtcagtattacaataccgtcgacgtcacggaatatcttcgtaaaggcgtcaacactgttgccgtgcatacctattattacggagtgcttaaccgcgttaccgtaagcggcgatatgcgtacaggcttgtggctggagcttgaagcggacggcaaaaccgcgcttgtttccgacgagagctttttgtgcgcccctcacagcggttatcttaaggcagaagtgacgggatacaatacacagttcaaagaagattacgatttcagttctcccgaaaacggctttatgaaggaaaattattccgcggaaaattggtttcacgcggagcaaagcaagtacgccgattatacgcttgtgcccgcgcccgttcaaaaccttacgtattacgaggaaaagcccgtttccgtccgtcgccgcggcgattcggtcttgttcgatttcggctgcgaacgcgtgggatatcccgagtttacggtcagcggcagaaagggaagtaaagtcacggtcgtggcgggagaagagtttgacgacgacggaaatataaaaaatcctcttcgctgcggctgcgactacggcgatacgcttacgctttcgggcggaaaggacaaatacgaggctttcgattacaaggcgttcaggtacctcgaaattacgacggaaaagggcgcaaacctcgacgaaggaagcgtccgaatgcgggtaagacattatccgtttaaggaattccgtcgttacgagggggcagacaagcgcgcgaaacaggtttgggagctgtgcaaaaacacgcttaagtacggcgttcaagaagtgtatatggattgtcccacgcgcgaaaagggacagtattttcaggacggctggacgatatcggttgcgcactctcttcttacgggcgacactgccatgatgcggaaaatgcttcagaaccaggcggctacttcttttatctgccccgggcttaccgcgcagggtccttgcgcccatatgcaggaaattgccgacgcttcgctgttgtttccgcggattcttgcggattattacggactgagtaaggacgcggatacggtgcggaaattattgccttttgttgacaaaatgcttgattatttccgcggcttttcgcgtaccgacgggcttataggcaatctcgacaagtggaacgtcatggactggccgccgcagttaagggacggatacgactttaggcttgaggaaaatacaatctgcacgggctttcataacgtaataaacgcgtattacatcggtgcgataaaagcgcgcaactattgcgccgccgtcgcgggaaaacccgctttgccggtaaaagaattggaaaaagcttttataaacgcgttttacgaccaagaaagagcgctttttatagacagcgaaaccacgacgcattccgcgcttcattccaacgtttttccgctgtttttcggtatcggtggcgacaagcggttaaggcaaaacacgcttgacctgatacgcgaaaaaaggcttgcctgctgcaacattttcggcagttttcccctccttgcgctgcttaagcggtggaaagaggaggagcttatgaaagagcttattttaagcgacgaggctatgggccgtatgcttaacgaaggcgctaccgcaacgatggaggcgtggggcaaggaccttaagtggaatacggcgctttttcaccttactttttcggcaatgcttattttctttaccgattacgagtttcccgtttattgaataaaaaaacaaaactcagggcgcgggtaaattttataccgcgcttttttcgtactcccgaatttttcaataagcggactttaaaaaaatatcggacaattttttccttaaatatcttgacaacgcggttaagtagatgtataatattttagcaattaaacaacaagactgctaataatcagacaaaaagattgctaaataataattcggaggcatattttaagatgaaacagtttaaaacggaatccaagcgcatactcgatcttatgatcaactccatttacaccaacaaggagatttttctgcgcgagctgatatcaaacgccagcgacgccatagacaagctgcactttatttcgcttacggacggcaatgtagacagtaattttaaaatcgaaatcaaggcggacaaaaaggaacgcacccttaccgtatcggacaacggcatcggaatgactcgggaagagctggagaaaaacctgggtacgattgcggagtcgggtactcttgcttttaaaaacaagtcggaggaaaagactgaccttatcggacagttcggcgtgggattttattcggcgttcatggtggcgaagaaaatagaggtcaaaagccgcgcatacaacgcggatgaggcttacctttggaccagcagcggagcggaaggttacacggtggaaaaagccgaaaaggacaccgtcggcacggaaatcaaactttacttaagggataaggacgaagatttcgattacgacgagtttttacaggaatactatcttaaaaatcttataaggaagtattccgattatatccgctatccgatagtcatggacgtgaccaaatcgcgcgtcaaggaaaatcccgataagaaagaaggggataaggacgaatacgaaacgtataccgaggcggaaacgcttaacagcatggtgccgctttggaagaagaaaaagacggaaatcacttccgagcagtacaacgatttttataagaacaaatttcacgatttttccgaccccgtaaaagtgttccacttcactatagagggtaacgtcaactatacggcgctgctgtttgtgcccgagcatacaccttttgactattatcagaaggattataaaaggggactgcagctttattctagcggcgtgcttatcatggacaaatgcgaggacctgcttcccgattgcttcgggtttgtcaagggtattgtggacagtcccgacttaagccttaatatttcgcgcgaaatgctacaaaagaaccgtcagcttaaggcgattgcaaacgggctggagaaaaagcttgtccaggaaatgaaaaagttcatggaaagcgaccgcgaaacttacgacaaatttttcaaggaattcgggcttagtcttaaattcggcgtgtacaacaatttcggattaaagaaagaggagcttaaagaccttattttgttccattcctccaccgaggacaagcttgtttcgcttaaagaatacgtcggcagaatgaaacaggaccagaaatacatttattacgcttgcggcgacagcgtcgaaaagatttccaagctgccccagaccgaaattcttaaggataagggttacgaaattctttacatgcccgacaacgtggacgaatttgtcgttaaaacgcttatgagttacgaagaaaaagagttccgttcggtgggcgccaaggatttggggcttgaaagtgacgccgaaaaagaggaaataaaatccaaagaagaggaaaacaagccgctttgcgattttattaaagacgcgcttgacggcgccgtcaaagaggtaaggctgtctaagagaatgaagaacaacgcggtttgccttacggcggacggagaagtttcgttggaaatggaaaaagttttcaaagccatgaaaaacgcttcgcccgtgcccgtgacggcggaaaaagtgctggaaatcaatcccgaccataaactttttgcaaaactcaaatcgctgtttgactccgataaggacaagctgaaaaattacgccaaaattctttacgccgaagcgcttatcaccgagggtatggatatcgaaaaacccgacgaattcgtgggagtacttacggacgtgctttccgaataattatacagcggagtttaaccgcctttctcaaaaagggagaggcggtttttttatgcgattttaaatatgaataatttattcgttataaaattatgtgaaaataaatttcatattgtttttaaattaatcgcttgacagtaaaataattatcgttataataattaccgtgataattatttatgtaattttttgttgccgcaaggtataaaataaaggagagcagggcttaaatgacggattttcctgaaaaagtacacgaacttatgcggtcatcgcataggaaaataatgcagattctggtattgccgcttaaaaaatcgggcattactccgccgcagatgatagcgcttaaggctgtcgttaattcggacggcaaagtaaacgtaagcgacgtatgcagggcgcttaagactccgctgtcaaacgcgacgaatatttgcgcgcggctggagtccacgggtatgcttcggcgggagcgtgacgagggcgaccgaaggcgggtggtgcttaccgttaccgataagggcaaggacgcaatcgccaaagcgggcgtagcctatgacaagcttaataaagcgatggacgcggctatggacgaatcgaaaaaaaacgcaattatcgacggcttcagaatgtttgacgactggctggaaaaatatatggactcggagaaatcggctgatgagtgagaaaaaagttaaaataaaatatttttatttaaagtactggtatctgatactgtgtgcgatagcgctgcttgtagttcaggctttgtgcgaccttgaacttccgacgtatatgcagaatatcgtcaacacgcttaccgacatatccataaccgaaaaaacgggagttatattgcggtacggcggagtaatgcttgcatacgccgcggccgttacgctttcgtctgtcggtgtgggatatcttgcgtcggttataggttcgcgcgcgtcaagagatatgcgaagcgctattttcgagaaagtttcttctttttcggcggcggaaatagataaatttaccgtttcgtcgcttatcacgcgcagtaccaacgacattacgcagattcagatgttttccattatgttcatacgaatggtaatttacgcgcccattatggcgacgggcggcatagtcaaagccgttaccttaagccgtaacatgcgctatttgctgtgggtaatcgtcgccgccgtggctttggttttactgacgattatgataatgttgtttgtcgttcagccaaagtttattaagcttcagactttgatagacaaactcaacggcgtcgcgcgcgaggggcttaacggaatgatggtcgttcgggcgttcaacaacgtagagcatgaggaacagcgtttcgacggcgtaaacaaagagcttaccagagtcaacctgtttaccaacagggttatggcgggacttttccccgtcatcaacattgccatgaacggcgtttccgtagcggtggtatggattgcggcgtattttgctttggatgtcaccgacgttgccgccatgatggcgtttatgagttacgcaattcagattgtaatgtcctttatggtgcttaccatggtgtttgtgcttgccccgagggcagccgtttccgcgcgcagagtggcggaagctcttaaccgggatatcagcgtaaaagaccgcgaaaacgccgtcgaagcccgggacattcgcggcgagctggaattcgacaacgtaagctttaaatacgaaggcgccgaggaaaacgtcataagcaacatttcctttaagtgttcgccgggtgaagttaccgcggttatcgggtccaccggcagcggtaaatccacgcttatcaaactcataccgcgcctttacgacgtgacggaaggctgtatccgccttgacggaaaagacataagggattatacgcttgtgtcgctcagggacaacatcggttacgttttacagaaaagtctgctgttttcggggtctatcgaaagcaatatcaaattcgcttcgcccgaggaccccgacggcgacgaaaaaatgattcgcagcgcgaggaccgctcaggcggaggaattcatttccgaaaaagaggatacgtacaaaagcgagattgttcagggcggcggtaacgtttcgggcggacagaaacagcgactcagtattgcgcgcgcgctttacaaggacgcgccggtgctggtgttcgacgacagtttttccgcgctggactttaaaaccgacgccgccttgcgtgccgcgcttaaggaaaacgaaaaagacaaaaacgtaattattgtggctcagcgtgttggaaccataatgaacgccgaccgcataatcgtacttgacgagggtaaaatcgcgggaatgggcacgcataaagaacttttgaaatcctgtcccgtttacgcggatatcgcgcgctctcagttatcggaggaggaacttgcaaaatgagtgaagacagaaattcggtccgtcccccgaggggacccatgggcggcggcagacacgctgccatgcgcccgggcgaaaaagccaaggattttaagggcacgcttgtaaaattactgaagtatatgcgcgtttctttgcctgcgataatactttcgcttttgtttgcggctgcctcggtcgtgcttacgcttaatattcccaaacttttgggcagcagcaccgataaactgatcgaaggctttatgcagcggcagatttacgacgaaacggacgccatggttcgcgacaatcagaatattccttacgattctatttcagcgctggcttacgcggagggaatttccgatttcaatcagctgtttgacgttctggaagaaaaaggcgtgatttccgcttcccggaaagcagaatacgaaaaaagtctgggcgactacgcggaaggcgtgctttccatgagcctttacgagcggccctcaatcgacgttgacgccatcataaaactgcttaccgtcatcacggtgcttattttcgtttcggcggcggtgtcttacgcgcagtcctttattcttgcgggcgtcgctcaaaggacttcttacaggctgaggcgcgacatcgacgtgaaaatcaacaaactgccgcttaaatattacgacggcacgacaaacggaaacgtgctttcctatcttaccaacgacgtggactcgatttccaccacgcttaaccaaagcctttcccaactgataagcagtattaccaccatcgtgggcgtgcttgtaatgatgataagcataagctggattatggcgggagtcgcggtgctgattgtgcccgtttcgcttgcgcttatcgcaacggtagtcaaattcagccagaagtatttccgacgccagcaagccgcacttgccgcggtaaacgggcatatagaggaaatgtacgcgggcaacaaagtcattcagctttataaccgtaaagacgaatccgttgccgaatttgccgtttacaacaaggagcttaccgcaacggcgcagaaatcgcagtttctttccggacttatgcacccgataatgaattttgtgggcaatataggctacgttctggcgtgcgttatcggcggtgtgcttactgcaagcggcaagataaccgtaggtgacattcaggcatttgttacttatataagacagttcaatcaacccataggacaggtggcaaacatcgccaacacgcttcagtccaccgttgccgcggcagagcgcgttttcggtttcctggaggcggaggacgaaaaggaaacgggcgaagcggttcctcagtcggttaaaggcgacgtggaattttgtaacgttcatttcggttacgaccccgataaaatcataattaaagacttttcgtgctcggttaaagccggacagaaaatagcgattgtaggccccacgggcgcgggcaaaaccaccgtagtaaaacttcttatgcggtattacgacctgaacagcggtaaaatcctgctggacggacgggatatcgcggattacaagcgttcggcattgagggaagagttcggcatggtgcttcaggacacgtggctttacagcggtacggttatggataacattcgttacggccgccttgacgccaccgatgaggaggttatcgccgccgcaaaacttgccagcgcggaccactttatccgcacgcttgacggcggttacgactttgtcatcaacgaggaggcggacaatatctctcagggacaaaaacagcttcttaccatcgcccgcgcacttttatctgaccctaaagtgcttattctggacgaggcgacaagttccgtcgatacccgcaccgaacagcttattcaaaacgccatgattactcttatgaaaggacgtaccagctttataatcgcacaccgcctttccaccataacaaacgcggataagattctggttatgcgcgacggcgacatagtggagcagggtacgcatgcggagcttatggaaaagaaaggattttacgagcagctttattccagtcagttcgagcactaagcttattacaaaaacccgcttttacgaaagcgggtttttctctgcttaaggagtaaaaatttttttagcgaaatgtcgcctttttttgttgcaatatttctctcgttgtgatattatattatggctgattttgtggcggcgtagctcagctggccagagcattcggttcatacccgacaggtcgatagttcgaatctattcgccgccaccaaattgtatacctattgcaatccagacccatgtggttgggcggcaataggttttttttattgcaagcttcgtgatacagtaacaattaccgataaaggcagattttttcacgctgaaaccacgttaaaaagagaggatttttttcctctctttttttgttgccgtactgcggacgaaaattgcaatcggatttaaatcaaaaaatttttttattgcgtattgccgcttgataaaaaagagagcggtttagtttgacgtaaaataattttcaatcacacttaagcggatttattggattggctttaatggagttttttattttttgtttattagcacaaaaaatgcgcgcaatatttttgcgtacaatgttttttaaaatcaagcatttttgtcaactgatgccttttaaaaattcacagttgatttttaaaaggcacggcatattgcgccgtcagcatttttctgtattcgcccggagtcaaaagcattacgtttttgaattgttcggtaaaatatgactgcgaggagtaaccgcattcgcatgagatttccagcaaggatttctgcgtagtggcaagcaggcgttttgcttttttcaaacgttcgttcattataaattgctgcggggtgattcccgtcgcggcggaaaaaacgctgtgaaaataattaggggagtatcccgtcaatgacgcaaggtccttaagtttaatcggttcctcacaatgattttttatatattccacggctttttttaccgactccagacgtgccggagcgtaaaaccccgcattagtttcgtgtttaaggtcggcgcaattggaaagcaggtaaaacagttccagaagtttggcgttggtatagtagcaataggggtcgacgccgttgttggtaaggtgcagtataagcgactccattatgttgcggcaattggtcccgtccgtcagcgggaaaaaatcgggtaaacttttcaaaaccttaaaatattctccgccgcggtcaatcgcaatgtgaaaatactggcatttaaacggacgaagactgtaacttttctgcccgggtttccgaagtatgaaagtcttgggggacagacagtattttttgtcgtttatcacggtgatgccaccgtcggaaacaatgtattcgaattcaaacatttccactttgcggcaacgagttctggattttttgtttctcttaaacaaatccgttaaatcgaaaatgccgaaagaatctatttttccgataaacatttatattctcccttgtctttatttcccgcgttttgtgccgatacttgcgattatattaatattataatataaatagcccgttaaaatcaataaaatcgtaagatattgataatttttatgtagatttgtgtagattgccgaaatccaatcgattataataaaagtcaagttttaaagcaaggagaaacgcctgatgaaaattaccgacgtcaagactttcgttgtggactgtttccgcacgaattgggtattcgtcaaggtttataccgacgaaggaatagacggagtgggcgagggtacgctggaatacaaggaaaaggctcttgtgggcgcaatagagcatattgccgattacctcaaaggcaaggacccgcgccttatagaaaaacattttcacgatatttaccgcgacgcatattggcggggcggcgccgtgcttatgagcgcgctttccgccgtggaaacggctttatgggatattctcggtaaatctttgggtgtgcccgtttatcagcttttgggcggcaaagcaaacgacgattgcagaatatacgtcaacggttggtttagcggggcaaaaactcccgaagagtttgccgcaaaagcaaaagaagttgtaaaaagaggaattacggcgcttaagtgggaccctttcggcaaggcgtacaggcagttgtccgttaaggaattggatacggcgattcgttgtattgcttcggtgcgcgaagcggtaggcgacgacgcggatattcttatcgaggctcacggcaggttcgacgtgcccacggctatacgcgtggcaaacgaaatcgcaccttttaagcccatgtttttggaagagcccgttccgcccgacaatctcgaggcgcttaaggccgtgcgcgacaagtcgcccgttccgattgcggcgggcgaaagactttacggccgttgcggatacagggaaatgttcgctttgcgtgcggcggattacattcagccggacgtttcgcacgcgggcggcataatggaaaccaaaaaaatagcggcaatagcggaaagtatgcagattccttttgcaccgcacaatccgtcgggacccgtcgcaaacgcggctacgcttcagcttgcggcgtgctgtcccaacttctgtatgctggaaattatgtacagcgacgtggattacaggtcggatataaccgatgaagcgctcgagtgcatcgacggccgcataaaaatcggcaataaaccgggactgggcatagagcttaacgagaaggaatgtcttaaacatccttacgttcgccatgagttaagacattatacgggcgcgcttacggacatacggcccgccaacaagaaattttatttctgaatcttttaaaaaagaaatatatttttaaggagcaaaataatggttgaattcgaggtaaaagggcatgaacacagtttactgcccgaggggaaaaagtggaaattggttttcagcgacgagtttgacggagaaaagcttgacgaaagcaagtggagttaccgccttgattactggggagagcgtttcgcggcttataccgacaagggcgtttatctcgacggcaaaagcaatgcggtttttaaacccgtattcgaggacggctgcttaaggtcgtcgcagctacagacaggcggaaacagtttcgatcaattgaatttcgaagcaattcagaatcgcattaataaaaagcacggcgacaatccatggaaagacgaaatagagatgtggcccttaaagccgctcagtaaacccaagttcatgcacagattcggttattacgaggcgcgcgttaaattccagaagctgaatttctggtggagtgctttctggctgcagtcgccctccataggcgcggcttacaatcccgctttatgcggagtggagaacgacgtcatagaaaatttcggcaacggagagcttacttcgggcaatatttacggcggctacggcaaacagtttcaggaggtggcgcgcgtaaggtatcctttcgtaaacgacggggaatatcatcgcgtgggcatggagtgggctaaagacggttacgttttctacctcgacggcaaggaaacggcgcgtacttcttctcccgtttcggaggtggaacagtttattttaatttcgaccgaagtgcagggctatcgcaggaatgcggctaccgccgagtgcaccgaagaagtgatggccgaccgcttttacgtcgattacgtgcgcgtgttcgataatgaggattagttttttcggtttcacgattttggaataataaagcgataaattttttgcgggagcgattatggaaagaaaaacggcgcttgttacgggcgcttgcgtaaatacgggcgttgccattgtggaaaagtttgcgtcggaagggtataacgtcgtctttaccgggcgcagtaaggaaaaggtaagcgcggcgcaagccgattacagaaaaaaatttcctcttgtgaaaatagacggttatgtgctggattcggttgacgactgcggtaacgttctcgaaaaagaggtggacgattttttcgctatgctggacgaaaaaggcgtttttgtcgaatgcgtagtgcttaacgcggcggaccagggactgaatcagaagattttccaaaacccgcttgccgattttatgcgcgtcatcaacaccaacgtggtttggaactattgtatcgcggaacacgccgccaaacgcatggtatcgcgcggaggcgggaatattgtgtttataaactcgaacaccgcttaccgcgccattcccgaccgtatcgcttacgaggcgtccaaaggcggacagctgggtatgatgcgcgggctggcgtttgacctgggtaaatacaacattcgcgtcaacgccgtgcttcccggcatgattcgcaccgacaggtgggagaaaaatcccgagtggtacaaaaccgttccgtccgctttcactcctttgggcgatgtggcggaaggaaaggatattgctgacgcagtctggtattttgccgagcacgcacgaaatactacgggggcggaacttattatagacggcggaaacagcatacagctttatcccgttattccccagaaggattaagtcatcggtgcccgtatttacttaaaaccaacttaaatgttaaagacggcggtatgcgtcctgcagccgctgtcattttttttaataaagaggagggaagcgcagttttttaatttcgctattgcgccgctaaacgattgtaattcagttaagcgtaaatcaaaaaaaattacagccgtaacgtgatttttaagcttgtgtttttccgttttttttcgtaaagcgagaattttatgataaaccttatcaaaatttatttaaaaacgcttgtcaatatcgtagaaacgtgctataataccccagaagtcggcattccgaggctttaagcgcgcccgtcaattgccgatttttgtatcgaataagtatggctccatggtcaagcggttaagacatcgccctttcacggcggtaacgcgggttcgattcccgctggagtcaccaaaacgaagcaattcgaacttttttcgggttgcttcttctttttgtcttttttcggggtcgagcggctcgtttgtggttttcataatgattaaaaaccgttcgccgtcgaatatgacttctttaataaacacatcaaacagccgtttcatattgtcaaggctttcggttttgtcagcgcattttacaatctcggtatagtttttcaagaaagaaatcacgcgcgcttcttttaacggaagtatcgtttttgcttgctcgtccgctatctgtgcctccaaagcttgttgcgtgttgctcaactcaatcatttttgcctgcgtatgttgattgaatattccttggcaaatcgcattcgtaatgttggcaagttgtttgtctatatcggctttttgacgattgagtatttttcagctcttgcgattattttatgtacggaataacgcaccaaaacatcccaaaattgcggcaattttcaatgcctaagcaggataaggagaaagccaaaatgtggtattttgcctttctcgatgccgctcgcttcgctcgctcggaacaagcgggaaactcgcttttcgttattcctcttcgttgaacatcttaccaaaaatatccatttttgaaattgataatggttgaagaaagtgaaaattcttattccaacttacaaccaagcattttcgacaaagtttgtttaggattattcttttttacaaaaccaccccaatcggagattacaacggaacatttgtcatcatcaagattacataatatgctcaattctaatcgagcacgagaagcccccacgtagaaaagcatattgttatcgcgcaatacagaataatcaacatctaccaatataaccatgtcggcttcaagacctttgaattttctacacgtggtaaatttaatttctttcccattgtataggtaattgcctgaagcggacaaattagcttgatatgtactcttataccaagcattataccataacgtaaaaaataatgcgatgatattgaaagacaataaagtacacaaaggtactcttgggtaatgcaatggaacatactgtcgcacaacagctaattagcgcacaacggaaagatgcggcggcgaaatatgggcgggcacggaaagcccgcgcgtgccgcccgaatttcgccgccgctgtcgttgctacggatgtaaaatttgttgggtgatcggttaatttgtagtctatttcggttcgtcggttggtcggtcggttgcgggtgcttgtaggcgcccgagcgcgaagcgcgagggtggcggcgcggcgcagccgcgtacgccagctttgccgcctctcgtttatacaagcacccgcattggtgccaaacggctgtttaggggtgatttatatacatttttagatgttttctacctatattatgccgactatgtgaatacgcctctcgtttatacaagcacccgaattggtgccaaacggctgtttaggggtgatttatatacgtttttagatgttttctacctaattatgccgactatttgaatacgtatctcgatgtactcaaaaaagaagtgcaaacggggttggtcgtttgtttaagcgatgaacttgtgccgtacagtcgcacggcgtggtactgtcccgtatgggctatataaagggaaaaagccgtgaatttcccgtcggataaaaacagttcggatttgtaagaaagcgcgctaatcggagtgtttattctgggaggcgaggcggatttcttcggaaggggtgcgaccgaaatattttttgtaggcacgggcaaagtaggaggcgttgacgaaaccggttgccgccgcgatgtcggagacggacatgtcgctcgaatgcaaatggtgttgtgcttcttcgagacgtattttgttgagatattccataaccgtcatgccgtatgtttttttgaagatataggcaagataggttttgctcacgtaaaagtggtcgctgattttgtcgagcgaaaggggaaacgtgtaatagcttttgagatattgcaccacagctacggggattcgcatacttttgttgagcgaaacgggcggcaacggggaacgagacagttcggttttacgcaaaatgtctattataagcatgtgaaaggcgtactgcaatttcgcttcgtagtacggctttttttgctgtatttcgcttgcgaacatatctttcaacgccgtgaacgcggaatgatactccgaaaaatcgtaaatacggatattattttgcggcatatcgtcatcggaatagaaagcattatgcttattcggctgtttgtcgtcgaacacggacgcattgaaacaaaagtaaagatgctctatagggtcgttttcggacgaactttcgatatgaggcgtatacggatttatgatgagcaagtcgccttttttcatggggacagtgacgtcgccttgcgtgtattcgcccgtgccggagaggatatacgaaatcttaccgtaggaaagagtttgcaccggatttttgtacacgcgttcgaaacgaaggtgaaagtacatcatcagtttgaaagtcggttcgctgctatttccgccgaaagtgtgctgtataatctgcataccgaaagtatatcgcaaaaacgaaaggaagtcaagtaaaaaagtaatattaggacaattaaacgtaatataggacttgcgtgggggggggaacttagtgatacaattaataaagcaataaacttgtacgtttgcgatgaaaaaccaaagcggcttgcggctgacgcaagctgctgacgcaaaaggagcgaaagggaaaatatgacaaaaaagaaaatcgcggcaatactgcttgggttcgtacttgcgacggtaatgtgcggttgcaacgggaatacgccgagcgcactggacaacaaaacggttttgcttgaaatgagcgtcggcgaagaggtatatatcaaatccgacgacgaagccgcttggaagtccgcgacggacgtcgttaccgtggagacaacgggcagaggatacgtgcgcgtgtatgccgttaccgacggcgcaagcatcgtgacaaacggcacgaaaaaatatatgatttcggtttcgtccctctcgtcaacaggcggatttacaacgaaaaagaattttatcgaaatagacctaagcgaagacgaatatgcggcaatcgaagtcgagggcagacagccgagcgactttacatacacggcggcgaatcgcgacgtggtgtcggtagacgaaaacggcaaagtacgcggcaggggaaagggcgtaacatatgttacggtgtcggaaaaaaccacgaatttaagccgcagagtgacggtcaccgtatgcggcgaacgcaataaattgtacgccaaaagttacgacgcgggttggcaccctaccgccgagcacgtgcaaggcgcagaaacggacagatacggcgactacttttactattcgtttgcggataggcttatcaagcaatcggcggacggcgaagtggtcggcacggtaacgggaataacggggcacatgggcgatgcggcgtacaatagggcagatgacaaactgtatgtaagctacacacgaaaggacggcggcgacaagctgtgctatatgctcatattcgactgcgagaaaatcgacaaactcaatatgaaattcgaggacgtgtgtacttgcgtatacgtgggcgcgcctatactcgagcttgcaaaagaaaacggctatgatgcggaaggcaacgcgctttcggacgagtggctttctctttcgggcaaatacggcgtaaacaacagtatagactcttgtacgttcggaccgaagttcggtgtaaatgacggcaaaacgtatcttaccatgggactcggcgcacccggacagagcgaaaaagtttccgtgggcggcgtggaaaagtcagccgccgacagagtagacaacgactatcaagttatcgtgcagttcgatacatccgattgggagaattacgccgttccgtttgcccaaatatccgacgcgacgggtcccgaaaactttgacggcatatactttttctactacggcgcgcacgattacagcgcgcagaatctgtgctacgatcggtacacgaatacgtatattatgtcgacctatggattgctcgaggcacgtcaaagcgcgggctttaagaacaactgcgtgtattttatagacgctaccgaggcggaagagaaatcgctaacggggaacggcgtcgaaacggggcttgtgctcggcgcaaagtacggcatagcggacgggaaaggcgcagtgggctacgcgttcaacgagttgcaagtatcgccgagcgtggggattgtatccatgcacgacggtaaactgtacatcgcttcgagcgaacgcaaagccgattggtcggaaaattgggcgggacttacgctctacgagatacaacaactaagcgagtcaaatattgccataaataaagtggcgtaaaaataaggagaaaatgagatgagtgtgaaaacgagtaggaaatgcgcatttgctgcaatatttacggcgctcgtgcttgcggcgtcggtgttcggcatgacggcgcgcgccgaagaaaagacgcccgatgcccaagtcaacgtgggcgggatagtattcgacacgaatgactttaactacaccgaagactacgccgcattcgtcgatacggcgcgagtaatagacaacgaatcggtactgtacgaccccgacagacgcgagcaaaagacccgtctcgacgacggcaaatcgggactttatctcgagacgaagaaaacgggcgacgaagccgacggatcgagttttacgtttgccaacaagatgaagggaaacttcgatatagatttccgcgtattcagcaaggaaacctatgtgggcagtacgaaggtcaaagctatggagaaagacggcaaaaataatttcacttcgctcgaccccaatttcaatccgtatgcggacgtgcgcgtgcttacgtatacatttacgtcggtgaaagacacgtccaagtcgtttaccgtggttttcgaaagccacggctcatacgaaaccatgtcgcccacggcgcacgtgtatatcgagggtgagccggtgctcggagacgggagacggggatacggcatagattattctttcgacggcaaacaaggcgacggatatgcgaattttaccgaactcaataatacttcgttcgtcaacgtggcgttcaaaaacagcgccgaatcgttctccaaccgtttgatattcgaccccgaaacaatgcgcgtttattccgacaaatatgctttggataaatgcgataacaacggtatgcaatttcgctcgtatgaaaccggttatgacgattaccgtctgttgattcgcgatcttgccaccaataaggataacaaaaatcaagtagtatatcgcgcatggatgaaatcgcttcaaccggcggatttcgaagacggctacaccgtgacggtgacaatggaagatattaccgccgacgaaaccgtcttaaaagccgcaacaagcgatgctacagaagcgcaagatcccgtcgtatacagaaacgatgtgaaagtcaagaaaacgggcgacccgtacaaccgcaccggtaaaatgataatctactcggtcaacggacagagcatgcgcgtagacgagggatttaacgcgcctacggaaaaaacatttacttttccgaaaaatgatgcaacgccgtattccgaaaagacagttaagggtttgcaattcacggcgaaagaaaagaatatcaacgccgaaggcaacagtttcgaacttaatcccgccgagtttgtgcaagacaacgtattcaccatgatgattgcgcccgaagccacgaaatacgggtcgacgacggcaacagaacatgcctcgcattatataaatacggagaataacgatgtaaatggcggtttaggagataagagttacgaatacgatccgtacagcgatgtgcgcgaaatcggcgtcacgttccgctccaaatcggatgcttctaaggcgtttaccgtatatatatcgtcgaaatttacgttccgcaataaggttggcgtgcgtgtctacgtggaaggcgaagaatatcgcacgacgagcggcatgaaaggctacggcggtgatatggttacaaatgctgccggttctttcggcaacggtcataacggcagtgaagactcatataataacgccacgggaaacccgtatacgatggtacaattcgatgccgctaatgtattggtaaagacatttggatacggtagcgaaactgtccgtgacttgacgaaaaagggcaagtggaatgcgacttgggaacatagtcaagcgcttgcggcgagcgatttctcgagcggatataccgtaaccgtcagcgtggagagaatgaatcgcgcggaaaatctcggcttgaaaaacgtatatatgtacaataaaacgacgcgtgaaacgtgggatacgggatacacggcggcaagcgacggcattcacgttttgagtgaaagttatgaccgtccttgcaagataaacgtattgcgctatgcggggaatacgactattgcaaataccgagatatccaattacggagcgaaaaccaaatacgacggcggcagagaatatctagatatcggcgatacgtttagctacgcatacgacggcacggcaatcgagcttcccgtaaagctcggcaacttgggcgcgggtaaagctatcgatacggtaaactacaaacacgcaagcgacgaaaatacagccgcgctcaccgttacgggcggcacggcgcagttcaaccctactaagagcggcgtatatacgtttagcagcggcgcgctgacggcgaaactgaccgtgactgccgcgacgccgctttcggcaaggcttaaatcgggtgtgcccgaaagcatgcgattgccgcacggaggaaagctgccggcggtgtcgcaagacgatatagagacggcgggcagtttctcccgcactacggctattacgtttaagaagaaacttgcgaccgaccccgacacgtcttatatcgatactgtgtatacggcgggtgcagtcgcggatgaggactacatttacaagattatttacaccgttaccgatacggacggacagacggctacggtagagcgtcaagtcgtggcggcggtgacggataacgaagctcccgcgatagagtggaagaataagcccgaatatttggaagcggggtctgtttggacaacggccgtgctcaccgtgacggacaatatagaaacggggcttgtagcttccgtggtttcggcgtcgttcaagccggcgggcgaggacgcggaaaaccttacgtatgatgcggggcttacgatccccgataaggacggtgttcttacgattgtcgtatcggcgtccgacaccgtacccaacaccgcgacggaaacgtacacgatagacgtatataccggcgtcgctccgactatcgcgctcaaagagggcgtggaaagctccgtaatcgccaccgagggcgacgactttactgtggcgattaccgacgtggttgtttcgtcgaattgggaaaataccgtaacgtttgccgtttggttgaacggcggcgcgtacacctatgaagacggacaaacgctgaccgtcggcttgtacgaaatcacttataccgtaacggacaaattcggcacatccgcctccgtgacaaggcagatcgcggcagttgccaaagacgttaccgcgcccgtaatcgcttggaagaataagcccgactatatactcggcggcacgacgtttaccttggacgatattacggcgcaagacgatgtggacgacagcgtcgccgttgtgttcgtgtccgcttcgtttacgcccgctggcggcgatgcgcgtgcgcttacgttcgataacggcattgtccttccgaccgaggacggcgtgctcacgatagccgtgtccgctaccgacagcacgggcaacaaggcggacaaagagtttaccgtggcgatactgaaagaacagctctccgacaatgacgacgacgacaacaacggcggcgaaaaggccgataccggttgcggatcgagcgtggacgcggttttgtcggcggcgatcgcactgttgctcggtgcggcgactgcgttgttcgcaaaaaggggctaggcaaacaaatagaaaaataacttaaagcgagaaataaaattggttaccgaaactaagacgcaaacacggcagcgcggcatgacgaaaaagacgaaagacagaattttcatcacgctcatgcttgcgttgcccattgcgcaattccttgtattttacgtctatgtgaatttagactccatactgttggcgttccgtatgcaaaattccgacgggacacttgtttggacgcttgcaaacttcaaacagatgtttaccgaattcggggcacccggctcggagatactcggcgcgttgaaaaacacgttgattttctttgcaataaatctgcttgtaattttgccgctgtcgttcttactttgctactttttatataagcgcgttgcgggttacaaagcttttcgtgccatattctatttgccgaatatcatttccgcatcggtactcgtcatactttacaagtacgtaatagaaataaatgggcccttggcgtacgttgtcgacaatttgttcggtatagagatacccaagtttttggagcttacgcccgacgcgcttgttgtcatattaatttatacggtatttttcggtttgggcggaaatctcgtgctcttttcgggcgcgatgaataatatcgattcgggggtcgtggatgcggcgcgcgtggacggcgtgaatatgtggcaggaaatccgccatgtggtgatcccgatgatttggccgacgctttccaccgttattctgtttgcttttatcggtatattcaacgcaagcggaccgattctgttgtttaccaggggcgactataatacgtacacgatcgcatactggatatacgacagagttacgttttcgggcgagctgtactatcccgccgcggtcggtttcttctttacgatgatcggcatgccgatcgccatgtttatgtggtggcttatgacgcgtaaagacaacgcgatgatgtaaaggagtagggtatgcgttcattcaaacaagcatttcgaagaaaaagcaaaagtcaaacagtagttttcgcaatcgttttcgcattgttcgtactgtatgcggcggggcttttgtacccctttttatacgcgctggtaatcgcgctcaaagagaacggcagagcgtttatgcgcgagccggtcaagctgacgtttcctctgtatttttccaatttcgccgaagcgttcaagtcgctcaaactctacgataccggtttttttggcatgaccgtaaattcgctgtggtatgccgccggctctacgctgagtatgctcaccgcgtgcacgtgcgtggcgtacgtcatggcaa

SEQ ID NO: 47 - DNA, 11011 bp, Unknown
  16S sequences of unknown bacteria
tatccagagaaacccgcttttcgccggtctgaccgccggtgagaccgccgacgccgtcagacgcatgaacggcagggaagaaacatacgagcgcggtaacgtcatcttccccgccggtgagaagaacacccacgccggaatcatcctctccggcggcgtcaacctcgagatgagcgacatatggggcggaagaaccatcatcggtcactccggacccggcgacatcttcggcgaagcgtacgcctgctgcaccgaagagcggatgctcgtcgacgcggtcgcgggcgaagaaaccgaagtcctgctaatcgacataggtccgatcgtaaacgcgaccggcaccgccgacctcctgtctcagcaactcgtccgcaacctcctcaaactcacctcaatgaagtgtatcgaactctcgaaacgaatgaactacacaaaacccagaacgataaggctccgcgtcctcgcctacctctccgaacaggcgatgaaaaacaagagccgcgactttgtcgtcccattcaacagacaagaactcgcagactacctcgggctcgaccgcagcagcctctcctcggaactgaccgaaatgagccgcgacggactcatcatctgccacaaaaaccatttcaaactcctcggcgacagagtcgactacctcccgacgcagccgcccacaagaagaaaaaaaacaaagcccgacacagatgaaaataccgaagacaccgcagaataaccatcagcgccgcggacacgtccgcactccacgccgtccgcagcgtcgcctatacacgcaaaatgccatttataatcccggattttttatcactgattcctcttataaaccaacgcatttccattcctcccgacccgtaccaccgccccaagcgtctcaagcgtcctaagcgaatttcccgccgtatacctcgtcatcctcgccgcccccgcgaaatccgccgtgccgaaatcctcgggaagggtatccggaatcagcttcaaccaatcctccggagtctcgaaacgctcgattcctccgagcgccgtcggaatcctctccgctcgctccgcgccgaaacgcttgcggtcgcggctcctgccatttaacagcctgtactcctcggtgtccacgaaaagcaccgcgaaatccacattctcaagcggcatcaccggcctcagcgcgtacagctccgggagcaggtcatacaccgtccccctcttcggagacttccggcgggacgttatctcacccgtctccgggtctatccagctgacatacttctcgcgcgccaccggatacaccaccgtcacacgatagccgggcgcgaacgccctcagctttccgcgcagagagcggaaactcctcgtctgtatctcaatgacacgcccgtcacggcagatatccgccacgtacctgccgatcctcacctcccggaacgccgggtccggctcgaaatacgccttcaccaccgcgtgcagcgtcctctcgccgagtgttccgatcagcggggaaccctccgcgccgcccgaatccctgccgtcgatcagcgcccgccgcgatatctcacaaaacctctccgtgtcctccggagtaacgccggacagcgaagcctttcccgacaactcagccgacatccgtactatccctcgtctcgccgcgcctgtacgcctccggggaaacgccgcggtgattcttgaatatccggctgaaataatgcgggtcgtcgtacccgaccgtcatcgcgatctccttcagcggcaggtcggagcgcgaaagcaggtcgcacgcgttcctcacgcgcagctcaattatgtaattccgcggcgtcgagcccgtgctcttcttgaacagctctatatactgcgaaacgctcaggtgctcgatctcggcaagcagctcgttcgacagcggacgtttgaagttctcgtgtatataccttatcgacgcgaaaacgcggtctatcgactcaggtcggtcggtctgcggtctgtcgagcgcgcggcggatcgctatcagtatctccgtgagcttcacccccgcggacagctccgaatagccgtcccccatgatgaaatcctcgaccagctgcatgaacagcatggatatcgtctcgtcaatcccgatcctgaacacgccggacatcccgaagccgagacgcgacaaaagcgccgccgcgctgtagcccgaaaaatgcgcccaatggtactgtatgtccgccgtgctcgtcttctcgtagcgatactcccgctccggcgggaagatcacggcgtcgcccgcctgcacgtcgtattcctttccgtcgacaagcgccgtcatcctgccgctcgtcaggtacatcagatagaaatcgtgccgcccgtttatctcatgcgtacggaaccagaacggaaggtcgaccctgcccgtgcagttcactacgagctgcctgtcgtccacccggtaattattcgcgacgctgtgatatatcttcggctccgcctgtgtcccgccgcagcccaccggaatacccgcgggcttctcgctcgcgctgaccctcggcgccggacgcggaacgtcatgcacacagccgtcgggaccggtcatctgatcatccggaacatccgccggttcctttcgcttcgacttgtcataaaagctgaccgaatgcgacgttttgtgactgccgtcattattgtaaatgaaatgtgtcggtatttcgtccacctactcgctaaaaaagtgtattgatttttcccatgttatattgtataatatttatcggaagatgtcaagacacaaagcgtaaaatttcgcggagtcctgatattttccgaaagaaagacgaagaaaagaatcgaaaagaaaagaaactccgggagggcgggacgtgcaggcgttccgccctcgccatttttccgtttcacttgacaaagcgcataatttgatgtataattgaattaacgaataacaaaggagacgtatcatgttcactctcgaaaaagcgccggaccaccccttccggattctcaatctcaccgacccgcagctctccgaggaggactggaacagctggaaagcccacctcctgcgcggaacgatcaaccggctcgtgcggagcgtcaaaccggacctcatcacaatcaccggagatatctcttacggcgggcattacgacgcttacagaaaattccgcgattttatcgacggctacggcataaaatgggcgccggtcttcggcaatcacgacaatcaggagggggcggaaacatcctcggctcaggcggacatccttctcgaggcgaaaaacattctcttcgagaagaacgcccccgcgctcgggtgcggcaactacgtcatcagaatcaccgaaaacggggaacctgtctacgcgctcttcatgctcgacacgcacgaccgggacgacttcaccgaaccggacggcaaaatttcccgccgctgggcgcacctgaacgacgcgcagctcgactggtacgagaagacggcgaaggaaatcggcacaaagcacgccattcttatgcacattccgttcaagacgttcgagaccactttcgacgaggcgtggaacggcaaattcgacccgaaggacgtgaagagccgggaagacagccgcagccccaggtactggaacgaagggttcaaggacttctgcggagtgaaatacgagggcatcgggtcatatccggtcgatatgggcgaattcgacaggatacgcgaggtcggactctgcgacctcgtcctcgtcgggcacgaccatataaacgacctcatgatgaagaaagacggcgtgaggctcgtctactcgctcaaaaccggcgccggatgctactgggacagccggctgaacggcggaaccgtcattcgggtctgccggaacggcagccacgtccggcacctcgatatcgacccgcgcgaattcgccaccgaaagcgagctctcatgaggatacttcacacttccgactggcacctcgggatacccgaccggaccggcgaggtcatggaagatcagaaattcttccttgaacagctctataatataattaatggagaaaagatcgacgccgtcatcgtcgccggggacgtctacgactcggcgggggtcggcgcggacgccgtcggggtctggaacgaggcggcgacaaaaatctgtctcgggcttcacgcgaaaatgcttgtcatctcgggaaaccacgactccggggcgaggctcgcggtctgccgggaactgctgtcggcgtcggggctgtacatttcggggcggcttgaaaaggatatcttgccggtaagattcacggacgcggacgtctggctcgtgccgttcttctcgcgcgacgaaatacccgcgttatggcaggacgaaaagccgaaaagcgacgaggacgcaatgcgcgtcgtcacacgtaagatactcgaaaaggcggacaggaacaggttcaacatcattgtctcgcacgccttcgtcgtcggctcggagctctccgagtctgacagggcggctcaggtcgggctcgctcaggcgattcccgcggacgtctatgacggcttcgactacgccgcgctcgggcacatacacaagccgcagagcatgaccggaaacgtcgtctactccggctctcctgtgaaatactcgttcggaaatgaggaaaagcagacgaaatcggtcgtcatcctcgacacgtcaaccggcgagaaaaagctcgtgccgttaaagcagctccacgagcggctgacaatctcggggacttacgacgaggtaatgtcgcgggacgacctttctgacaaatacctgcgcctcaccgtgaccgacagatacgccgggctcgagctgctctccgaggcgcgcgaaaggttcccgttcctgcgcgaactttacggcatgagcgttcaaccgggcggggaaatgagcgcgatctcgccggaagaactcgacaaactcgacgagaccgacattcttctccggttcatggaggagcagtacggcgaaaaaccggacgaggagcagatttcgctcttccgtgaagtcatgaaatcggaggaaacagaatgagaccggtatcgatcagatttcagggcttcggtccatatgtcacggagcagttcatcgacttcgcgccgctttccgccagagggattttcctcatctgcggcgagaccggagccgggaaaaccaccatactcgacgcgatatgctacgcgctgtacggacgctcgagcggcggggcgagaggagagctcgacgcgatgcggtgcgagttctgccgaccggaggatccgactgttgtcgaatacatcttcgacctcggggagaagagatatcgcttcacaagagaaattcgtcagggcaggcgcgggagtatcgtcgagcggcacgactgcgccgttttcacagacggagtcttcgcgccgctcatcgagaacccgaagaagaccaccgtctcgaagaaagccgaagagatactcgggctgagttacgagcagttccggcaggtcgtgatacttccgcaggggcagttcgagaaactgctcgtctcggactcggaggagaaggaaaagattctctcgaccctgttcggaaccggaagatgggcatacgccgccgacgagataagacggcgggtgaaagaaaaggacgacgcgctgaagagcgaatacagcgcgattctcggcacgctcacggcgttctcctgcgggacggtcgacgagctcggagaaaagaccgcggctatggctgaacgtgaaaaagaactcgaagcacgcgccggaaaatgtgcgaaggagcttgaaaacgcggcgggagacctcgaaaaggctctcggtgaaaacgctgatttcgcggagcttgaaagacggaaaaaggctctcgcggggcttgaagcgcggataaccggaatgcaagccgaaaaagccgcgctctcccgcgccgacgccgccgagagggtcagaccgctgtacgacgaatacaagcgtttttccgacgagaaaaagaatgccggtgaaacgcttgacagcgcgaaatccgctcatgagcgcgttctctccgacgccgccgctttagacgcggaaaagaaaaaaatctccgacagtgaggagacgatgcgccgggtcggcgagacgcttgtcaggttccgcgacgcgcgggcggtatacgccggattctcggacagacagaatgagctcgccgcggcggaaaaagccgtccttgaaagcgggaaaaacctgaaagacgcggaagacgcgctgaagctcgccggggaggattggcgaaaaaaatgcgcggcgagggacgagacgataaccgccctgcaacgcgcgaaccacatatacaaccgcacggcggcgggaaggctcgccggagaactgagggagggcgaaccctgcccggtctgcggaagcatccatcacccgtcgcccgccgttctcgatggcgacgagaagataaccgagaaagagctcgagaccctgaaccgcgcgctcgacaaagcggctctcgcggtcacgaaagccgatcaggcgcgggtcgacgccgaggagacgaagaaaaaggctcttgacgccgacacgtccgcgaagacagtcctcgcggcggcgaaaacggctctcgaatccgcgcgcgccgggctttttccggacattccggacacgagggcgcttgaagggaagataaagaaatacgagacctcaattacgaactttgaggcggcgaaggagaaagtctcgatcagggaaaagtcagtcacgtcagacctcgcgaaagcgtccgccaacctcgacgcggcggtaaaacgcctcgccgacgcggaaaaggcggctgacggcgcgctctcaaaacttaatgaagccttaatcagcgaaggtttccaggacgagaacgatctcctgtcaaacctcaccgcgaaggaagagctcgacgagcgcaagaagtcgctctatcagttcgcgcagtccctgaccgacacccggacggctctcgcggaacaggaacagaaagtgagcggcagaaccgcgcccgatattgtctctctccgcgccgcgaaggaacgcgccgaaacggctcttggcgagaccggacgcgagcacgcggtcgtctcaaaacagcattccgacatggcgaaagctcacgcgacgctgaccggacgtgtcgccgactacagcgaaaagcggaaaagaaccgacgcggacatcgtctttgcgaaacggctctcgccgagttccggactcagcttacagcggtatgttctcggggtcatgctcaccaccgtcacggcggcggcgaaccggctcctcgagagcgttcacggcggaagataccgtctctaccgcaccgacgacacctccggcggggtcagaaaagccgggctcgaactcgaagtcctcgacaacgcctgcggagggcggagaagcgtccggactctctccggcggagagaaattcctcgtcgcgctcagtctcgccatcgggctctcgacggttgtacaatcaagaagcggcgggacaaggcttgaggcgatgttcatcgacgaaggcttcgggtcgctcgacgcggaatctataaacgacgcgctcgcggtgctctccgggattcagaggacgcacgggcttgtcgggattatttcgcacgtcgacaggcttcgggagactattccggctcggctcgagattgagaagaacgagggcgggagcgggattaaggttatcggagtataaaaatatgggacgatttttgggtcgtcccattgtttttgcgcatagacatttgttttgccgtaacattcgaggcgggcgaccaatggtcgcccctacaagtgtagcggtatgttgatgtatgcgcgtgtttccttttgttattcggattccttcaacattgtcgtcacgcggttcgttatctggtctatcgtccggtctatgtccaccgctccggcgaaataggcggacgcctcctcggttattatcgcgaggagctttctgtcggtcgacgccggggtcttgcagttcccaaacaggtcgcggaggagggtttcctctttctcgctgaagtcgattcggatacagccgcgcacattcaccgcgctgtggtaggaaacccaacgtctctgaaggtcgttgagcgccgggtccttctttcccttctcgacgctcatgtccggcttttcctccggcgggcggtaggtcgcgagcctctcggtgactctgattccttcctcgccgttttcaagctccttcggctccgcgcctatgtaatatgtcatgtcgttcagaacctcgaacatcttctccgccgaagcccaagtcgggaggaagccgtaggttccatatgccagctgcgggcggtcatatatcatctcccactgcgtgacgcagttgtcaagatagtgctttatgaacgtccacgcgccgtcctccgcgccggtgtctttaaggattgacacgcgcatatcggggacgagcgacgcgccgtaattcgtcttctttctgtgcgggacgagggcgctttcccagtcctcgttgccgaaggtcagcagctcgtcgcacatgaaacttgtcatgtcctcgatctcaatcgtttgcagcttcactctgccgtcaaggtaattctcggtcgagagccttccgtcgaccgacataaacggcgccgtgcggcagatttcgagcagctccgcgaaatccttcccgaagtcgcacctcgcgcggtcatagtcgacataatcgccgacgaccgccgggagcagccactcgaagaagtcgagcgacggcgtgtcggtcttgtcgatcttcgcgagatattcgtcagggccgagcgaggagacaagctccttcaggtcggaaatcgtccacgcgtccttatcgccgattacgctgtcaagtccggctaaagtctcaaaacggaaattcagcacgaggtagggcagcttgccgtttttcgtctcaaaaggctcaagcacgcaaggcaggaacgcctttttcgtgtacacgtcgtcctttttcatgaaactgtacaggtcgacgaacgcgtcgctcttcaggaacgcgtccggcgttatcgtgccgccgaagagaaccatgtccggtctctcccccgacattatgtcgcgcatcagcttctgcgacgcggaaagcccggcgtccgacgtgtagggaatcagcttcacgcggtaattctcgttcgtgcggttgaagttgctcgcgaggttcagcaggttgttgagaccgcgcagtctgtccgaataatccgagtcggcggatgattcctcataggctatctttatcgtctgcttctggctctcgtacggcgtgtcggttcgctccgcgaccgtcatgtacgcgtcgtaggttatccagtcgaagaagctcagggttatcctgtctactgcctcggcgttgtcgccggaattgctcttcacggtctcgccggtcggctcgaggcggacgtgagttatcgtcgtgctcgggacgtcaatgtcaatccagttgacaagccgctcgacgagctttccggacgtgtccccgcggtaggtgcagtagctgttcgtgtaatacaccatgtcgccgtcgacaaggtcggggctgccgccgagagcgcagtcgagctttatcggttccgctccctccggggtcagcaggtcggcgagacggtacatctcatatgtattcttcatgcctgcggaggtggaaaagtacgcgtaaagcccgccgtccgtgtccgggacgacgcccatatagctgtatgtccacccggcgtttccggaaaacgactcgcgcagggtcgatttgtacagaacgttcccgtcggcgtcgatcgcgagcagttcatcgtcgcggtcggcgttcgaatgcgtcatccatatcgtgccgtcggaggacaggtacgcgtttattaagaagccgtcggagacgatatccttgtcgatatagtaaagcatcgtctgcgactcaaggacattattctcgtcgaagacgctcaggcaggtgtttccgattgtcgcgccgccgctgattcccgtcggaacgccgtccggaccgcgctccggggatctcgtcagcgcgaccgcgcgtccgtcgggaagccttccgaggtagtcgaaggcgaacgccttgaatttgtaggtcacatcgtgcattctaccggtgccgaccatctcgtcgagctccctgtcgtaccgcatgacttcctcggtgcactctatcgtgtaggtctgaacggcgacgccattctccggggtgaacaggacagtgctgtaggtcatcggccattcgtcctcggcgccggagtgcatggtcgaaaacgcccaagtgccgtccgggagaaagtctccgccggtcgagacgtagaattccccgttcccgatgccgagctccgggtaatccttcacgagtatgtcgttcatattcgtaaacgacgtggtgtaataatacagcggctcctcgcggatgatcgtcttctgctcgcaggaaaagacggcgaacgacgcgacgatcgtcagtatcaggacaaaaagagagatcaggaaagttcgcgtgtgagagtacatcttgtcagacctccgtgatatattgttatgaacattatatcatatattgttacgtttgtcaagcagtttcatgaacttttttgccggaaggggttgattttttcgtaaaaataatgtacaattgatatatataacagtccacagagacgaaagggaacatcacaatggaatacatcacaacaacgcccgagcgcgccggggtcgcgtccgggaatatcgaaaagtggctgcggacgctcgatgacgccgggctctcggtacacaacgtgctcatctcgcgcgggaacaggattctcttcgagaagtacataccgccgttcgatgagggcttcctccaccgcgagtactcgcagacgaaaagtgtcgcggcgatcgccgtcgggttcgcggttcaggatgggcttgcaggtctcgacgacccgatcgggaaatattttccggaggagacgaaaaacatcccagatccggaaatagcggagcagaccgtcaga

SEQ ID NO: 48 - DNA, 32759 bp, Unknown
  16S sequences of unknown bacteria
gctgtttctcatcttccagaaacagatgatcggcggcatcaagatcggcggcatcaaaggttaaggagaaatcatgaaaaccaaaaaaatactgagtttcgccctggcgatgctcatgggcgttccgctctttgcgggttgcgaaaagcaggataccccgcccgagccgtcggtgacctttaccgacgtgtggacggaaggcgtttccaagaccttttctgcgggcgagagttacaccgtgcgtttcgacgcggcgttcggcgggcagaattatatcaaactggaatatacgtccgcctgcggattggacgcgaccatgcattttacgggcgagggcggcaaaaagtacagcgagcgctttttcctctctaaagacgataccgagtttcggcagatcctcgattattatcatgaaaataatttcgataagacgcttgaatccatcgatttcaagtgcgtgcatcaaagcggcgcgttcgaactgaaaaaagtttccgccgccgtgcatcccatcgacttttccaaagtcaatttctatgcgcccgattataccgaagagaacatgcagttatacattcaaggcaagacggtgaaactgggcgtcaatctgaaactgggcggcgcgatcgattatctttcttccgtcaatcagggcgtcgcactctattcggatatgggcaacgtgtacgtggggcagagcgccaaagacaaaatgtacgtcgaggacgacgtcaatctcatcaacgcgcacgatacggggcggctcgtgcagcagtccttttacggcacgaaaggggattcgctcgacgagccgcaggacgattacgagtgcgggcttttcgatcacgacggcaatcccgcgacgcccgacgtcgcatggccgtataaccccgtacagggcggcgatatgtatcagaatctgagccaactcgtcgacgtgcagtttacggatacgcgcatctatatcaaagtgcgccccatggactgggcgaaatcgggcagtatcacgcctttctatatggaggatgtctacgagattttagaagacccgctctacggcgaatacgtttccgtcacgaacaagagcacggatttttcgggttacgtgcacgacaacgtgcgcgaccaggaactgcccgctttctacggcatcacgccgctcggcaaacttgccgcctataagggcggcgaaccctggacggacaagagcatctcctatgacgacaatttaggcttctggtcgccgggcacttccgccaaccgtttccgcgctacggaaaactggatcgcctggctcaacgaggacgactggggcatcggtctttacgtgcccgacgtggaacatatgctcgtgggacgcaacgaatataccgtcgatatgtcgaatatcggcgtggatccttcgggcgcggtttcgtgcacgtataccgcgccgctcggaaaattctccatgccgacgtacgattcatttacctatcgttactatctcaaactcgacaacgtcacttattcccgagcgctctttcagtctctgagagaaaacggcgccgagaacggcgatatcaaaaaactcgaaggccgcgcgtaaaaaaacagaggtgcgtatgaaattattttccaagattttgcccgtggcgctctgcggggcgctgctgcttgccgcagtcggctgcggcggcggggaaaaatatcagccttacgattacgaggtaaaacatgcctccggcgacaatgtgctgcgtttttacagttcggacaacgggctggacgcctttttgaacgactatttcgagcggcatatgcgctataacgagcgccgcatccacgcctttcccgtcggcgcggggcagcccgtatggaaggaatgggagtccatgatcggcagtttctgggacgcatcgcccgccaacctcaccgagcattacgcgacgaatcgctgggtgcgcgactggctcacgttcgattatatgtctttgcaggacagacaggggtatatttccacctccacgggaattacctcgtccgactgggggcagggctgggcgttcccttcgtacagacacaacaacatgggcggtttcggcgaagagttcaccgacggcattgacggttggcaaggggagagcggcacgaacgtttcccactttacgcagaaagcggaaggcagcgaatccgcggacggtaccgaaggctatcttgccgccgagaccgcagcatcggcatcggagatctgcgtggtatcgccgctcattcggggcggcaagggcaccaacgctttctactcgcctttcctgcatttttcctggaaatacgaactgacgcagggcgaaccctccgacctcgacgatctgtacgtgtatttccagaccaaggacgacgcaaactggtcggacgacaaatgcgtgcgcttttccgaatacgccaccgtggcgaaggacttttcgcagacggaaaacgtatggcagggcactttcctcaatatgtatctcaacgaaaagtgggggcgcgacagcctgcacgagaacatggtcacgcgcctgaaattcgtgctgcgcgccaaagaggggaaaaaggtgcagggcaaactgctctacaactttatccgctcggatttcgacgaccgtatgtcggataactgcgggcagtatatctccgcggcgaaacactatctttcctatacgcaggataccgaacttttaaagacggtcttgcccaacgcgcgccgcgcgctgcaattctatctgacctgtctgaacggcgaacagaacggtattatcgacaacagttatctcgtgggtcatttcaattgcggcacgcccgccacgggcatcggcatcagcgacgggttctgggatgcgatctcgttccccaacgccaatctgtattccaatctttcttaccatcaggcgctcgaaggtatgctgtttttagagcagatggctgaggaatatgacgtagaatcgcccgccgtcaccgtgctcggcaaggacatgaagacggtcgttccctatcaagaaacgatttcttctctccgtgagaaactcgaacgctgcgaaaacgtcatgcgcgaaaaattctgggacgacgaaaagggccgtttttttgcgggatattacgatacgcaggacggcacgggcgtcacgacggagaaaatggactacggctttctgatgttcaacttgcaggcggtcacggacggtatcgccactcccgcgcaggcggaacgtattttaagttgggtatcgggcgagcgcgagatcgcgggcgatacctccaagggcgacgatatctataagtttttgttcgcgccgcgtttttccaccaaaaacaacgcgtccgacagcgtctgggcggtcgggcaggcggattcgtgggagtgcggcgtgcgcaacggcggcgccgtgatgcagaccagttattacgacgtggtcgcgcgcagtcttgtgggcggcgcggacgacgcgttttcgcggctcaaaggcatcgaaagtttctacaccgcggtgcgcagatcgggcggcgagggcacgggcttctaccgcaaatatttcgaaaatttaggcatcgggatgcagggcaactacgatgcggacggcgacggcgtggcggacggcgacagcgaggggcccgtgggcatcgactgcgaatttttggaagcggcgctcatgttcgtcgccgttcccgacgcgtttttcgggctggaaccgaattacgacggcacgctcgccgtacagccgcgcatgcccgcctcgctcgattactggagaatggaaaacctcttgttcggcggcgtttcctacgatctgtccatcggaaaatatttcgtgcagttgtctaacgtacagcagtcgtcttcgctctctatggaagtgcggctcgccaaaccttcgtttaaattcaaagtgttctacaacggcgcacaggcgcagtataaggaagaaaacggcagtatcgtcgtcaaagttccctttgagaacgggaaagtagagatcaaaggagtataagccatgttcaacggcgacaaattgtatatgctcccctcggtgacgcccctgcaatgtatggggttcgtgctcgcggggaagggcgacgtgctcgccgtagacggcggcaccgcggcggagaccgaccaactcgaaaaccttttgttatcgctgggcggcaaggtgacttgctggcttttgacgcacgcgcatttcgatcatatcgaggcgctcatcggcgttctcgaacgcggaaacgtagagatcgggcgcatatgttatcaatttcccgattcagaatatatcgagcgtgtggaacggcaggaaaaccgcacggcgcgagcggcggatctggaaaatgcgatcgcgcggcggggcgttcccgtcgtccgcccgcaaaaaggacagtggctggaaacggggcatttccgcgttttgcccctttccgacggcagcgccgtgggcgaaagcctcaatccttcgagcgtcgtctaccgcgtggaaacgagcggagaaagcgtgctctttctgggcgatatggactggcgcgcggaagaaaaaatattgcgggaatttcccgaagagttgcgctgccgcgtcgtgcagatggcgcatcacggtcagcagggcgtgaccgaaaaattttacagacatatctcgccgcaggtatgcctgtggccgacgcccgaatggctgtggaacaacgatatcggcgcgggctttgatacaggtccgtataaaacgctggaaacgcgcggctggatggaaaagatgaatacggtaaattatcatttcgaaaacacggtcaccgtcatcgaatagagaatcgttaaggaggtcagtatgcctaaaagaatatccgatccgaaaaagcgtgtcaagagagaggacgtggcagtggaggcgggcgtttcaacggcaacggtttcgtacgtgctcaacaggaccaaacggctttcgccggaagtggaacaaagggtactggaaaccgcagcgcgcctgaattacatacccaaccgtatcgcgcagtcgctcgcgcgcaacaaaaccaacgcgctcgcgctcatcacggcggatatcaccaacgtctatcaactcgacgtcatcaagggtttgcaggcggaagcgctcaaaaacgactatatcgtctacattttcgacgcattcggcgacgtttccaaatatatcaaacacctgatctccacccgcgtggacggcatattcgtctccgccgcgcccgactttttgtcggacgagcaactgtgcgaactgcgcgacgcggatatcaaggtgctcaccgacttttcgcgcagcacctatcttcccgacgtttcctatatcatgtcggatatgtacgacgggtttttgcaggcggtcgagtacctcaaatctttgggacacacgcgcatcggctatctgagcgcgttcgacgattcctgctattacgatacgcgtctgagcgctttccgtaccgcgatgcgccgcgcgttcaataacagcgtgccctgtatcgagtacggcagttggccctattcctcctcggaagaactgggcgggcggctgatggagcagatgctggaaaagcatcccgacgtcacggcggtcatcgccaccaacgatctgatggcgatcggggcgatgaaagcggcgcaggatatgggactggacgtccccggaaaaatttccgtcatcggcgtggataatatcgataagagcagcgtgtgcgatccgcctctgacgactttggatcagtgcggcaaagaatacggcaaaaagatcttccacgtactgcacgaaaacatatgcgaacagacttcgggcaagtacgtcattcccatgcggctgatccgcaggggatctacgggccccgccttttccgagcaactcgaaaagattatgtgataaaaagaagagccgaaaattcggctctctttttgtttgcgcaccttgttgcgatgtggtataatgaaagaaaaaacgaggtggatatgaaagttgcaatttacggcgcgggtgcaatgggtaccgtactcggcgcttatatcgcgaaggcgggcgtcgatatcgatctgatcaaccgcaacgaaaagcacgtggcggcgcttaaggaaaaaggcgcgcatatcatcggaacggtcgattttacgcagaaagtcaacgccttgctcccgtcggaaatgtctgaaaaatacgacatcatcctgctgatgaccaaacagcgctataacggcgagatcgtcgcgtttttaaaagattatttaaaggaggacggcgcgctctgcacatgccagaacgggctgcccgaattcaagatcgcggaaatgatcggcgcggaaaggacgctcggctgcgccatcgcctggggcgcgacttttcacggggaaggcgtgtcggaactcacttccgcgcccgacgctttgaccttttccctcggggcgttcggcaaggggaatcatttgcaggacgtcaaagacctattggaaaagatgggcgaagtgatcgtggaagaaaactttatcggcgcgcgctggtcgaaacttctgatcaacagcgcgttttcggggctttccacggtcacgggcgcgactttcggcgatatttccaaaaagaaagaatcgagaaaagtcgcccagaggatcatgaaagagtgtatcgacgtagcaaaggcggcggatatccgtatcgaacctgtgcaggggcataagatcgacaagttattcgactatcggggcgcttttaaaaaggcgatctcctttgcgctgatccccgtagccatgaaaaagcacggcaaactcatttccagcatgttgcaggatctgcgccacggcaagaagtgcgagatcgattttatcaacggcgtcgtctgcgaattcggcagaaaatacaacgttcccacgcctttcaacgacaagaccgtcgagatcgtacacgctatcgaagagggcgaattccccatcgattttgccaacataaaactttacaaagaactgttttgacgatgaagagcgcaaccctgtgggatgcgctcttttaaatattgtcaggatttggtttatgagttgacaatttttaggataaatgatagaataaagtcgaatttgcatttcgcaatgtgtgcgttaatgcgatccataaacataattattcgtttagggggcgccccctaaaatttttgccttaaggcaaaaatttatttctttaagagcataggaggataaataatggtagtaaaaggcaaacgcgtctggttcgcatcgcttataacggcgtgtatcgcgtcgtttgcgctgatgttcgtattttggaatgcggcgtctgcgtatgcgggaggaagatgggaagtttccagcacgaaaaaacttatttcccccggcgtgacggagaattatgtggtcacgaacgattcgacgaattccgaccaggtgatcgggtatgcggtcacggtcgacctttccaaaaacacgctgatggtgggttataaggactacaatccctcgaaatggggattgcagactgttcgcgatcaggcgaaagctatggaaaagacaacgggcgtcaccgtcgtggcggcggtcaacggggactttttcaatatgtctacgggcgagcctacgggcgctctcgtgatgaacggcgtgcagtatcacggcacggaaagagaatctttgtggttcggcattaccaaggacaatcagcccctgatcggttcgggcgccgttcccgaaaatataaaggaagccatcggtgcgaacgtaactttgatcgagggcggtcaagtcaccgcggggctggacgccgcgaccaaacagccgagaactgctgtcggcatcgacgcgaacgggaaagtcgtcgtgatcgtggcggacggcagacaagcggcttcgtcgggctacacgctctcggaacttgcggatgaaatgttgcgcttgggttgcgtggacgcggtcaatctcgacggcggcggctctacgacctacgcggcgcgctatgcgggcgaatcggctctgacggtcgcaaacagtccgagcgacggcgtcgagcgcctcgtttcctcatccttgatgatcgtcacccaggcggaggcctcgggtgtttttggcgaggccgttttaaacccgaataacgatgtatatacgcccggttccgaaatacagtttcaggcgaaagcggtcgatacgaacggatttgctatggagatgcccgcaaatgttacctggcgcctcactccggagtccgaagccttgggtacgattgacgcaaacggtctgtttattgcgaacgacggaatcgaaggcacggtcggcgtcgaacttgtctatgaagaaaaggtcgtcggcactacttctgtcgaaatttactatcctgataccttgaaattcggtagcaacgaactttctctcggtttcggcgcggagagcgatctgggcttgcacgcgttacataatcaccgcgaagtgatcataaaagacggcgatctggcttggacgatcggcgtcagcgataatgaacagtatcccgagatcggcacgatgcgcggcaatacctttgtcgccagtgaagacgcgaccaattctaccgcgatcgtttcggtcgcggtagcggacaggaaggaaatatctgcgtcgatatccgttacggtggggcaactgccgaccgttgtctgggatttcgaggaccatatcgacgaaacgaccggacagacgattcccgcagaagaatattacaatgtcaacgccgaaggaagcctgtttcaaacctttcattacaacaacggcagcgagagcgccgaaattgtacatatttccagcggcgaacccgtgcggatgggaagttattcccttcgcatgaattatgactttaccaaagtgactattaccgaaggcgcctgtttcggtatgaccgaggagtacaagattcccgggaaacccactgcgctcggcgtttgggtgtatgtgcctgaaaatacgccgaatttctggttccgcgcttatattaacaattataaatccgacggcacgttgatcaaatcggcaaacgtcgtaaattttaccgcgcagagccagaaggaggccgataacttcggtataccgtattatgagggcacgattcctgcgggctggcattatttcgaggcgccgctcgccacgtttgacgggacgcaactcgttcctttcagcggagattattacacgttgatggcggggcaaactttccgtctgatgtacgtgccgagcatccctatggggcagccgaccaagggttatgtatattacgataatttccagttcgtttacggttcaaataccaacgacttgaacgcgcccgtcatcgagaacgtttccgttaacgggcaggctttatccgacggcatgacgatcgcagaatcctcgttcagtattcaggcctcgtattatgagctggaagaaaaatatgcttccggcgtgaatacggacaatctgcacgtctatgtggacggaaagcaactgaaacttttaagcgggtcggaaacggaactgaatacggaaaatatcactttgccggacggaacgcaccgcatcgaagtttctgtattcgataatttccagaatgaaagcagaaaaagtttcatgattaccgtcgcggctgacacggtctatgatacggtgtttttggcgccgcaatccgacgcgcctacgctgaatcgatattacggattcgacgtgatcgccacgaacatggaaaaaacgagcacggtcacattcgaaatgaaactcgggctcggattgacactggttgcgcagccgggagagtttgacgtctttaccgtggaatgcgtgcagaaaagtgcgatcaataacacgtatgaagtaaaaatttcccgaacgggtcaggcactttccggtacgggtaccgttgcgcaactgaaaattcttatggaaaaatcgctcgtgcagggatccgtcttttcttacagcctgctttcgggcagcgtcgcattcgacgagttttatcaggaagacataaccaatacgttcattctgcagtccgaccaacaggaagtggaagcttattacgaaatttccgccgacacgatgatcgtaggaagcgagggcggatatatttacgtaacgcatggcggccttcccgcgcaaggcgtttcagtctatttggatggcgtcgtattgcccggcataaccgatgcggaaggtaaaatatttacggatcgatttgtttccgaagcctgcattaaaaatattcaggcggaggattcacagggcaacgtttccttttcgttgaaagtatacggcgtgttgccgtgcggcgatgacgcttcgtccgcgcccatgttcatcgcctcgaaagcgagcgtcgattcgcagacctcccataatatcggctggatgtccaatcctctctttgcagacaaggccgcgcaggtcaaatatgctctgaaatcggaatacgacgcaaaaggcgaggcctcatttgccgtattcgagggggaaagcacgatcgtggaactcagcgcaagccgaaacgctgcggaaaattacgccgttcttttcaacgaggcgcgacttacgggccttcaaaaggatgccgattacgtatatatcgtcggcaacggaaccgtgtggtcggagatccatagtttctccacaaaacgaaacggcaccgatacaaacttttttgtgatgggcgatacgcagttggaagataaggtattgctcgatcatctcgcgcaggcgatccggcaggacggcgtttcttatgatttcggtattcaaacgggcgactttgtggataatacgaattcctattccatgtggtcggagatcatgggcgcgttttccgagtatttcgggaataccgatatgatccaggttctcggcaatcacgagttttacggggataacgacggttcgatcgcctccacattccacatgcttcccgataccgattggtattccgtaatgtatggcaacacttacgttgcggtcgtgaattattcggtcacgaacaatgtgaacgaaatggcgaaaattttcgcggaagtcgccgccgacgcaaaacagagcaaagccgtttggaaagttttaacgctccatcagcctccttattatacaaactcggcaggcgggaacgaatatgtaaatcagattgttccgcaatatgtagacgaaggcggtttcgatgtcgtgttctccggtcacgaccatgcttacgcgcgcacgaaacccatgaaaggcggcattgtagacgagagcggcgcagtctatatcgtcagcggcgctgtcagcgataagggctatgagcctgtaaacaacccgtctttcaattttgagacgctgatagcagccggccccgaaatcggcggatatacggctgtgtatatttcggtgcaggccacagaaaatacgtttacgatccaggcgtacgacgtggtgaacggttccgcggtcatgatcgattcgtacaccatcggcaaggacgacgagtgtaccgccaacggccatacatttatttataaaagcggctatctcggatgcgatctttgcggtttcagtatcgatcccgttgcgaatagttacagcggaatggtcatcgattccgttacgggacgccgtatgatgtttgataaaggaaatgtatacacgggctggttctattacggaacggatcttttatactttggagaagacggggtcgccgcacagggagaaattacgctcacagatgagaacctcggcgattttacgtatattttcgataacggtaaagtagtcgggggcgaaacgaagtggtacggcaataaatattacgtgaacggaaattatgttacaggctggctggaattaaacggtagttattattatctttggacgggcggacattatgacgcgaatttctatccctatgaattgggcgaaaaagtgcgcggcggtttaaaacgcgtaaccgtcaatatgggcaattacgatattcccgtatatttctattttgacgattcgggaaaacttctgggacctgtcaacgacgaagcgggcgaaatgattcccggcaacttttattacagagataatatagatacatattcctacatgatcatttatacagatcaacaaggtaaaattttaggggatttctacgaaaacggctggttgacagcaaacggtaccggtaatcccgatgccgaaggcaacagatattatattcgttgggattggttgacgacgggagaacaagtgatcggcggcgtgaaatatcgttttgcccaaaattcaggagatcctatttcccaagggaacggggtattgcagggcagatattatcatgtacgattcaatcaagacgacgcttcgtatacagtaaaagaaatttttgaaaatagtacggttacccccgaggaagcgaaagtaaaagatggcaacagtatcaaatattacgaatttctggggtggtacagcaagggaaaactttttgatttttccacgcccgtcacttccgatattacgttgaccgcgacctattccagaaaatatgtaagaatttacggagacatggtatgggctctcgaaaaattgcaggaggcggactctgccgggaattttgatcagatcaagaaatctattcacacggcggaacaaatttatgtacaactgactgcggaacagatttcagattgccaaaaggaaggaatgtctttcgcattatatgaacaaatgaaagcgaacctttttgaggtcagcttcacgaataacggaattgttttcaagtcgtcggaattgtataaaggcgaaacgatcgaaattcccgcgggtcctgaaaagagtggaaacagtatctatacttacgaattcatcggttggtacaacggtgaaaacaaacttgaaacaggtacggcggttacggaaaatacggtatttgaagcgaggtatcggaaagtatatgcggagtgttacgacgaactgaaagcggcattggatacgctgatagcgtcgcaaagcaaatcgcccgaagaacaaaaaatcgcgttatatgccgcgaccgaagcatacgagaaaatgtctcagacgcaaagagacgaagcccaagcggaaggcttggactatgccctctataaagaaatgttggataaccttttccaagtgaaattttcttttgaaggcgagatcgtaggtgttttggaggtatatagaggagaatcgatcgaggcgcccgccgcacccgagaaacaaggcaatagcataaaatcttatgttttttcggggtggtatcacgaagaagaaaaattcgactcgacgaaaatcgttgcggatacgacttttaacgcacggtttgaaatggtgtattcggaaaagtataatcagatgatcgaagcgcttttacaactttctgcgttcgaggagggtacgtatacacagaaatacgaggcattgagcgccgtaaacgctctctataaggattttagcgaatcggagatcaatgatgcgcaggaagaggggatgagttttgaactgtatcgacaaatgcttgccgattacaatgcgctagtcgacagcggcaaggaagatatggaaagcgctgaaagcgtggcaaatacttttttaacgatttcggctgcattattagctatggcatcgctcgcgtacgtatttggtttcaggagataaaaatgatgaaaaagaaatttttacttcttttagcggctgttttactcggagtatcttttgtatttgtttctgtcggatgtgcagatgtgcatgtagagaataaagataagaattttttacaggtttcgcaatcatatcaaaaagtttcatcctcgaaaaaaatcgtaaaatcagtacaggtatgcagagacgatttggttttaaacagtgtcgtggagtcgtatgtttctgtcgaagaaggatactcgttgacaatcaagacggttactttaaatcctatcggtgaggggagcggcatgtacgaagaaactacttcagatccgcgctccgtatccagggacgaaatatctttcggatcgctgttggagtatacttgttattcggaactcgattattcagaagcggatcaaagtttgatcatgaatgctaaaataaagaaagaatttttcggacggttaaatataaccgatgacaaaattcaaggggacatagccgtgcgtatatccgttgaagacggtaagttcgtttccatgtcttacgaatatctttcttccaacggaaacgacgtcgcaatctcttttcaatatggttattgaaaagtctatcttatctgagtgagaggaaactatggagcggaataagttgttatcggtaattattcccgtgtataatacggaaaaatggttgaaaaggtgtcttgacagcatacttgcccaaagttatcggaatctggaagtgatctgcgtgaatgatgccagtcccgatggttgttccgctatactcgagaaatacgccgcgggtgacagtcggatcaaaataataaatcatgagaaaaatcgggggctgtttgctgcccggatgacgggtatcaaacaagcgaaaggggcgtatatcgcttttgtcgacagcgacgactttatttcctgcgattggttttatcctttgatccgtaaagcggtcaacgaaaacgcggatatggtattggggaatacggtcaatatcgacgaaagcggtcaaatgacgtattataacaattaccgcagattcaacagcgataaacaatctgttattgctcccgaattgttacgagtttttttcaaacaacacggagagtgctttatctggcatactgtctggaataaagtttattcgaaaaaaatgatcgaacgctgtctgccttatttggaaaagatgagcgaaccgctgatcatgggggaggatatcgctttttcatcggtattttacgcgttttccgataaactggctttctgcgataatgattgttatttttattacaggcatagcgaagcatctacgagcgtacgattgccccgcgaaaaaatcattaaaaatctcgaagatattattcgggttttcgattttgtagaaaattttctcaaagagatcgaggagtatcggctgtttgaagaagattttgccgcttttaaagaacaatatcgcataatatggtccgggaatattgctgcggcgggtttgcagaatgacggttccgtaaaaaatttgttcgcgaaaggtttcggtagcggttcttatcgaatgccttccgcccacagtttttatttttatgaaatctcgactgcctgggatgatcggctggaacagatgaaacagcatattttaacgtcgcgcgcggaatatatcagtttcgatattttcgatacgctgatcgtccgtccgttatggtctcctgacgatttattacgttttgttgccgaagaatgtgctgagaatttctgtatccccgaaaattttcgtgagatgcggcgaattgccgaagaagattgcaggaaaatacataaggctgccgatcgtaattgcgaggatgtgactctggcggaaatttacgattatttgaccgaaaccttcaaaatcgaaacagaattggcgagcaggctgatggctaaggaaaacgaattggagatcaaattcagttcggcgcgccgctgcggggcggaactttacgatttggcgttgcgtgcaggtaaaaaggtcgtattcatttccgatatgtatttgagcgaagaagtggtagccgccgtcctcaacaagaacggatatcaagtttatgaacggatctttgtctcttccgaatacaaaaagctgaaggcgacgggagctttatttaaatcggtgctgaattccttgcatatttccccgaataatatcgtacatatcggagataataaaaattcggatatcgaaaaagcaaacgcgaacggaatcgaagcattatggattcccaaagcgatcgacgtattcacgaataaattttccgatttttatacgggagattcatttaaagaaatttattgcggcaacaatcaaaaaatagacagcaagggagtcatcgaacaattgcctctccgttgtatgttttccgttgttgccaaccatatgtttgataatccctttcgtccgttcaattcccgtacgctctacaatgcggacgcctattatataggatatatggcgctcggaatgcatatcttcggccttgcaaagtggatctatgataaagcgctggctgaaagatatgaaacagttcatttcctggcaagggacggatacgtcgtaaaacaggcctttgatatcattgccgcggcaatggaaaaaaagaatggtattcgcataaacagttcatatttttatgctaccagagaagccttatatccgtttatgatccgcagccgcgaggatgtttttaaacttgtaggcattacggattataaatgtcatacgcccgcggaaatcttaaactggtttcgtaaaatttgcaaagaaatttcggtggaagacgtttcggagtatcgcaagcacggaatcgatttggaccgacctttcgaaacaatcaatgactttatcggttttttgagcgccatgtcggaaatttcgctcgatctgaacaaggcgggcgcttatcaaaacgacatttcaaaaaaaatgcaaacgattttcgcgggaaactgcgctacctttgacatcggatacagcggaagattgcaatcgattctgtccgaactggcgcaaaaacccatcgatgtgttttacgtgcacggcaatggttacgaaacgacggcgctcgcggaaaaaaacgggtttaaagtccattgcttttatgatttttccccgactgtctccgcgattttacgtgaaactttcatatcggattcatcgccttcatgtatcggatattctttgaaagataattcgctgtcctttgaattcgatgaaatgaaagacgcgtattccgagacgtatgctatccgcgaaatgcatagaggcgcggtgaacttttgtaaggatcttacggctctgtatgccgattatctgcatttatttacgtgccgtccgcaggatatctccgcggcgtttgaaaattttattctgaacgccactcctttggattgccagacgtttaatagtacttgtataacagataaaatgtacagcgggtatgtaaagaaaagtttcctcgaaactttgttctggacgagagataatattgcatccgacaggatcgtatatatcgacagaacgtttcgggcgaaatcgaaactcggtcgcgccctgttttattttttgtttgataataaaactttccggaaaaaaatcaaagcgcgactgaaacatcaggataagtgatggaaaatttatatagaggactcatcgatttggaagagtattcgatttcgatcgacgacgtcgtgaaattatatgtatatacggacatattgaaaatcgccagaatccccatacattgtcaaaggcattttgaaatcaataataaattggtgcgcgaatatgtttttcgctttcaagagcaggaaatcgtaaaaaacagccgatgggtagacccgaaagattttgatgaagacgggttgatgatcctggggaacatgccgtccttgcaaaaagtttccgacagccgaatagaaatcgcgctcgcggacagcaatgataatcagatctttttcctgatgaacgattcgctgctgtacgattgttcgcttttcgacgatgaactttgcaaaaacctcgtgatttttatgcttacggtcaagaccgcgattgaatcgcgcgtgcttttttgcgccttttatactaaagacgttcaaacgaaagaaaaattacgggtagtaaccgacacggtggaatttggcgacgcaaacttaaatttgtattttcaaagcatcaatgtttttcaatacaggattttacaatcgtccgactatgccaaacatttttttaaaaacaaacaaatcttaaaaggttacatcgcgtctcttgccgattatccagtaactacgcacggtttggatatcatcaatcggcgcgcgatcgatcttttcaacgaattgtttcaagggaacgaaaacgcaacgctcgaagaccgtaaattcttttttaggggagttgataaggcgaccggacccgttgcatatacacagcggggaagcgactttttattgacgaaactgaaaaaactttgtcagcgattgcatatcgactattggctgtattacgggacgctgttgggggcaaaacggcataacgcttttattccctgggacgacgacatcgatatcggcgtcatgcgtgaagacctgcataaaataatcaggtatttgcaaaacgacggcaatttcagtatagatatattgtacaatacggaatggggggatcgggtctataaattccgctttaaaaacagcgatctgcccgcctatgtggatatattcccctttgattattgtcagggagatagttcggttatctgggaatctttcaagggtttaaagcacgacttggttaccgatttcagaaaattgcaggaggaactgggttgcggctatcatgtctgttttaaaattcccgaaaaccatttggttaaaatcaataatttgttcgacaaataccgtaaaatcgcttataaaaaaattcatctgagcgaaaaaaagaccgataaaatcgtttacggttttgacaacgtctttttattcgactggcagcaagtcttttcgttgagcgaaataactccgttttcgctggaaaatttcaacggaacggagcatcctgttttttgcaacgccgaagaagttcttattcgaaattacgttgcgccatatacattgccgaacgatatcgtatcgcacaggcataccgcgagaatgtcagctgaaacgcaacaaaaaatgtccgaattgatgtcggctttgcaaaattacgagttcgtatagtacatgaaacaaatggggataaatgaaatcaagcggtaaggagatgtaaatgtcttgggtaaaaaaagtttgtgtgatcgtgaaatgtcgccgctcggtcaaggatataaaaatgactttgaaaagtctgtttgcgcagttcgatcagaattttcaagtcatatgtcttgtcgatcaaaaatataaaactgcaaagaggtttttacaaaaagcggcggcgaaaacaaatcgaatcgaaatactttcgatcaccacctcgctaaatatcggaaaaaggctgactgaggtctgcgggaaggcgaaaggagaatattgtttatttgtcaacagcggggataccgtaacgcaaaattggataggcggattggtcgatcaggctttgcgaaccgattcggatttggttttcggggacttaaggcaattccgtaaaggcaaaagcgcatcgtattacaatctggatcccgtgcgcgttcaagatatcgattgcgatggcaatgccttgctcgacgagtttatgaaattgcacggtttatgttcttcgtatcattctttttggaataaactgatccgccttgatttatgggaactttgccgaaaggattttgatttcgaatcggaatatgcttggaaaaaatgcgccgcgtccgatttggctttttccgtttcgctgttttgtaacgccaaacacgcagcaaatttacatggacagtattattacgagaatgtgcggcaagggaagaaagaccatgacttcggtcagactttcggcattgtgcgcgaaattttaaacaggcatcgccttttagaccgatacagtgaggacgtatcgctgatgttgggaaattgcgtttcggcggaagaatccgattcagcggttggctggtttcgttcgatccagacgcaggaaaaatcgggcgacgacgcttataaaaatctgttgcggaaaatttattccggacaatataagatcataagtttcaatatattcgatactctcgtcgtccgtccatttgttccgccttcggatatctttacattgttgaacgtcccttttcaacgtatgtttgaattgaattcgtttgccgatttttccgaacagcggagatctgccgaagagttttgccgtatatcttacggtaaaaccaaattcgttaatttaaacgatatttatgatgctctggcgcgtaattacggttacgacagggaaaaattacaaacgattcaagcgctcgaactggaaaacgagatcagcttcggctatccgaggaaatttctcgtcgaattgttcgaactggccaaaaaaacaggtaaaaagatcgtgcttgcaagcgaatcttatcttccccgcgaatgtatcgaaaaaatattgcgtcgatgcggtatttcgggatacgaccgcctattcctttcgcatgaactcgatccggacgcgttccccgataaatttgccgcgatactggatttttataaaagcagcggtattcgggcaaatcagatcctacatatcggcgacgacgcctgttttgatatcgaattatcggaaaaggcgggaatttcttcgtttcattgcccgtctaccattgaactgtttcaagggagaaatccttccgtgtatacggggaactcttttgcgaaaatttataaaaccgccgaccgttatacggatatggagcaagtatatcgcggctgtacgggactgcgttgcgtcaatgcggtcattgcaaataaactattcgacaatccgtttcaaagttttcatgagcacagcgatctgaacggagatccgcgcctgatcggatattacttgttgggaacgcatattttcgccgttgcaaggtggctgatcggtaaagtgcgcaataagggtatccgaaaagtacattttgccgcgcgggacgggtatttgatacaaaaggcatacgatattttagcgcaggacgcggacggcgttcccgaaagcaattatattcgcgtttccagaaaggcattcgcgattgcagatataaaaaatgtaagcgatatgcaatcgcttgccgaaaaaacgaatatcggcaagcagtctccggattctatatttgcgatgtttcaacctgttttgacggataactcccgaaaaaaatatgaaaactttcgttgctcgaacaaaaatttctgtcagactgctttcggaaatcgggagacgttcgcgcgctatatcgtaaagttttacgacgaatacttgtccgacgccgactttgattcctatcatacgctgctttcgcaatattttcaaaatattattgcggaacaagacgtcattttcgatatcggctattcggggcggatagaatcggcccttcaacaattattggggtttcagatcaaatcttattatatccatacgaataatgattccgtttaccgaaggcaggcgttcaccccctttgaaaacgaaactttctatcattataaacccaatgtaacgggcgtgattcgcgagcattttttgtcggagatgtgtccctcgactgtcggctatatggaaaaaagcggcggcttgcagttgatagacgaggagtatcatatcgatgagatcacttggtttgctacgaagaccatgcaggaaagcgcattggaattcgtttccgatttaaaaaatatattcggaacgtcggttttggaattatattgcaggaacgaggatctatccaaaccgtttgaatattatctgcattattcacgtgattttgacagacggatgtttgcaaagttggaatgtgaggacgacttgggcgagggacacagcctcggcgggttaaagatctggaacgatacgctcgaaaagatatatcagagcggcggacatgagatagacaacgggaacggtgttcccaaagagatccgcaatacgcctcggtggaaacgcgctctgtattttttcattttcgagccgaaagttttttgggaaaaattgaagaacaacatcggtaaaaaataacgagggaatcgatgaaaaataaaatattttctttgctcctgaccttgtttttattttggggggcggtcggttgttctgcgggaacagcggcaaccgaggaaaaagggaacgagaataaaaatcccgaagatattgaagaggctgtcgcggatataaggttggaaacgatatttaacggcagcgagatcgatctgtgcgctccggaactgcggacgtttttagacgagcaggacgaaatcaaacaatgttcttttttattggaacatgaaggaaaaaattacgattatcaggagcccgaatttttttggtcaggagaaaaagatgaaagttttgcagtttatttttcagaaacgagagacttttcggacgcacgtgaaatcataaccgacaggaattattttcgggcggatatcctgcaaccgaacaaaacgtattattggaaagtgcggggaatggacagcggattaagttccgagatcgattgtttcgatacgaaagacgcgccgtcccgcattttatccgtcgacggactgaaaaacgtgcgcgatgcgggcggatggcgtaccgattcgggtaaatccgtccgatacggcatgatttatcgcggaagtcagatgaacggctataatcaaggcgcgcggctgacggaaaggggacgcgatacgatgatccgcgatttaaaaataaaatccgaagtcgatctgcgaagacccgaccgcgatgacggaggacaaaccgagtgcgccatcgatggatcgtatccctatttaaaagcaccgtttcatccttatacctgtatattcccgcaatttaaaaccagtgagagaggatatgatcttcgtgttccgcaatcatttcaacaaatattcgaatttttggcagaccggaaaaattatcccgtctatctgcattgcaatgcgggcgcagacagaacgggtacgatcttattcctgctgaacggtttgctcggggtatcgtatgaagatctgacaaaggatttcgagattacgtctttttccgtcatgggcaaacgatggcgcgccgatttgaacgggaacattcccgtagaagagggtgtgatgcaggacgacgaacataattatgtcgcatgggagaaaatgtacgggatgatgatgcaatattatcagactgaaagcggcaaattatccgacgcaatatcggaatatcttgtgcaagtgtgcaatgtgtccgtagaaacgcaagaagccgtcaaagatattttgctgtcgtaagaattacaagaagcatagaggattctatgcttcttttttactgtaaaaattaaatcataaaattaggataaaaagggaataagcggaaaaaagttacgcatactttggttatgatcgctcgggtttcgagcggtaagtggaggaagaaatgaaagctacgggaatagtgagaagaatagacgaattgggcagggtggtcatccccaaagagatccgccgcactcttcgtatccgcgagggagacccgctcgaaatatttacggacagggatgagctgatgctcaaaaaatactctcccatcgccacgctggaacggttttccgaaggttcggcaaaatcgctcaacgatctgagcgggtatctcgccgtgatctgcgacaccgacgaggtgttgtacgcgtcgggcgagggcagaaaggagatcaaccgcaaacccctctcagccgcgatcgaaaagatcctgaaagacaggcgcagttatctcgccaacgcgagcgagggcggcgacgtcgtccctttgacgagcggcgaagacgtgcccctcacggcgcaggtcatcgtgccgatcgtgtcgggcggcgactgtctcggcgcggtggcgcttttatcgtccgaagagggcgcgaaaatcgaaagcggcgcggtcaaactctgccaactcaccgccaacattctggcaaatcagttcgattgaacgaaggcgccgcgtttcggtgccttacatatgaacggacaaagttttttaaagggagcgatcatcatatccgtaggcggctttatcgccaaacttttaggcgcgatctatcgcatcccgctcacgaatgtgctcggcggggagggaatgggcatctatcagatggtctatccgctctattgccttttactgacggtgtccgccacgggcatcccttcgggcttggcccgcgaaatttcgcacgcccgtgcgcggggagacgaatcccgcgtgcgcggcgtttttttacgctcgctcgctctgttttccgcgctcgggctcatcggctttgccgcgatgctcgtcctcgccccgatcatgagccgcgtgcaaagcgaaccgaccgcgcaggcttcctacgtgatgctcgcgcccagcgtatttttcgtttccgtcatctcctgtttccgcggatactatcagggcaaaagcaactttacgcccaccgccgtttcggaaattttggaacaggcggtcaaagtggggctcgggctctactttgcctaccgctaccgcggcgacgtgcagacggcggtttcttataccctgttcgccgtgactttgagcgagatcgcggcgcttctttttatgatcgcctatcattttatcgcggtaaagcagccgcataagccgctttaccgtccgatctcttccgacgtgaaaaatacggctcttctgaaagtgaccgtgcccgtcacgatcgcggcgtccattttgcccctttcgaatattttggatagtattctcatcgtccgtatgctctcccgctatgcgaataacgccacgtcgctctacggcatttatgcgggcggcgcgaacactgtaatcaatctccccgtttccgtctgttacggccttgcggcggcaatcattcccacgatcgccgccatgtacgccgtcggcaacgtacagggcgcggaaaaacgcgcggcgttcgcgctcaaatgcaccttttttatctcggtgccgagcgccgcgtttcttttggtgtacgcggaacctacggcgcactttatcttccgttccatcggcggcgcggaaggggaggcgatggtgcggctcatccgttatatggcggtctcggctatctttttatcgtgcgtgcagacgctcgccgcctgtctgacgggtaagggaaagccgaaaatttccgcgatcgccatgggcatcgcggtcgccgtcaaactcgggctggaattctggctccttcgctacgaaaaaatttccattctcggcgcggcgatttcgtcgggggcgtgttatttggttgcgctctccatcgatttgtactatattataagggataagaaaaatttaggcaaagttttactcgattttatccgcatcgcttgcatttcggccgccgccgtgggcgcggcgttcccgcttcggcatatgggcgcgctgcctattctgggcgtctgcgcgggcgtttatctcgcgcttacgattttgacgggcgttttctcgcgggacgaattgagtatctttcaaaggagaaaacatggtaagtatcgtcggtctgggaattgacccctccgatctgacggagggtgcgaagcaagaacttctgagcggtaaaaaaatcatcgtcagggcggagcgcttcgccgccgccgtgcgcgcgctcggcgtttcgttcgaaacgctcgactgcgtatacgaaagttcgcgcaatttcgattctctccataaaaatctcgccgcgcgcgttctcggcgcggcaaaggaacgcgacgtcgtctactgcgtgcccggcagcgtggaagaggatatttccgcgcagatcgtcctaaaaaagagccgcggcgcagcggtgttcgacagcgtttccaaaagcgcggacgccttccgccgcgcgaagatattttcctgcaaccgcgcggcatattcggcgtacgatcttgaaaagtacatacgcgccgttttgccgctctgcgtgtacgatatcgactgcgacctcgtcgcgggcgacgtgaaactgaaactttgcgatatgctcggggacgaaacgccttgctttttcgtgaaaaacggaaaagtgaaaaaaattaaattgtacgaactggacaggcaaaaagaatacgacgagacaaccgcgctcgtggtggacgatacgccgctgcttaaaaaaaagcgctttgatttttacgatctgtgcgaggtgatgcgccgtctgcgcgcgccgggcggctgtccgtgggaccgcgcccaaacgcacgagagcatccgcaagaatatggtggaagaggcgtacgaactggtggacgccatcgacagcaaggacgacggcaagatcgtcgaagaggcgggcgacgtcttgatgcaggcggtctttcacgcgcaactcggcgaggacaggggcgcgttcgactgcgcggacgtcacgagcggcgtgtgcgaaaaactcattttccgccattcgcatattttcgggggcgacaacgcgaagaacgcggacgacgcgctctcggtgtgggagcgcaacaagcgcgccgaaaaggggcaaaagacgacgggcgacagcgtggcggacgtacccgcgggctttcccgcgctgctgcgcgcccagaaagtgggcaagcgcgcatcgaaagcgggctacgatttcaaagatatcgaagaggccgccgaaaaaatcggcgaagaactttcagaactcctgcaggcggtgaaagagggcgacgccgcacatatttccgaggagacgggcgatttgctgttttccgcggtcaacgtggggcggctcgcgggcgcggactgcgaagaaagcctgcacgagagcacgaaaaaattcgtcgcgcggtttttaaagacggagagcctcattttacaggacggaaaagagatgcaaaacctcgcgcccgaggaactttgggcgtattacgagcgggcaaaggaacaaatcgatgcagatccgtcccgttaaaataggtgatatcaccgtaccgaacaatctgtttgcggcgcctttggcggggtatacggatttcgcgttccgaaaactttgctatcgtttcggcgcgggactgtgctttaccgaaatggtgagcgccaaggggctgaaatacaacaatgaggggacgcgcgcgctcctttataaggcgcccgaagaaaaaaacacggcggcgcaactgttcggcagcgatcccgagatcctgcgcgcggcgtgcgagagcgagacgctcgcgccgtttgagatcatcgacctgaacatgggttgtcccgttccgaaaatttataaaaacggcgaagggagcgcgcttttaaacgatctgccgcgcgccgagaaaatcatttccgcctgtaaaaagagcgggaaaacgatcaccgtaaaattccgtatcggcgtggacgaaaagcatatcgtcggcacggaattcgcgaaaatgtgcgaggcggcgggcgcggacctcgttaccgtgcacggccgcacgcgcgacaaatattacgcgggcgagccggactttgccgagatcgcgcgcgtaaagcaaagcgtgcgtattcccgtgatcgccaacggcggcgttttttgcagggcggacgccgagcgcatgatcgaaaaaacgggcgcggacggggtgatgctcgcacgcgcgatcctgtacgatccgcatgtctttgccgagatccgcggcgagagcgaaacgtgggatatccgcgccgccattctacaacagatcgaagatatgctgcccgtctgcggcgaaaaatttacggtggtgcagatgcgcaaaatggcttctttttacataaaggggcgtcggaactgcgcgcagtataaaaaccgcttattcgccgcggacaacctttccgctctccgcgcgctaatagatgaaattttcgcatagtgcgcttcgccaaacttttcacagagttgttgacaaaaacggggaaatcatgtacactgaacgcatatgtttttagagggcgctgtgcgcgacaaccgaataaaagcggatgatttcggggcggggatcgcgcgctttacgaaaaagcgcaaagagcggttctgggaactggattttttgcgcggactttgcgtcgttttgatggtgttcgatcacttcatgttcaatatgatggacgttctgcccgtcgtgaatgaatttttcggaaccacgctggggcgcgaactgtccaaatatgccctcgtttattggaagggcgatttccgcaacaccgtgcgttttttcgtcatctgtacgtttttcgttctgtgcggcatcagttgcacgctgtccaaaagcaatttcaagcgcggatttctgctcgcgttgtgcgcgctcggcatcacgggcgtgacgggcgtgatcgaaagttattacgaaggatttatcgtgagattcggcgttctgcacatgctcgccgccgccgttctcatgtatgcggtcgtcgatctgctcgcgcggctggcgcttttgcccgtgaaaggggcaaaagcgaaaaagatagccgagactgcgctcggctatctccctgccttaacgggattcgtactgctttgcgtctatctcacctgctacggaacgttttcatgcaaagaggggtatccgtttttctattcgacggtgatgccctcgtcggataaaaatcaatcggcggtttgggcgatcttcgtttacgtcaagcattatcaattcgattcggcggattatttcccgatcttgccctgggccacgatggtcttgctcggcagcgcgattggccgcgctgtctatcacactcccgcaaaatacgctttccgcccgctggacggaagttggaacaacggcgtctgttttttgggacgccacaccgcgatcatttacctttcccatatggtcgtgatccccgttatcaccatccttgcggtggcactctattctctgttcgtttgaggtggcattttgtttgaacgcgaaattactcccgcgctttccatgtaccaggcggcgcgcctgaatctgtcgggcagtaccatccgcacggcgatctccttttacgggaaccgcatttctttcgatcaagtattcgtactcatcgatgcgcttgcggaaagtttttccgcgcgttttcatatcggaaaaggggatacgatcacgctttgcatgcccaattctccctccgcgctgctcgccttttacgcggcgaacaaattgggcgcggcggtcaatcttgtgcatccctacatcccgcccgaaaaattgtcggagagcgccaaaaagacggacagcaaactcatcgtcgtatacgatgcctatccccatgcgggcgaggaaaaacccgctttcggcgtgcccgttcttgaaagcgactgcggttggttcatgggtgcggcggcaagggcgtattaccgcatgaccaataaaaaactcggctggggcgaaaaactggaaaaactgctgaaaaagaagcggggcccttcgctcccttcggtcaacttcgcgcaagccgagccggcagtctatctcgcgagcggcggcaccacgggcgagccgaagatcatcgtccacaacaattatacgttcaatcttctgtgttccaaggcgcaggagtttttgagcgaaccgctggaaaattacgtttcgctctacaacgttctgcccatttttcacgggttcggactatgcatcaatatgcatatgtgcatgatcatgcgcaggacgaacatcatgtgtatcaagttcgacgcgaagcgctgcgcgcggcagatccaaaaggagcgggcgaacattctgacgggcgttcccaccatgtatttgaaattgatgggagaaaaaactttcacgggcggcgacctttcttccattaaggacgtgttcgtcggcggcgacagcgcgccgcgcgcgctcatcgaaaagtttgacgaagtcttaaaacgcggcaacagcaacgcgcatatgtacgaggggtacgggctgacggaaacggtgactgtttgtctcgtcaacacgcgcgagcataaccgccccggctcgatcggctatccgctttccgacacgcgcgtatgtatcgtgaagaatggcaaaaaactgcccgcgggcgaggtgggggaaatttatatccgcacgccgctgtttatgcagggatacttggggaacggcgaacagcctttcgagcgccttgaaggcgagacctggctgaaaacgggagattacggatatctggacgaggacggttttctctatttcaaacagcgcatcaagaacatgatcaaggtgagcggcgtgcccgtgtatccctcggagatcgagagcgtggcgcttttatgcccgaaagtgaaaaaggcgtgcgccgtgggcgtttcggacacggtgaaggggcaggtcgtaaaactttacgtcgaaagcgcggacggggattcgctgaaagaagagttgctttcgctgtgccgtgcgaaactcatcgcctacgcggtgccgaaattcatcgaggtgcgcgatcgcctgcccgtcaatctgatcggcaagatcgacagaaaatctttggaagaggaaaatccgaaaaatacttgacacaacgcgcatcctattgtaaaatgaaataaacaacgaaatatgtcgaacaaaaacgggtacccgtttttgttttcccgtcgggaaaacaaaaacgggtacccgtttttgttttcccgtcgggaaaacaaaaaatcggttcacggaaaaaggagcgtcatgttctgtaaatattgcggaaaacaaatcgacgacgaagggggcagtttctgcccgtactgcggtaaacatttgctggaaaattgcccgcccgccggcagtccggcgcaaccgccgccttatcccgcgccccgttacaatctgcaggatctgccgaacgggggctggacggtgctgggattctttttcccgctcgtgggatttatcctctacctcgtatggcagacgacttttccgatccgttcgaaactgtgcggcaagggcgcgctcatcggcgtcattgcggaagttgttctcgtcgtactgtacataatcgttattttcgtgataatagcggctgcctcggcatcttatcggtacggtcagccgtaatataatttaatcgggaggatataaaaaatgttttgtaaaaaatgcggaaaagagatcggcgacaacgagacctactgcacctactgcggcgcgccgcagaacgacgtcccgcctcagcaggcgccgcccgcgtattccgcgaatgcgccggtagacggcagcagtttcggatgggcgtttttaggatttttaatcccgcttgtcggtctgatcctgttcctggtgtggaaggacaccctgcccctccgctccaaatcgtgcggcaaaggcgcgctcgtcggcgtgatcctgtacgtaattttcatcatcatctccgtcgccataggcgcctgcgcggcggcgagcgcgtacgactattacgcggccgtattgctttaacgaaaaaagagcctttcgcaaagcgcgaaaggctctttttatttcaacagatagcaactcgtaaaggcgatggtctgtttaccgtagttgtaggggagggaagacaactcgcatacgcggctgacccacagcccgtaggcttccatggaagaatacgaatcttcgggaaagcggcagggcgcgtcgggatatgtacactgtttgcagcgcgcgcaggtgcccgcgcccatggcgagaatatcgtcgtattttcctttcagtatacgcatcatggaaataaaactcgccgcgtgttttttggaagtttcttcgatggtttcgaaatcgaaatcgtcctccatcttgccgaccgtctgcaccagcatgccgaaagaatactttttggcgcgctctgtcgcctcctcgatgctgccgcacgcaggcggacagcgccagttgcgtccgtaggcgctgcacttgtccgcgcggcacatatcgcgcacttcgggcataaagaccacggctttgaggttgagttcgcccgccgcggtaaaaccttcccgcaaagcgagttttttcagttcttctgcgtcgtatcgcatatcaatgtaccattttgtcgatgtctgcgcgcttgcacatgacgatgagacgctccgatgcgttgaacacgtaatccgcggaaggcaggggcgttaagttgctgccgcgcttgatcgcgaggatattgaggttgtatttcgcgcgcacgcccttgtcgcggatggttttgcccgcccaacttttgggcgtggggatctcgaagatcgcatattcgggcgtgagttgaatgtagtcgaaaatgttgttcgcgctgtacttgaccgccagacgctccgccatttccttttcggcgtataccacgttgtccgcgccgtttttgagcaggaattttgcctgtatttccgtgcaggcgcggctcagaacgtattttgcgcccaattcctttaacagcgacgtcgtttccagagaggattgaaaattttcgcccacggacacgacgcaaaggtcgaagttatccacgccgatggattcgagaacgctttctttcgtcgcgtcgccgatctgcgcggtggtgacgaaggggaggatctcattgactttctcttcgtcggtgtccagcgccatgacgtggttgccgagcgccgtgaatttttttgccatataggtgccgaatctgcccagccctataatcagaacggatttcataaaacctccagaattttatcagccgatgcgtaccgcttcgtgcggcaattccgccgtgggcgcgctcacgtctttgaacatgagcataaacgtcaaacaacccacgcggccgagatacattaaaagcgccaggatcatctgcgaagccacgtgcagatcgggcgtgatgccgagggaaagtcccacggtgccgatcgcggaaaatacttcgaatatcacgtcggtaaagcccgcccagccgtcgatgagcataatggcgagcacgcccg

SEQ ID NO: 49 - DNA, 6149 bp, Unknown
  16S sequences of unknown bacteria
agtgggacggagcttcgccgcgcgcagtgcgcgaaacaggcgaagcggaagtccaatgagcaaaggagacttgcaagcggtagcgtagcaaggcgactattgcgaattgtggaacgaagcagcgcgaagtaagcccaataagcaagggagggccgcaagcgagctctgcgagcgcagcgaaccgaccattgcgaattgtggatagcttgctcccccgtccaccagcttgtcaaaaaggcttttttgacaagctgtgatatgatattgcattatggaggtacaaggaatggattttgcagggattttgttcgatatggacggcgtgctggtggacagcgaacccgtgatcaccgaggccgccatccgcacgctgcgggaatttggcgtttcggcgcgggaagaggactttaagccgttcactggcatgggcgaaaaccgctttatcggcggcgtggccgaaaaatacggcaagccctttgcgccggaaatgaaaacccgcgcctatgaaatctatgggcaaatcgtggatcaacatttgaaagtgtatgcgggaacgcacggcgcgctgcgggcgctggccggatacaagctggcgctggcttccagcgcggatctcgtcaaagtgcggcacaacctgcgcgtggcgaacattcccttttcgaccttccaggcgatggtcaccgcggaagacgtggaacacaaaaagcccgaccccgccattttcctaaaagcggcggaaaagctgggcctgcccagcgcgcgctgcgtcgccattgacgacgcgattgccggcgtgcaggcgggcaaggccgcgggctgctataccatcggcgtcaccaccgcgtttcccgccgaaacgctcctgcgcgccggtgcggattgcgccatcgcggaaatcggcgaactgcccgcgctcctggcgcgcggataactcggcttggacgaagggccgccgcaaaaaaagaggcggccctgatcgttgacagcgggaggagacaacccctcagtcggctagcgccgacagctccccttagacaggggagccttttggaaagtggcaccaccgcaggaagtagcactgtccaaaagcctcccttgtgtaaagggaggtggcgcggcgtagccgcgacggagggattgaccaaaggggcgcacgaaggccgccgcctgtggcggaaacaggccgtagtaagcccagtgaagcagggagtaccacaagcgagcttgcgagcgcagtggaacgaccatgctgaactgtggaacggtggcgcggcgtagccgcgacggagggattgacaaagggaagcacgaaggccgccgcaaaaaaaagaggcggcccttcttgacagctttagtaattcttattatactattgctaaaccatcttcactgccggaggccaacatgggaaaagtgaccagcaaagacgtggcgcaactcgcgggcgtatcgcaaacgaccgtttcttttgtgctcaacaagcgctccagcgcctcgatctccccagaaacgacagaaaaagtgttgcgggccgccaaagcgctgggctatgccattccccgcagagagcacaaaaagcaccccatcactttgggcctgatggtgccaaccctctccaacatgtattatccatttttgctgcagcacatcgaaatcgaggccaaggcgcgcggcatccatgtgatcattttgaacatcctgcgcgacagcaaaaacgaagccgcgtatttcgaatacctgcgcaacggcaccgtggatggtatactggccctctttatgccacaaacggacattcccaaggagctaccggtggtgatcgtgagcgaaaaccagcccggcacgctcacggataccctgtcgctcaacagctatcaggccggatacatgctcgcggaccatttgctaaaattggggcatcgcgacattgcctacatctccagccccctgtccaacatcaccagcgcccgcaaataccggctggaaggcatccacgcctgtttcagcgaagtggggctggaacaccgcatccaggtgctaacggaaaccgccgaacaggaaattcacgacaccgcctatgaatacgattgcggctattcgctcaccaagcggcttttggcccagcacaccagcgccacggccatcgtggctgtgaacgacaccactgccgccggttgcatttccgcgctgcaagaagcgggcctgcgcatcccgcaagacatggccgtagcggggtttgacaacctgctcatcgccaaaattttgcagctcaccagcgtggatcagatggcctcgcacgcgtgccgcgtcgccctggatatgctaatcgaaaaaattacccgcccccatgccagcgtgttgcccataaagatggagtatatgccccagcttatcgtgcgcgcctccacccagtccggcgcatagccgcccaacaaaaaaggcatattcccacgccgctacgcgccagcgcgaaaatatgcccttgcgttaaaaacccgaggcgcgggcccggccgcccgcgcgatacgcgatagaaattttgccccaaatttgcgcatgcgcaaatggactctagccgatgaggaaaggcttgatgtcctccatcagatcatcgcaattgtcattgtacacttccaaagtgatgggtttagaaagatccaaactaaagatgcccaaaatggactttccatcgaccacgtgccggcccactctcagatcaatatcatacggataacgattcgcaatgttaacaaaagatttaacattttgcgcgaggctaagcttaatattcactgctctcataaatcgaatcccaacctttcacagatagcatcctcatctcacataataaagaatgaatattacgattgcaaggcaaaaacgcgcattaacgaatatttaattgccttgcaccgcctcattgggatgcacgctgggatcctgaaaccaggtatattcgccatgccagattaagttcaccgtgcccagcgcgccattgcgctgcttggcgatgatgacctcggcaatgttggtcggttcgccgcccatattgtaataatcctcgcggtgcaggaacatcaccacgtccgcgtcctgctcgatcgcgccggaatcgcggatgtcgctgagcaccggccggtgatccgagcgcccggcgggcgcgcgggaaagctgggaaagcgcgatgatgggcacgttcaactcctgcgccaggcctttcagcatgcgcgaaatggtgctcacttcctcctggcggctgccaaaccggccttcggcggacatcagttgcaggtaatcaatcatcaccagatccagcccgctctccatttgcagccgccgggccttggagcgaatctgcgccacggaaaggccgctggtggcgtccacaaagatggccgcgtcgttgatggtggtcatggcgttggaaagcttttcccagtcttcttcctccaggcggccgcgccgcacattttgcatatcgagcttggcctctgtgcaaagcatgcgcagcgccagttgctcagcgggcatttccagcgaaaacaccgccgcctttttcttgcagcgaatggccgcgttttccacgatgttcatgccgatggcggttttgcccatggacgggcgcgcggcgatcaaaatcatttccccgccgtgcagcccggtggtcatattgtccagttccgtataccccgtggggacgccgcgaatctggcccttgttttcaaacatctcggcgatcagcgcatacgtatccaccaggatgggctggatggggcgcaactgctccccgccgcggcgcatggcgatgtcataaatgcgcttttccgcccgctcgagcacttcttccgtttcctcgcgctgggcgtagcattcctcgctgatggcgtcgcaggcgcggatcaatttgcgcagcgtggagcgcgaatccacaatgcggatgtaggcgctcacattggcggcgctgggcaccgagcggctcagttccaccagcgcgtcgatgccgcccagggcgtccagccggccccggcggcgcaattcctcatccagcgtgacgagatccaccggccggcccaacgccgcgatggccagcatggcggaaaaaatctccgcgttggcgggatcgtaaaaatcctcgctggagaggctttcctgcgccagcagcaccgcttcgccgctgcgcatcatggagccgagcaccgcgcgctcggcctccatatggttggggggaatgcgtgattccatggtttacttttcctcagccacaatgttcacgatcatccgcgtggaaacgcccgcggccaggcgcacggtggccagcacctgccccacggccttcaccggctcttccagctcgatcttgcgcttgtccacttccacgccgtgctgcgccagcatggcgtcggcgatcagttcgttggtcacagagccgtacagcttgccgttttcgcccgcgcgcatcttcacgatcacgactttccccttcagctcgcgcgcctgctgctccgcctgctcgcgcttcacatcgtcgcgatgcttggccgcgcgcttggcggtgtcgatggcgttgagcgcctcattggtggcttctcgcgccagcttgcgcggcaaaagaaaattgcgcgcgtatccatcggagacttccaggatctgatcctttttccccgttcccttcacgtcgctaagcaggataaccttcattcaaaatccccctccgtttctgtgatcctcgtcgttttgcgccttacgccgcttgcggcgcagggtgacgatcccctgcgagccccacatcgcgctcgcgaagccgatgagcgccagcgccgatatgccgccgtattgcgtaagctgattcaaggcgaacaggcccaccaaaatccacgtccgctttccgcgcgattgccccgagcgaaccatcgcccggtcgaccgccgccaaaccttgcatggaaaacgcgatgtccgcaatggtctggaacaccagataggcgggcgccgccgcgtccgagcggttgaacagcaaaaagtacagacccgtaacaaagcacagcgcggcaaaaatcgtcagatcccggcccaagcgccacttgtccagcgtcttgtgttctatgtccgcgccgcgccgcgccagcatggtggacggcacgtggcagcacaaaatccccgaatacaaactggaactggcgatcatcgtgggcaggctgagccgcagcatggtgttttgcagcgccaacgtctcctccaaaagctgcgcgcgctcctgcgcttccagcacgccatgcaataaatcgatgccttccgcctgcggcaattgcaccgcgcccaccatggccagataataatcgacaaatcccgcgggcatcgcgctcagctgctcgcccaccatctgcgtgaacgcgtcggccagccccatgcccgtaaccagcgtggtggcgagcaaaaaacccgcgaagcccagcgcctgcgcggccacggccgccttcatgcgcaggccatagcccgccttgcgccacagcaaggcgaagcccacgcacgcgggcaacgccaccaggagcagggcagcgcccgccccggccacgcccatcgtgccggccgcgctcgcgacgcacagcgccgtcgaaatcaccgcgctcaccggcccaaagcgcgcgtacagcaccagcagcaccagcaccggcaccgcaaaaaacacactcaatggcaacaaaattggcatgcccagcaccgccagcgccaggccaatcgcgcagcccgcgatcgtgcgcccgatcgaatattctcccaaggcaacctcccttgcggcccgctggccgcggtttcctgcccgcgccccaaaacgcgcggcaatccaaaaaacgttcttttgcgcgccaaaaaaacgcgcgcgccccgttgttgccttagtataccataaaaatgcggcgcattcaaggacgcaatgaaaaaaaccaggctgcgcaaaaaagccgcccccggcgaactgccggaagcggcttctgcgtgtcaaaaaagtctttttgacacgctggtggacgggggagcaagctatccacaattcgcaatggtcaccctgctgcgcctggcggcttgcagtgttcccgcctctgttactatataagagccccaagaccgaggcagccagtcgcggcgcgggacaac

SEQ ID NO: 50 - DNA, 7620 bp, Unknown
  16S sequences of unknown bacteria
tcgtctcagaggcgggcgtcggaaccatcgccgcgggcgtcgccaaggcgggcgcgcaggtcatcctgatctccggctacgacggcggcaccggcgcggctccgcagtcctcgattcacgacgccggtctcccgtgggagctcggtctcgccgaggctcaccagacgctcatcaagaacgggctcaggacgagagtaagactcgagacggacggcaagctcatgagcggtcgtgacgtcgccatcgcctgcattctcggcgcggaggaattcggcttcgcgaccgcgccgctggtgacaatgggctgcgtcatgatgcgtgtctgcaacctcgacacctgcccggtcggcatcgctacacagaaccccgagctcagatgccgtttctgcggcaagcccgaatacgtcatgaacttcatgaccttcatcgcagaggagttccgcgagataatggcaaagctcggcgtccgcacagtcgacgagctcgtcggacgcaccgacctcataaagccccgcgaaaagcggatcacgaagcgcgccgaaaccatcgacctctcgtcgatcctcggagacagagacgggaagaccgcgcacttcagtaagaaggacgtcttcgacttcgagctcgaaaagaccctcgacgagaacacgctcctgcccggcttcgagccgttcatgaagaaaaagaagccgcacgagatgaacgtcagcgtctcgagcaccaaccgcaccttcggaaccatcctcggctccgagatcacgaagagattcggcgattccctcgcgcccgacacctatgtcatcaaagcgcagggcggcggcggacagtccttcggcgcgttcatcccgaaggggctcacgatcgagctcaccggcgactcgaacgactatttcggcaagggtctctccggcggcaagctcatcgtcaagccgtcccccgacgcggcgttcgttccgagcgagaacatcatcatcggcaacgtcgcactctacggcgcgaccggcggcgaagcgtacattaacggtgtcgcgggcgaaagattctgcgtgagaaattccggcgctgtcgctgtcgttgagggctgcggcgatcacggctgcgaatacatgaccggcggacgcgccgtcgtcctcggcagaaccggacgcaacttcgcggcgggcatgagcggcggcatcgcatacgtactcgaccgcggccacgacctctacctgaagctcaacaagcagatggtcacgatgagcgaagtcaccgaacgccacgacagggaagagctgaaaggtctcatcgaaaagcacttcgccgcgaccggctctcctctcgcgaaggaaatcctcggcgatttcgagaactggctcccgagcttcaagaaaatcctcccgatcgattaccagaagatgatgaccgccatcgggaagctcgaggaaaagggcatcccgcacgaacaggcaaagctcgacgcgttctatctgacgcagaaataagcagcaaaacaaaaaaggaaacggagctgtcgatctacggcagctccggtgataacgaaactaactttcccaaaagggaagaaagagatacaaaatgggaaaaacaacaggtttcctcgaatacgagcgcgaaaacaacccggcgctcgacccacgcgagcggatacgcaattttaacgaattccacccgccgctcgacctcgacaaacgcagaaagcagggcgcgagatgtatgaactgcggcgtcccgttctgtcagtccggcgtcaaattcggcgggatgttcagcggctgcccgctccacaacctcatccccgaatggaacgacgaaatattctccggcaactggaagcaggcgctctcaaggctcagaaaaaccaacaacttcccggagttcaccggaagagtatgccccgcgctctgtgaagccgcctgcacctgcggcatgaacggcaagcccgtcacagtccacgaaaacgaactcgccatcgtcgaagaaggctacaagaacggctggatcaaaccgcatatccccgaagtcagaagcggcaaacgcgtcgccatcgtcggttccggtccgtccggtctcgccgccgccgatcagttaaaccagcgcggacacgacgtcaccgtcttcgaacgcgacaaaaagcccggcggactcctcagatacggcatcccgaacatgaaactcgaaaagcggttcatcgaccgccgcgtcgcgattatggaagccgaaggagtcagattccgctgcggcataaacgtcgtccccggaaactgcgagaccgaaaactcgatcggcgccgctaaactcgaaaaagacttcgacgccgtgataatctgcgccggagcaaagcaggcgcgcgatctcagcgccgacggacgcgacgccgacggcatcgtcttcgccgttgacttcctctccgacgccacaagacgcctcaccggtgaagaaatccacggcgcgccgaccgccgaagggaaaaacgtaatcatagtcggcggcggcgacaccggcaacgactgcgtcggcacctcgataagacaaggctgcaaatctgtcatccaactcgaaatgatgcccaaatccccggacgagcgcgccgcgaacaacccgtggccgcagtggccccgcgtctgcaagaccgactacggtcagcaggaagccatcgccctctacggtcacgacccgagaatctacaccacaaccgtcaaagaattcctgaaagacgacgacggcaaactcaaagcagtcgtcacagtcaagctcgaatccaaaaaggacgataaaaccggaagattcatgatggtcccggttgaaggcaccgaagagacactcccatgcgaactcctcctcatcgccgccggcttcaccggctgcgaagaccagaccgcaaccccgtcgcccccgccgcggagctcaactacaacgcccgcgggaacatcttcgccgccggcgacgcaagacgcggtcaatcactcgtcgtatgggctatcgccgaaggcagagcctgcgccaaggaagttgattcgttcctgatggggtacagcaatatgttataaaaggcagggggaaaactttttcggagaaaaagttttccccctgcaccccttttcaaaaagctttatacagggattctttcccgattgttcacaatctccgcttgattttttctcccgggcagggtataatagagacataagttagcggtggctaattgccgcctgaaaggaatgatctacactatgctcgcatggctctctcaatatatcggcacaatcatcatcatcgccgtcctcgtcgtcatcgtcgcgctcatcatcagaagcctcataaaacagaaaaaatccggcaaatcctgctgtggtgggtcctgcaaaggctgcggcggcgcctgccatatgcacgacgccgggaagaaataagcagtttgtggaattctccacacacgacgctcacaatgtggacacttccacacaacaatcatggtcatactcatttttgtgggtatgaccacttttttatttcgaaatgtggattattccacagaaatatgttggatttcttcggaaaacctcgctttttctcttgacttccgggcgggaatgtggtataatctatatcatcaaaaacacaggaggacaccatgaccacaggtgagcgctacgacataatcatgaacgaactcgcgcgacaaggctacatctcctgcgacagcgccgccgcgcgctgcggcgtctccggcgagaccatccgccgcgacctcaaagcactcgaagaaatgggcaagctctcccgcgtccgcggcggagcgacactcgccgactccttcagcgtccccgacttcccgccgctcgacgtccggctcgaactccacaaaaacacaaaaatcgaagcagcgaacatcgccgccgacctcatcgaagaaggcgacaccatcggtctcgactccggcagcaccgcaaaccccttcgctgaaatccttgccggtcgcttcgaaaagctcaccgtcgtcaccttctcgctcgacattgtacgaatcctcggcgacaagcccggcataaccatcctcgtccccggcggctgctacctcagcggggaacgcatattcagcgggttcatggcggaacaggggctcggcagattccgcgtcggaaaatccttcatctgcccgtcctccttctcgccgacgcacggaatcggaatgttcaagcccgaattctacccgctcgagcgcgcgctcatgtctatcgcggaacagaaaatctttatcggcgactcgtcgaaattcggcgtcgtcgcgccgatacggctctgcgacgcgggggaggcggacgtcattgtgtccgattccgggctcgacgagaaaacagcggacgaattccgcgcggcgggcgtcagggtcatcaactcacctctacacaaaaacgaaacggagactcactgatatgaacaagaatccctccggcatattcaggaacgccgtctggataacgccggatcagaacatcggctccgcgtcgccggtcatgacaaaacgcttcaatatttcaaggaaatccccgggagccgtgctttacataaccggtctcggcttcttcgaggcgcgcctcaacgggaaacggatcgggaacgagtactttcagccggtcgcgtcggattacgagaaaagaaaattcgacaagctcacctacccatgccgcgacagcttcacgcacaggatatactacaaccactatgatatctcggaatacctgaacgagggggaaaacctgctcgaggttcagctcggcggcggctggtatattcagaccgagagaatcgccgagggcaatatgtcatacggcaagcgctgcaaatgtatcttcgcgcttcacgccggggacgaaaccgtggtctcggacgggagcgaagaatggaaaatcagccggatcatctactccgaactgttcatcggcgaggtcatcgacccctcggcggtctcagagacgcgccgggtctctgtggcggaagcgccggagtcagaactctcgccgtcaatcggggctcccgaccggcttgtcaggacgataacgccgaaaaagctcggagagaaaaacgggaaaaccctctgggacgccggggaaaacatcagcggcgtcgtccgcgtcgtgtcaaaagccggttattccgggaaaatcacgctcagattcgccgaggaaacaaaggacggcgagctcgatttcagctccaccggcgcgggctacacctgcttgtccgggaaaaagcagattatgaccgacaccttcatctgcgacgggacaagacgcgtcttcgagccgaaattcgtctggcacgcgttcagatacttcgacgtcgaaggggagaccgaatcctgcgaggtgctggtcatccattcggatgtcagcgtcacgtcgacgttcgagtcggactccgaggggatgaacttcctgtatgacgcctacatccgcaccgaactcgacaatatgcacggcagctttccttccgactgcccgcaccgcgaacggctcggctacacgggcgacgggcagatcaccgcgcaggccgcgatgctcacgctcggctcaaaggaattctaccgcaagtggatacgcgacatactcgactgtcaggatccggaaagcggtcatatacagcacacggcgccctttatgggcggaggcggaggtcccggcggctggggctcggctgtcgtcgtcgttccgtaccggtactggaaaaatttcggagacaccgacattctccgcgaatgcctgcccgctatcacgaaatggatagactacctcgtgtcgcgctcggaaaaccaccttgtcgtcagagaggaagagggcggctggtgcctcggcgactggtgcacgctcgaaaaatgccggattcccgaaccgctcgtaaacacatggtatcttgtaaagcagctcgggatgcttgatgaaatctgcggggcgctcggcgaaccgtttgacgagaaatacgagacgctccgcggcgacgcgctcgaggcgctgcgactgacctatttcagcggtgacacgccggagaaccggcagggcttcgcggtctttggcgcgtcgctcggtcttgccgacccggacgactgcgcagaatactatgacaggctcggtcattttgacaccggattcatctgcaccgacatactctgcgagctgcttttcagctccgggcacggcgagaccttctacaggctcctcgaaaacgacagcccgggcgggtatctcttcatgaagcggcacggcgcgacgacaatctgggaaaactggcagccattctgctcgcactgtcatccgatgttcggcgcgccggtgaggcagcttttcgagggcattctcggtctgcggcagccaaaaggctcgggcggatgggaaaaagtcgttttttcgccttatctgcccgaaaagatgaaccatgcgggcggaagcgtcacgaccccgcgcggcgtcataaaggtcagccttgaaagacgcggcggaaaagtcatctctgatatcagtcttcccgacggcgtcagtgtcgaaaaagcctgacgtccgccggaacagtataatcacttatttcatctgttatattatctgtattatcttcattttttgcgggaaagcacaggacaaaacgcatatcagtgctcccctgaggttcagacatggaaaaacacaatcaactcacaggcagaaacgcgcgggcgttcatgctcctctgcgcgatggtctatttcacaagctacctgacgcgcaccaactacaccgccgtcatcctcgagctcaccggcgcgctcgggatcacaaaaagcgaagccggactcatcagcaccatcgccttcttcacctacggcgccgggcagctcgtcagcgggttcgtcggggacaaaatctatccgcgccggctcatcgcgttcgggctcgcggcgacttctgtctgcaacttcctcatgagcgcctgcgggagcatcgcgcccatggcggtcatctggggcgtgaacgggctctgtcaggcgatgttctggccgccgctcgtcaggctcatggctgaaaacctgaacgacgacaactacagcaccgcctgcatctgggtctcggtcggaagctcgttcgggacaatcggcgtctatctcgcctgcccgcttcttataaaactcggcggttggcggctcgtcttcattgccgccggaatctgcggcgtcctcatgaccgcactctggctgatcgcctccgggaaactgctgaaaaaccgcatacgcgaaaacgtgcgcacagacgacacggctcccgcggcgacaggcggaatcggcgcggcgggcttcggggttctcgcggcggtctgcctcgcgattgtgcttcagggaattctgcgcgacggggtcacgacgtggatgccggtgctcgtctcggagcagttcgggcttcctaccggcgcttcgatactcaccgggctcgctctgccggtcttctcgatgatcagcttcaacctcgccgggtggttacagaaaaaacttcacagcgagatgatctgctcgatcctgctgttcggggtcgcggcgggggcggcgctcgcgctcagaatcttcgggttctccggggacgggtcggtcgtcaccac

SEQ ID NO: 51 - DNA, 9531 bp, Unknown
  16S sequences of unknown bacteria
gaccggatttatcagcgttacggaggagaaggatcctttgatatttcgctggtacccaatatgatgagtgtggaatttgcaccgccacgctgttctgccgatggaaagaaaatgatctacagcgcctctctgaagcgaaacagtgctcccggcactcatacgccgctttggatgatttcttcgatttgggaatacgattttgaaaccgaagagacagaaatcatctatactcagaaagacggcggctgtatcggaagaactgactggatgaatgatgacagcggactgacctttgtctcttggtatgaattccaaggatctcgagacaatatcaattatctggataggaaaaacggtagagtatctgtgattttcccgtatacggaggaacattataacaatgtaacactgttgccggcggatgcacatagggtgacattcacatcttcttctcactatgaacagctcagtgactcggaaacttaccagtatgatctgaaatccgggaaagtacagcaggtcgatctgaaatatgccggagagaaggcaatactggagaaattcgtgtatgtgaagatgaaaggtgacagaaaggattctgtccgatagccttgtcaagtaccaaacacgtccataaatttaccggttgcatatcatgtattgaaataaaaacaaaaagcagctattctataggtagatcgcaggagcgaaaaaagtgaaagatcaggaaaacagctgctttttcttatagagtatgtttgatatatttcagccggatatcgaatcattttacagtgaaagttggggcgaattgcgatgaagatggggtttcgtgttttcgagggggattaaaatgtcagggaaccggttcggtttttctatcaagcagaagtttgcagatccgcgttttctgctctgtttcacagtgatcaattattgtatttttctgctgtattactcttttttgctaatatttctgcagccggtcggaatcgctgtcatgctgtttgcagaagcagacgccgcagcggccgtcgataagttgttttatctgggggaggcggcaacggatcttctgctggtcgctttgatcgcaagtgcggcggtcacggcgtattctgcggcgaaggagcgctctgtgagatctgccttttacgcttttgccatgtttccgctgattctatcgaaattgagcatactcgtttatttcgcagcaaacgctttgagttgaaaacatcccgaaaatccggactccttccggattttcgggaagatcggtcaaaaccgggaaggggactcgagccgcttttcgatcctgccgatggtgaattccgcccagctgtagcagatcagataatcgccgtggtattgattgatcgctgtgatatctccctgcaggaatcgataataatcacagtcgaaattctggggggggttacggcgtagctgtttctggatttatgcagaatattttctgcgccggcctctttcagcgtatttttcaattcgaccatgagcgtttgaaaatagtttttacgcgcgctgttatacggcaggtcctcccagagcacggcgcaggcttctttcgtcgtcacgctgcagccttttcggtccacgagataggcgaggagttctttggcttttgcccgtttaaacgagagaggcttgccgtctaccgagatatcgaagccgccgaaggtggtgatgacacatcttttggctatgttctttaattttaaaaaggtcagttctctttccagctgttcttcttccaccggtttcaggagataaccggcggcatggatggagaaagcgtccaccgcatatttttcataactggtcacaaatacgacgggcaggttcggctgcagttctttcagctgttttgccagaaggataccgttggtatagcctaattcgatgtccaaaaaagcggcatcatagatctctctttccgcctcagaaagcgcctgacgtgccgaagtaaagctgtgaactgtgcacgacgggcggatccgttttaaagtgtcctccagattctgcagaatcagcggttcgtcatctacgactaaaaagttcattttctttctcctttgggatggaaatcgttactgtcgttcctttttccggtatacttcgtatttcaatttcccctttgcacagagcgagcagcctgtctcttacatttttgattccgacgtgtgtctttttttctttttcttcgccggagatctctgccggtctatttttcttttccggggaaaaacccgctccgtcgtctgtcactgtcacgataaaagcgtctccccgttcttcggagcggatggtcagagttccgccgtcttcttttcttcgtattccatggcgaaccgcattttctgcgataggctggagagtcagcggcgggatgcagaaatttatcgcctggatatcatagatcacatgcagccggtctccaaatctctgttgctccagatacaggtagctgcggacgtgttccagttcctgttcgaagggaatgggtgctttattgatcagcgagtccatatttgcccgcagaaattttgaaaatgcgctcacagattccccggctcgaacgggatcgatttcacagagttttcgtatcgctgtgagtacattatacaggaaatgcggctgaatctgactcagcatgatgtcgatgcgcagttccgccagttctttttcctgccgccgcaaggttatctcatgttcaaactgaatattgaccagaataaacagcagcgcgagggccacgccgagattcaccaccgcgattcccctcagagacatctgcagcgctcctcctcccagaggaacaaagatatacagcagaaagaatataacttcctgtcgggtcagctgctttcgatgcgcgatgacgagaacaagagatagcagatcagaggaacgatctgggagatgagaaaaagatctccccgctgatatccgctgtcatttatgtaaaaaataaatccggtaaaagggctgatcgccgcaaagaatatctgtgcgccgcatacggctgtgacaatcgtctgactcagctttttcatccgtccggaaagtttcagatattcttccagatagcgggcgaagaaatagagaacgaaagcagaggacacataaaatatgacggagaaagtggtaaggagaattttcatggacggttcggcggtatcctgaatcagccagtcggccagatctcccgcaatcataaaaatattgaagaccgctacgcccagaaagtaccggttgagtttctgacggtacctgcggtgatcgatcagatagacaatgggaatcagcgacaggatgatacttaatatatccagcgcgatattggcgtttatcatttgattcataaagtatcattctcctgttttttgtctgctcaattagaaaatatcggtgagaagccggatctcctctgctgttattccgtcgaaaagcttttctgctgattatttaaagcaaaaaagttgtaaaacctatatttatcataggccagaaacggaaaaatggcaagctgacgaaaaaggaatctgcggaaagcggcgggataaattgaaaaaggcaggttcatcattttcttgttgtccttttgtcgtcctttctctgttatagttacaaataaaaggaggagtttgtttatgagaagaggattggcagccgcgcttgccgcggttatggttattacagcggttccatcggcagcagcggcgcaggaaagtcattttgcttcccggggagaagtcgtgcagctgctgatggaagcggcagatgattataatccccagattaaaaagacagatatcatcaaaggatatggcgacggaaagcttcatgaggaggatacggttacccgggcacaggcggtgattatgctgaatcgggctttcggaggctttcctgaattgaaggggaataatctgcgtctggcgattccgaaggaaacgtttacagatattccggcgtgggcggaggaagagctcgctcctgcctttgaggcggggattgtcgcaggtacgggcgaagggctgttttttccggatcataaagtgacgacagagcagatgagactgtttattcagcgcgtctatgcgatttacggcacaaatccgaaggacagtttctattcctctgtaaataagaaagctctcgatacgctgcagattccggaaggcagcaatatcacgggtaccgcttatgcggtgcgcgacagggcaaatcagcaggttttgggtctgatcggcgagatctccggaagtactccggaaaaagacactccggaggaaaagattaaaatattgtatgataattttatggatatggaggcgcgcaatgctgccggtattgcgccgattgccgaagatctccgaagaattgatgcggtcagaagcgtatctgaattggatgatgttatgatacaggcggattccagatcggctctctcttctgacagactttactctcaccatcgacgagatggacagcggaaggtatctgacacttcttgaacctgcgtctgcagaactgacgaagcaggtatacagcggagaatcggaagtacagaaaaaggcttatttaaaatatatctccagctttctgactctctgtggagaggcgaaggaagaagcgcaaaaaacgcacaggatttttttgccttcgaaaaacagctttccgatgcttcacttaccattgcggaacaatatgatccaggaaaaacttataatatctacaccctgaacgagctgaagaaaatattttccggtgtggatattcaaagggcttttgatgagaccggtctgagtgacagcagcagaatcaaggtcagtgacaggggaaatatgacagagcttgcaggaatgctgacagatgcaaatctcgcggcggtcaaaaattatctgaaggttcgtctgatcgtcgagagttctgaatatctcagcgaagattttcgcaatacaaaggtgatttatgaagaagaatctctgggaaaaagcgggagcaagcctttgaatgaagaggcggcagaggtgatcgcagaagtccttccggactatgtgggacagatctatgccgaaagatattgttccgatgagatcatatccgacgtgacaaatatggtgcacgatattatcggagtataccgtgagagaatttcaaatctcagctggatgagtgaggtgacaaagcaaaaggcgattcgcaagttaaatacgatgcggatcaaggtaggcgctccggattacagcaaggtaaagccgtctgccgatcgtgcggatctgaagagccgcgacgaagggggcagctattatcagaaccggatagagatcgcgaaagcagaacgaatggaaagtgcacggctttccaaagaaactgtggacagagaagagtggattaccacaccgcagacagtaaacgctttctatatgccgagctttaattccgtcaatttccctgctgcattcttacaggcgccgatatatgatccggaggcttcatatgaagaaaacctcggcggcataggtaccgtaatcggccatgaggtgactcacgcttttgattccggcggtgcgcagtatgacgaaaacggaaacatcgccgactggtggacgcaggaagacaaggaagcttttgggcggctgggcagaagccgatatgcagtgggctgtaggagcggggattctcagcggcaaaggagacggcagattagatccgctgggcagcgccacccgcggagaaactgcggctatgctgcagagattcttagaaaaataacgatacccaccgcggttttccaaatgcggcacaggtgagatgaggatgttcccgctgtcaggcgggagcatccgtttttattatgcgttttatatattttgtatagttattgttaaaaaatggattatattatgttaaaataaaatttatcaaagaaaagtgcagatcttagtatttgtttttgtaaaattatccgatcagaatcattcgattttctcaaatgaaaaatgtccgtggaaaggaggcaaaaaatgaaaaaaattatgaaacgtaaagagggggtacgccgccttttttctgcgggaaagcgtccttcgccttttctgcgtatcctgttttctttctgtctgatcgcttctctggcgatttctgccgcaggctgcggacctgacgcaggtgacggatcggcggacgtcagttcggatccgggcagggaggtgacggctgcgcaggtgaggaactggtttggtccggctattaggaaagatatgccggatgataaagtagagtctctggcagatcagacgctgatcgtgatcggtgagagccggacggaggagggcgtgaccgttacgctgaacgccgccatgagagatgatcagcggattttcatgtcttttacggtagaaggtgagaaagagctgcagccggatatcggtccgctggacaagagcggatcctggatggaatcgcctcttgccaaagaacttctgaagagtcagatgccggatttgagtgaacaagagatcgaagcgtatctgacggaaatgaaagagcggagggaaagcggagattcgtggggaaacgcgggtcttagtctcactgctttcagggcggaagacggcagtcagggaattctggcacagcaggactggccttccggaacttcggataaaattatgatccatatggaaaaattcggcggaatcgaagtcccgttcgaatttgaggcagatataccggtgaaaggggaaccggtggaatataccggcgatatttcatttaccgcggcgggcggccaggagctgacgctgacgaaggtccgcatttatccgatgagcggaatctcggcggaaatgtatggcaaagacgtttctctggaatcgctggaggcagatgacgagttttataaatctgcggaaatcagcgcggttttgtggaatggcaccgaagtccgcggaagaggaagcggcaggcagtcggaggaggagcggatggtcgtattcatgaaggatttccaggaacaggcgattactccggaggacgtgacaaagatacagatcggagacgagtggttcgagctgagccggatgacgaaggctgcatcatagaggaacggccggaaaagtacgaggatagaatatcttcgtacttttctgtatcttaaggagaaaaattctgtgaacaagacagcattttttgatcctgtcgccgcagagaggaagatgattttgcggcggaatcgttttcagcgctttgaaagattgtccggccggaattctttttctgacgccgggacggcttcgcggatgagcgcggaccacaaaagaaatacgaccgacagtacggcggcggtgcggtaaggcagatgagaggtttcagcgccgaagacggaagtgactgccgacatgagaaacgggcagaggaactgcgccagatacagcgcggcggagatgagcggcataactgtggtggcggcggttttgccgttttttatcgaaactgctgatatgatgaaaggaatacctgtgccgttggccagaccgatcaggaaagagcctgctatagcgcctgtgaatcccccatgaagcgagagcaggatataacccgtcagaaagcacaccggcgctgcaaatttcatatatctgccgaagattctttttattgcgacaaaagcgagacctccgaagaaagcgataaaatccgcccacgccatgatcgcagccacatatttctgcgggatctgaccttccgccgccgtttccattgcgtaattcgccggatagataaagaaaatggtcatcagcagaaacatggcgatgacaaaaggatagttttctttgaaaattgctgtaattccagaatttttcggtttttcttcagataaaacgttttctgaagcgaaagctttcccgtcgccctttttccttttttcggcgtctgtctctgtttccgcaatgttatcgctgggaagaaagactgcgcacaaaacgatgctcagcagtcccagcagatagaccagaaaactcgccttccagacgatattcgccaacaggccggacagcagcgtggcgatgacgccgcccatctgattcatggcggaggaatatcccatcagcgcctcctgacgctgcggagagaaataaaaggagagcagaccggtagacagcggcatgataatacccacgccgattcccaccagagcccgggtgatcaggagcagtgcgatactgccgcagacgccggcagcgacgcctccggcagtgtaaaacaaaagccctgtcagaacgagggttctggaacggaagatgcggcacagcgcgggaaaacaaaagctggtgatcacgataaaaagcgccggaatactgatgatcatctgaataaacatcgggctgctgtcagaaaagtgatctcggataacgccgagagcaggcgctaccgcggctcctgccattacagtcagtaaggacagggacagaatactcggcgccagcatcttacgcgtattttgtaatttttgcatgtgaaaaacctccttcgatttgttttcgggaaaccggatgcggataaaaatatgtcgttctgaaaataccggcaaaaaaataaaggcgtaaatccgtttggacttacgcctttaagcaactcaacttataacatattttatcataaaaaacaaatccatttcaaatgatttttcatcatctgcatttttcaggatccgcggactgccggtcagcgaagccgcaggtctactgaacctgagaaaccgcggatttcgcgggtttcggcagttttacgatagcgccggtcggacattccctgacgcacatgccgcagtttttacacttttgtgggtcgatgaccgctttattgtcttccaccttgacggcatcaaatttacagatcttttcgcactttctgcagccgatacagcccgcctggcacgcttttctcgtgacggcgcccttgtcggtggaactgcatgcgacataggtcagactgtgcttcggaaccatagcgatgataccgttaggacatgctttcgcgcaggctgtgcagccgacacagttggtccgatccacccaggcgacgccgttgacgatgccgatggcgttaaatttacaggcctccacacagtcgccgtagcccagacagccgtgtccgcaggctccggcgccgccataaagagattttacagctttgcaggtagggatatcctgatattcgaaaattttatctgtcttgttgtcgtatccgccgcacaggacgacggcgtattcgccttccacagaaccggcttcgattcccatgacagcggccagcgcggaacttaccgagggtccgcctaccggacacagagttacgtccgcgccgctttccacgatggcgtttgcgtaatcggaacagccggcaaatccgcagccgccgcagttggccccgggaagagcttccgtgagctgttccactctttcatctacagggacatacatgatattcgctgcgatggggagg

SEQ ID NO: 52 - DNA, 32759 bp, Unknown
  16S sequences of unknown bacteria
cgctttccgacgtctggttcgccggagaattccgaaagggagcgatcggcaaggggtgagacgggcttgacaatccgcgacacaaacggtatattgaaagtatcttgaatgaaaaggcctcagccgcctgtggagatttcgattatgcggattcggaaataagcacacgaaaacgaagacagccgacctggaatatcaaaattccaggccgtttctgttcgcgttcgtgtgcttttttgcgtccaaaagcatcgtcgaacgcgaaagaggtggctttttcatgtcccgaaacatgcgcggaggagcgaagcccgccctgtgggtatcccagaattttctgaccgggcgggcggttatccgacggatcctcgatcaggcggccttgtccaaaaccgaccatgtagtggagatcggcccgggaaagggccatatcacggccgcgctcgcgcagcgatgcggccgggtatcggccgtggagctggacggacgattgtatgagcggctgtgccggacatttccggccggaggccccgtccggctctaccaccaggactttctcacctggcccctccccaaaagcgattacgtggtttttgccaacatcccgttttccatcacctccgccatcctgcggcggctgacccagggcagccatcctccccgagaggcgtggctggttatggaaaagggagctgccaaacgctatatgggccgcccggaaacgacacggaaatcgctgctgctcgccccatggtttgactgtgatatcgcctatcatttccgaagggaagattttcacccggccccaggggtggaagtggtgctcttccatttcaagcgcagggaagcacccgacctgccctggggacagcgccgggcgtacacggccttttgcgaacgctgtttcggcggcggagccgatgccctgcgtcggatcctgacccgcaaccagctgacggcggctctgcgcgatgcgggcctgccacgggatttccgctcggccgatatgcggtatgtccaatggctctgcctgttccgatgggccgaacggttcggcaaaaccggcggctagcctcctccacatggaacggcggaatccgggcatactaggagggttccaattttaaatatatggaggcatgaccgatgattacgtttaaaggcagccctctgaccctccagggcccgcccctccgggtgggagacacgatgcccggcttcaccctgaccgacacggccctcactgaagtgcgggataccgacctttgcggtatccgggtcttcctgaccgtgccgtctctcgacacgggtgtctgcgaccaggaggtgcggtggttcaacgaaaaagcggcggaattgccgggggtgacgattgtggcggtcagcctcgacctgcctttcgcccaggcccgctggtgcggcgggggcggcatcgaggccgtccgaaccctgtccgactacaaggagcgccgttttggaaaggcgaccggcacctatatcgaggagctcgccctcctcgcccgcgcggtcttcgtggtggacgaaaacgatacggtggtatacgccgaggtggtgccggaggtgagcaaccatcccaattacgaggccgtataccaaaagctccgggaactcgccggataagtccctcggatccacccctcctcctggaccctttcgcggagtgggcctcggatgtgcccggtatagaaaaagtccgcctcataaaagaggcggaccagggtgtgacgccgattattccgcgacgacgttcacgttcttcgcgcgcagcttgctgctgtttttgggatcaggctcggtctcaaacgtgaccttctggccctcggcgagggtcttgtagccgtcggcctgaatggcggagaagtgcacaaacacatcctcgccggcctcttcgctggagatgaagccgtatcctttttccgcattgaaccatttgacggtgccgttgtacatggtgggtcctccttgaaaaaaatagtggtaatcgtgtggcaaacaaaaaacccacacagcagtaaatcatcgtacgaacatgacttacaacccatgtgagctccgttacacgtcgtgattacggcaataagtatatcacggccaagctggtttgtcaatcgaattttcattaaaaaggccttgtggtaaaaattggcggaacagggaggcaacgtaatactggggacggtgctggttaagggacaccacgccgggcagccgcggggcccccacatggattttcacccccacatgccgaaagccccacagggctggcggcaccttggtgacaatgtcgttcccgttttcgacccgcagggttttaaatacccgtttgttgtaagatttccggaaagcgcggtttcccacccgcgggcagccgaagagcaggacttcataatccagacagggatagtggtattcgaggtcgacggcgcagagtacggccaaggccgcgccgtaagaatggccggccacccgtacatgccggacgtcggacgtgactgcacagtgaatccggtttcgtaccgaaggccgcttataggcatttaggaacccggaatgtacccggattttggggttgcagatatcataagggatacaggttttgaaaaaggtgagatccaccttccagtctttggctgaattggaaccccggaaggtgatgaacagggtatcgccctgccggcggagataacattggacgccattttcgtcgtcgatgacctccagcgtcatgccgggaaactgcggctggacctctttgtaggccagggcacagagttccatgccgcgcaaggtgtcgttgacgttcattgacatcacctccctaccaggatatggcggaggcgtgtgccctgtgcatggccatcatccccttccctgctcatggtctgcgatccaagaaatatccttatgccgccccacggaaaaacggccgaagccgaaaaggcgcccaagaccccctttttttatggacatatacctccgcaaattcttcaatggatagagaaaaacgggccctgcggcactctccaagtgccgcagggcctattgtcaaacgacgttatgaaaccgtcttccaaagcatccggttctcctgaaaatacgccgtaagccgcccttcctccttcaaatacgcgaggtaggaacgcacggtgtaaccggacaggccgtattgcaggatatccagagacatgccatgccggtcaaacagaagtttcaagatctcctcgccggtttggggcgacgcacaaatatcggccagttcttcgaggagttccatcgttttgtcacgggtcagggagacgagcggacggacatccgagacggcgtccgcgtgggccggcacatacagcgccgccgggagccgttcgatctcatccagcgtggccagataggtgcgcacatcgtacaggaacggcaccagatgcttttttaaaagctgttcgcccgtcaggctgtcacccaaaaacacgacgtcgtccggggtccggaaacccaccatatcgaagctgtgacccggcagcgggatcgccgtcaggccgccgggcaggggatcgggaagcggccggacatcgctcgttttcgccagcaggaacttggtacacaattccctaacggggtacccgccgtacaaggacaccggcaccaggatcgggaaacggccgaccgcggcctcgaattcgctggcatataccgggcagcccgtcttgttctggatgacctggtttccgccgatatggtcggcgtgggaatgggtggccaggatggcggagacggtccagcccttttcagcgcagatgcggaggatctttttcgcggcgtccttgtcgctgccgctgtcgatgagcaggacgccgttgtccggcagcagataggcccccaccttggccggggcatcaaaataaaaggtccgggctcccgcctcgatcagttcgtacatcggcgctctccccctcaggtgtttttatccaccgttttcatggttttgagattaccggatttcccgtggcgctgttcgaggagcccggatacgtcttccggccggatcccctgttccgccatcaggaccagaaggtgataggtcaggtcggcgatctcaccgaccgtgtcctcatgatggccgtttttcgcggcgatgatgacctccgcgctttcctcccccacctttttgagtattttgtcgatcccctggtcaaacaaataccgggtgtaggaattgtcggaaggatggtcgcggcggtcgagaatggtgtcgtaaagggtgcggatcgtgtcattcatggtcattttcctccaaaatcgtgtcaaaaaagcagctgtgcgccccggtatggcaggcggcacccgtctgctccacccgaatgagcagtgcgtcgccgtcacagtccccggacatggagacgacacgctgcacatggccgctggtcgcgcccttgttccagtattcccggcgggaacggctccagaaccaggtggtgccggtatcggccgtgcgctggagggcacccaggttcatataggcgagcatcagcacctcgccggtcgccgcctcctgcacgatagccggaaccaacggcgtttttttgaaaaaacgctcaagcccgagccggtccgacggatatgccgcccccgcgatggcgtcggcgaggtccagcgtcccgctgtacaaggatttgccgcagatcgcgccgtacaggcgacggtcccgcagccgttcgatatcccggagttcccggataccgccagaggcgatgacgctgcaggagaccgccccgtcgagctcttccagctgttccaggttcggcccggacagggttccgtccttggagatatcggtaaagatgagggttcgaacgccgatgtcttccatccggcgggcgagttccaggtaggagacctgtgagacctccagccagccctcagcagccacccgtccgcccaccgcatcgattccgacggcgatgcgatccccgtaaagcgaaaccgcttgacggacaaaatccggatttttgagggcggcggaacccaggatacagcgggaaatccctcccgacagataatcctcgagcgtctccatgtcgcggatcccgcctccgagctccactttcagcccgctctgggcggcaacggcaaagaaaatgtcggcgttgacccggttgcccgtccgagcgccgtccagatccaccatatggatccactccgcacccgcccggcggaaagcagcggcggtttccagcggatcatcggccacggtgtgcgccgtgccgaaatcccccttgacgaggcggacgcactggcggttctggatgtcgatagccggtagaatgatcatgggttctctccctttattctggtttgtggccggtcagtccagggtgcctttggtcgagagtatcccctcggcaggcgttacggcctctttcagcgcatgggcggccgccttgaagagcgcttcggcgatatggtgggaattctgcccatacatcaccttgagatgcaaggtgatgccggcatgaaacgccagcgcccggaaaaactcgacggtcaggcaggaatcgtaatccccaatccgctcctccggaaaacgggcgtcgaaaaccaaaaacgggcggccgccgacatccagcgaggccatggcgagcgactcgtccatagggacgaaaaaggtaccataccgccggataccgcccttgtccccgagtgcctccgccaaagccttgcccagcacgatgccggtgtcctcgacggtgtggtgtccgtccaccctcaggtctccttcggctttcagggtcagcccaaatcccgcgtgcacggccaaggcctccagcatgtggtcgaaaaacccaatgccggtcgagatttccaccgctccgccgtccaggttcagtgcagccgaaatcgtggtctcctttgtacttctgctataggttccgatccgcataatcgtccctcctgtcatgtaaagcatatttgctttactggatttcttgatgggtgagcaggaaccgcatcaccgccagcagctcttcgttttccgcctgggtggcggcggtgacgcgcaggtgacggtcgccgaaccgccgtaccagaatcccgcggtcgcaaagcagcgcatacatccgacccgcgtccttcagccgcacatagacaaaattggtgcggctgtcgtaaacccgttcgaccagtccgtcctcttccagcccccggaacccgccaagcagcccgtcccgggacgcgatgagaagttcacggtagacatcctgatagacggggttagcgagtaccacgtttgccatcgcctgggtgaccgcgttgacgttataaggggacttcgccgcccgcagcacccctgtcaagcgggaattggccacggcgaaaccaaggcgcagggcggccatccccagcatcttggaacaggttcgcaggatgatgagattgtcgtgttcctccacttcaccgagcagggactgatcccaaaaatccatatacgcctcgtccagcacgaccagcgcgtcggttccgctgaggatccggcgcacctcctcccgtccaaggcccaccgaggtgggattgcagggattggagaagatcaagagccggatgttctccttctccagcgtatccagcacccggtcgaccgggacgcacaggctttcgtccttttccagagtgacgcagggggtctcggtgatggcggtatagaaccgatacatggaaaaatcaggcgacaaggttaataccttttcaccttttgtcaaaaagaccgacagaataatcgaaatcagctcatccgacccattgccggccgtgaccagttccggacggattccataggcccgtgcgaaggaggcgcagacctctgcagccagcgggtcgggataccggttgagcgcggtatcggccgccgcctgcgccatcctgacccggtcccgttcggtgggcagcaggaaggattcgttggcgtccatccgtacccggtagcgcccttcggagggatcgtacggcgtcagggagaccgccttgtcacacagcgtatacataaacaacactcccttatcaggcctgttcccgctcaaaccggacagcgacggcgtgggcgtgggcgtccagcccctcggcacgggcaatggataggatatcgtcccgtgccgcttccagagcggcacgattataacagatgaagctcgacttcttgataaagctgtccaccgacaagggggagaaaaagcgcgccgtgccgctggtgggcaggacatggttgggccccgcatagtagtcccccagaggctcgggcgagtatttcccgagaaataccgaaccggcattgtccaagcggccgatatagctcatcggatcgctgcacatcacctcgaggtgttcgggcgccagacggttggcaaacgccaccgcctcctccatatcgcggcagacgatgacggcgccgtaatcggccagcgaacggcggatgatctcctggcgcggcagcgcctgcacctgcttttccagttcggcgagggtgcactcggcaatctccgccgaatcggtgagcagaatggacgacgcgagtgcgtcgtgctccgcctgggacatcaggtcggccgccaggtaccgtggatcggcggacgcgtccgcgaggacgaggatttcactcggtcccgccaccatatcgatgtccacctgcccatagaccaaccgtttcgcggtcgccacgtaaatattgccgggaccgacgatcttgtccacccgcggaaccgaggcggtgccgtaagccagggccgcgacggcctgggcaccgccgacgagatagaccgcatccacccccgcgatataggccgccgccatgacatcgggattgaaaccgccgtttttcgggggcggtgtaaccatgatgatctcttccacccccgcgatgcgggccgggatagcgttcatcaggaccgacgaaggataagcggccgtgcctccgggcacatagatccccacccgggcaaggccacgaacccgctgcccgacgatggtgccgtctttccgggtatccagccagctctgctgaagctggcggcggtggaagtccgcgatgttggccgccgcgcgttcgagcgcggcatagacgccggggtcacaggcggccgccagctccccgagccggtcccgcccgacgggttccagaaccggatccaccccgtcaaactgccgcgtatactcaagcagggcgtcatccccccgggaacggacgccgtcgagaatcgccgagacagcggcggtcactttgcggtccacctccccgctgcgcgaggtcagctgttcgagaagggcgtattcggctttcccatccgctttcaccagtggcattatcatattcatgctcattcctttccacgggctggggaattgtgcctttttggcgcggccaacatgtccgttatgaacgggaaaagcacaaaacccgtttgaaagaaaggcggatgccgatctttcaaatttatagtctctcaatagagccgtcaggcgtaatttattccgtgttacctagggctgacaccatccgggcgatcaaatcctcggtttcggccttgcgcagcttcatgcaggccatattcacgatcagacgggcggaaatcggcatcacgtcctccaccacctccagcccgttttcccgcagggtggatcctgtttccacgatatccacaatgccgtccgccaggccgagaagcggcgccagctccaccgagccctcgattttgatgatccggacgtccagccctttccggccaaaatacgcgcgggcgacgttcgggtatttggaggcgactgtcttgacgtggtagccgtcgaaaaacggcgttcccttcggggccgcgagagcgaaccggcagcggccgaatcccagatccagcacctcatagaaactgccgccgctctccgcgatggtatccttcccgaccacgccgaggtcacatacgccgtgctccacataggtgatgacgtccgcggccttggccagtaccacttccagatgctcaccgaccggcaggatcaggcgccggcctttctccttgacggcgcgcgtgtcgaagcccatacggtcgaacagcgccaccgtatccttttccagacgccccttggtcaatgccatgcgtatcggtctcatatcccaatctccttttcgatcagacctcgacacggtcctcgccgccggccgacacgacgtataccagcggaattccccgttcccgcgcgtaacggagcgcctctccgcgggtttcctgcagactgaactccgtcaggatccccccttcggtgagggtacgcaccttgtccagcgccgcggcttcacagccgtcctccgcaaaaaccaaagcctcgggcagcatgggcggttcgacctgtcccttgtccagcatacccttgatgaccgcgtcgacattgaccccgaacccggtcgcggggagcggcgaaccgaactgctgcagcagggtgtcgtaacgtccacccgacacgacagtgtccccgctgccctccatatatccgcggaaaatgacgccggtgtagtattcgttgcgatggacgaggcccagatcgatcatgacctgatcccccagcccgagcgcctgcagggagcggtagagccaggccagatgcccgagcgccgcccggctttgctctttgtggcaaaggggcccggcctcgcggaggatctcttcgccgccgaacaggcggggcaggcgccgcagcgcctcggcggccccgcttttgggcaggctgtccagcagatccgaaagagcggcataattcttggtctcaatgagggtgcggatctcatcccggacctcctcccccacctccagctcctccaccagggattggaagaatccgatatggccgatctccagacggaaatcgcccccgatgcagggcagacgcaggacatccgccgccagggaaaggatctccaggtccgcccgctggccgcccgttccgatcagctcgacccccgcctggaactcctggtcgttccgccccgacaggctgtggttgagatgatacacgtcctgcgcgtaatataagcggatggggagggccgcctgccgcagccgggtggcggtcaggcgggcaatggggagggtcgagtccggccgcatgacgagaagccggcctttggaatcggtcagcttatacatgctctcagccgggatggccggatggccggcctggaaaacgtcaaaaaattccagcccgggcgtcatgacctcggaaaagccgtgacagacgaagagatcggcaagcagactctcggcctccctgcgtgccaggcattcttcaaagagcaggtcccgggtcccttcgggggtgatgcggatattctgtctcatgacaagctcaaccctttcgcgggagaaaacccatatatactttacttcactaatgtgctactaggatatcacgataaacttaatctgtcaagaggcggaacgcggccggatattgagaaagaccaggccggccaggcaaagcaggatcccgaccgcctgaaaaccggtgattttctcctgataaaacaacgccccgacgaataccaggatgaccgcgagcgcgatattcgccaccagggatcccacgctgacctgccagccggcccgataagccatgatgtagccgaattccagcccgaccaggctgagtccgagcgcgacgctgctccagttgatctgccggaactgaacgaggatcccgtccttccccaccgacgacaccgcgaacatgacgccggtggccagggccgacaccaggtaggtcaccagaagggaggcgaacggattcaccccgcccggggtggacttggccgcgatgttgtaacagacgttggacgcaatgatcaacaggataggccataaataggcaagcacagccgatctcccctcattcttacatctcaaacagattcatttgactggtcgcgggcagggcgtccagcaccccgagcaggcggagcgattccaccaccgccttggtgatgccggaacggttctgcaactcgtcgcaggaaatataggggccggcctccctggcctccatgagcgactgtgccgccgccccgccaaggcccttgacggcgctgaacggcagccggatcttcccgtcctccaacacgaatttgtaggaatgggatttgtagagatccaccggcaggtattcgatgccgcgctgcatggattcatagatgacatgcagcgtttccgcctgggactgttccttggcggtggcctccttacccttggcgcgcaggttgtccatgagcagcttgaccccgcttttccccttggagaccggttcggcgtcgaaatcctcgccccggccggtgaaatacgcggcataataggccgcgggccgatgcactttgtaccaagccacccgcagcgccgcgatgatgtaggccgcggcatgggccttagggaacatgtacttgatcttcatgcaggagtccttgtaccagtcgggcacgccgtgctccttcatggcggcaaaatgctcctcggtgagcagcttttgcgcgttgcccttccggacgatttccatgatcttgaacgccattttgggttccaggcccttgtgcatcagataggtcatgatgctgtcccgtgtcccgataacgtttgagatggtgcaggtgccgcttttgatcagctcctgcgcgttgccgagccacacatcggtaccatgggacaggcccgaaatctgcaacaggtcggcaaaggttttcggcttgcactcgagcagcatctgccggacaaagggggtacccatttcaggaatggacagggtgccgttttcgcactcgatctgctccgccgtcacaccaagaggttcgggagacgtaaagagcttgtatacctccgggtcggacatattgacctcggtgaccgggatcccggtgtactcctcaaggtatttgtagatagtcgggatgacatgcccgaggttgtctaacttgaggatggtgtcgtggatggaatggaagtcgaagtgggtggtgatgatatcggaattcgggtcgtccgccgggtgctggaccgggcagaaatcctcggcctcgtaatcgttcggtacgacgaccatgccgcccggatgctgcccggtcgttcgtttgatgccggtacagccgaccgtcaagcggttgatttcggcgttgttcaggaccaatccgcgctcctcggcgtattttttgacataaccgaacgcggtcttgtcggccacggtggagatggtaccggccttgaacacgtggtcgctgccgaagagcgattcggtgtatttatgggcccggagctgatattcgcttgcgaaattcaggtcgatatcgggtgccttgtccccgtcgaaccccaggaaggtctcgaacgggatctcgtgcccgtcccggaaaaggggctcaccgcagaccggacaggtcttgtcgggaagatcgaaccccgaccccaccgacccgtcggtaaagaattccgaataatggcactttttgcagagataatgaggcgccaggggattgacctccgagatccccgccataaacgcgacgaaggaggagccgaccgaaccacgggagccgaccaaatacccgttctcgaccgagttctgcaccagcttctgtgcgatcatatacaggacggagaagccgtgcttgacgatcgacgtcagctcccggtccagccgggcggagacgatttccggcatcggatccccatacagcgccctggcgcggctccaggtgatgtcctggagctgctcctccgccccgtcgatatggggcgggaaggtgccttccgggatcgggcggatagtctctaccatgtccgcgatgcggccgggattctcgatgaccacctcgcgggctttttcctgcccgagatagtcgaattccgccagcatttcctcggtcgtgcgcagatagagaggggcctgctgatcggcgtcggcaaaaccttgcccggcctggaggatccggcggtaaatctcatcctccgggtccatgaaatggacatcgcctgtcgcgcagaccgggatatgcagcttctcgccgaggcggaggatggtgcggttgaactcgcggagctgttcctcggtctgcaccatcccctcccgcagcatgaagaggttattgcctaagggctggatttcgaggaaatcgtagaatttcgcgatgtcgcacagttccccccagggtttgccgtcgaacaccgcgcggaacaattctccctgttcgcaggcgctgcccacgatcaggccctcccggtattccatcagcttggtcttggtgatccggggttttttatagaaattgtgcagatggctccaggagatcagcttgtaaagatttttgaggcccttgaggtttttggccagcaggatcagatggtagggccgcgcctttttgctgtctgcgccggccagcagagtattgatcccgtcaacggattcaatccccttctccgctttcatatcggcggaaagatggatgaaaatgtctgccagcaccttcgcgtcgtcgcaggcgcgatgatggttgaagggctccagcttgaggtgattcgccaccgtatccagcttgtggttcttcaaatgaggatagagcgcgcggcagatcggcacggtatcgatggatgtgaagggatacggaagccccgtccgcgtggccgccgcccggatgaacccggtatcgaagggcgcattgtgcgcaaccaggatccgggtatccccgcagaaggcataaaattgctcgagcgcctctttttcgaggggcgcgtccttgaccatgtcgtcggtgataccggtgagttccgtaatttttgggggaatcggtttttccgggttgacaaagatatcgaacgaatccgccacttccccgtttttcagcctcacggcgccaatctcggtgatgcgttcggtctgcgcgctaaggccggtggtctcaatgtcgaaaacgatgaattcgccgtcgagaccctcactggccgagccctccaccaccggaatccggtcgttgatgtaataggcctcgacgccgtaaaggatcttgatttccttcccctgctttttgagcttggcggccgcattcatggcttccgggaaggcctgaactacaccgtgatcggtaatggcgactgccttgtgtccccaatcggcggcgcgcgcgatgagcgcctcggcatcggaaaccgcgtccatagcggacattttggtatgtagatgcagctccacccgtttttcgggtgcgttgtcccgtttgacataacgggccacgatggccatggatttgggggtgagcacctgggatttggcgaacacgtcgaattcatacaggccgctgaggaggaggcacaccccttttttgaccgcctccatcgcctcgagtttggcccggtcccgtttgatatcagtccaaaggatggccgtgaccgagcttgtcccatcggttatcgagaaggtatggcggatccgggtgccatcccggaaggccttggtttcatattcgaacacctcgccccagaccgtgacattcccaccgtcgtcggtcaggctgcgtaaaggggttggcctttcccgcggaaccgggccgaacagggattgggccgattccaaataaattggaaggccatccgcgggcggtatagccgggtctgctggttttttgggcttcagcggctcggccgggccggaagggattccaggggcgggggcgggccgcagggcggccatctgttccgcccgggctctttcccgcatggccgcctcctgctcggcagcctccatcattttccggtatccctcgtcctgctcatccacccgctcttccccgtcgaagaccagcgcgatgcgacgctggaacagttccgctatcagcgcgcccattgcggcgtcggttttcgtggctttcaggacgttgaggcccccatggcggagagtgacggtcatcgtctcaccatcgatgcggcaggctgcgtcccgaaaggtgccgttgaccgctgtgcagcggcggcgcaggaacgacacgatggtgggaaagcactctacgcacaaagcgtcggcgggatagaggggccggaattccaccgaggagagggccaggcccttggccacggcccgttccgcctgctcgatctcttcaaacgccacaaaatggtcgagcagcagccgggcgtgaagccagccgctgccgcgatggagctcgatttgatcgacgcccgcgctttggaggccggcggaagaggcgccggcggcaaaggggccgaatatctgtgtaaacgttgcattgctcataatgtttccaattccctcatcagttcctcgaccgcgcacgattcctcgaccgtgcgcacgatttgccctttcttgaacagaaccgccttgccgtccccgcccgcgatgccgatatcggcctccttcgcctcccctggcccgttgaccacgcagcccatcaccgccaccgtgaccggtttatggacggcgcgcaggcgctcctccacctcggcggcgatgcggatcaaatcgattttggtccggccacaggtggggcaagaaaccagcatggcctcccctgttcgcagcccgagcgcgcggagcaggtcgagcccagcctccacctccctgaccggatcagccgtcagggagacccggatggtatccccgataccgtcgaggagcagggaaccgatcccggcggcggatttgagcaaccccatccgctcggtgcccgcctcggtcacgccgagatggagaggataggcgcaggccgccgccgtcaggcggtaagcggccgccatggtcggcacatgggaagatttgagtgagagcacgatatcggaaaaatccgcttgttccagaagcgaagcgtgatagagggcgctgtcccgcagggcctccggggtgggatggccatattttgccaggatctccttttccagggaacccgcgttgaccccgacgcggatcggaatccctcgcgaccggcaggcatcggcgaccgcttttacccgttccggccccccgatgttgcccgggttgatccggattttatccaccccggcggcggcggattccagcgccaggcggtaatcgaaatggatgtccgccaccagcgggatcggcacggcctctttgatggccggaatcagccgcaccgcgtcccggtcggggaccgcgacgcgcaggacgtcgcagccggccgcatacagctccttggcctgccggacattgccttcgacatccccggcagggacgctcagcatagactggacggcaatcggggcgcccccgcctatttggaggcttcccgcgcgcacagggcggctgtcgcggcgggggatcccggacggtccctccatgactgcatcctccttatcctttgcctatccggcggtttcaccgtcctcaatggaacagcttcaaaatgtcgctgaaggtgaccaggatgatcaggccgaacagcagcaaaaggccgatcgcgtggatcatcccctcatatttcggcggcaccggtttgcggaacaccagctcgatgagcaggaacagcaggcggccgccgtcgagcgccgggacgggcagcaggttgaagatcccgacgttgacggagatgagcactaccagcatcaggatgttgccaagcccgatctgccagtgctcctgctgcgtagcgtccaccaccacgtccccgatggcgtccaccgtccccaccgggccggaaaggtcgttgaggccgtattgcccggtcagcatcccgccaagggtccgccagatcatcaccgagaccgtacactccattttggcggactgcgcgatggtggaaccgaaggtccgggggattccctggacatagaaatcgtattgcagaagacgggtaccgtcctcctgtgtgacgatctggaaagtgactccctcgagattgaccttttgcgccttcccatcgacctcgcggcgcacggtcatatcgaacacgccgtcctcgtcgctttgcagcagcatggcgaggtcccggtcggtgaacacggttttgccgtccactttcaggatggtatcgcccggcctcaggccggtctggtagctcggcgcgtcctctttgagcaccgacaccgtcgtgctgctgaactgcacctttccttccgcgtccggcagcatacagaacccgtagtagccgatcaggagcacgaaccccagcacgaggttcatcaccggcccggccaggatgatgatcatccggcgccagaccttcttctgattaaacgcccggggatcgggtcccggcaggcaatcgctggccccatcggacggggatccgctctgttccggaagcttgacctcgccgcctccggcgctgtcctccccttccatagcgcagtatcccccgatgggaaagaggcgcagggaatactgcgtctcctttttcccgaatctgaacagccttggccccatgccgatggcgaattcgtttaccttaacgcccatgcatttggcggcgatgaaatggcccagttcatggaccatgatgatgatcccgaacaccaagatcgccgccgcgatccgtccgacctgtatcagaaaacccacgtgtttcttcacctactccatcttcattccggcccgttcccgggtccggtggcgtatatcggcatcgagcgccaggacatcttccacccctcttccgtccggaagggagccgtccagcgcctgttccaccaggcgggggatatccgtgaagccgatgaggccctcgcggaacagcgcgtttgcctcttcgttcgcggcgttggccgcggcgggatagaggccgcccctgcggatggcttcccggcaaaggcgcatgcagggaaaggtttcatcgtccggtttcgcaaaatgcatctgcccccattcggcgagctccagccgcctgaccggcgaaggcgcccgggcgggccaggtcatggcatattggatcgggacccgcatatccggcacccccaactgggccaggaccgcgccgtcctcatattcgaggagggaatgcaccaggctttcccgatggacgacgatatcgatttgaccgggcgggagatcgaacagccaccgcgcctcgatgagctcaaggcccttattcatcatggtggcggagtcgatggtgattttggcacccatattccagtttggatggcgcagggcttcttccggagtgatgcgctggagctccgcggcggttttcccgaaaaacgggccgcccgacgcggtgaggatcaaccggcggacacccgcctctcccaatggctccggagggctccacggaccggcggcggtgccttgtaggcactgaaaaatggcggaatgctcgctgtccacaggcagcaggcggacgcctttgcgccgagccgccgccatgaccagttccccacccgccaccagggtttccttatttgccaaggccacgtcgtgcccggcctcgatggccgatagggtcggaagcagccctaccatccccaccaccgcgttgagcaccagatccgtatcctcgagcgccgcgagctcgcacagcccttccatcccggacaagattctgaccggcagatcccttacccggatgcggagggacgccgccgccgcttcgtcaaaaagagccgcaaacggcggacggaagcggcggagctgctcttcgagcatccggtcatttgaacccgccgccagagcctgcacgggatatccgagcgaggccgccacctcaagcgcctgggtgccgatggacccggtggagccgagcacggccaggcgtttgggttccgcggcggagattggtcgattcgtcatagggtatccctcgctgtgagtcgatggttgacggccggaacggccttttaccttatatgccccggttacaaaggatagaccagggggacatactgcaccaggatatagagcacgggaagcacgaacatcatgctgtcgaaccggtccataatcccgccgtgccccggcatgatatggccgaaatccttgaccccgctctgccgcttgatgatggaggcgaacagatcgcccagaaccgacagcggggcgcagagcaaggccagcagggcgatctgccacaagctcacatacgcggaatcccccagggccagcacttgatagagataggcgcccagcacactgctgccgaccgataccacgatgccgccgatcaggccttccaccgtctttttggggctgatagcgggacaaagcttatgccggccgaaaaacgtgccgataaaataggcaccaatgtcacacatccaagggatgatcagggcgaggaagacgtaaaaaaggccgtcccgttcatcccgatggctggtcgtgcgcagatacgccagacaggagaaggagatggagaccagcaccgacaggagaaaaacgaacgcagtccgttccaccgggagcgtgtcgtgataccgcacctgaatgaccgccagcaaaacaacgaaacccaataccaccatggcagagggcatggaacgcagcataacgagaaaaggcgccagcagtgcaaaaagcaccgccgcggtttcgagcccgcggtggttgaccatcttggtaacgacaaagacctcatacatcgcgatcgcgcagataccggccatagcgatattgagaaccagcgggggaagcagcagcaggacaaccagcgccaacgccgccccgacaattcccgtcaggattcgtgatttcaaatacatcaagcctttcaggcgtactcgttgccgcatccagcggccttttacgcgaagagaccctcagatcccgccgaagcggcggtgccgcttggcgtattcccttagcgcctcatcgagcgccgccggcgtataatccggccacaggatatcctggaaaacgtattccgcataggcggactgccagatgagaaaattggagagccgctgctcgccgctcggacgcaggatcagatccgggtccggctgtccggccgtatagagccggtcctccagctgcgtgccgtcgatctcgtcgggagacaggcagcccttctggacatcccccgccagccgcctgaccgcgtggaggatctcgtcccgtcctccgtagttgaccgcgatgttgagggtcatacccgttttataggccgtagatgcctcggcgcgggccatgagctcctgaatatcgggggccagcggacgccggtccccgataaaacgggtgcggatgttctccttttcaaagtcggccagggattccttcagataatcccgcagcagggtcatgatggcgtcgatttccgcctggggacgtttccagttttccgttgaaaacgcatacaccgtcagatagcggatcccccgcttttcacagtgtttgacgatcctgcggaacacccgggccccggtgacgtggcccgcctggcgcggcaggccgcgctgcctcgcccaacggccgtttccatccataatgatgccgatatgcttcggcagttttcccgcggaaaccacttccacgggtggcgtcttttttgaaaaccagcccatccgtcgctccatttccggaccagtccgcaccgggcggtcccctgtgatcacaacgcaagcaacgcctcagagctccagaatctctttttcctttttcgcggcgtccacatcgatttccttgcagaatttatccgtcagatcctgcatccgcttttcggcgtccttcaggtcatcttcggtaatctcggttttctttttcatgtccttgagcttgtcgagcgcgtcgcggcggaccgaacggacagccactttcgcttcctcgcagtatttatacacggtcttgaccagctcacgccgcctctcctcggtcaaaggcgggaaattgaggcgcagggcactgccgtcgttctgagggttaaggccgatatcagaggtctggatcgccttctcaatagccttgagggtgcttttgtcccagggggtgatcagcagggtgcggggctcgggaaccgataccgcggccatttggttgaccggcgtgggggccccgtaataatccacaagcaccttgtcgagcacgctggggttggcccgccccacccggatggtggcgaattcccccatcatggcgttgaccgtcttgttcattttttccttcgcggtctgaaatacctgttccatctcatgttccctccgtctgttcagaatcgaatatgtcagggctttacaatggtgccgaccggctcgccgcaggcggcgcgcacaatattcttcgggtctccgaggtcgaatacgagaatgggcagtccgttgtcgcggcagagggtggcagcggtggaatccatcaccttgagatcccggttaagcacatccagatagctcagggtgtcgaaacggacggcgtccgggtttttcttcggatcgctgtcgtataccccatccaccatactcgccttgaaaatgatatccgcctcgatttcagccgcccggagtgcggaggccgtatcggtggagaagaagggattgccggtcccgcagccgaaaatcacgacccggcccttttccagatgccgcaccgcccggttgcggatatacggctccgcgatctgattcatcgcgatggcggtctggacccgcacgacacagccgagctgttcgagcgcgtccgcaagccccagggcgttgatggtggtcgcgagcatccccatatggtccgctctggtccggtccatgctgccgctcgaccgtcccctccagaaattgcctccgcccaccacgatcgcgacctggacgcccgcgtccacgcattccttgaccgcggcgcatacctttagcaccgtgtcgaagtccaggccgaagcctttttcgccggccatggcctccccgctgagcttgagcaggatccgcttgtatttcggctgcatcgctgttcacttccgtttcctcatgggttcgttcatactcgttagctattttacactaaaccggtccgcctgtaaagccaaaaggagaaatcgccggaattttttgcctccatccacgatccgctcatgtctattctgggccttatcccggaatctattccatcccgcaaaaatccccctgatgcgctcagggggattggccggatccgttttattcgagcatatcgtcgaagaccgcgccggtggagccgctggtcacatgctgggcataccgccgggcgtatcccgacagctcacggcggggcgccgtccaggcggctttgcgcgcggccaaggtctggccgtccaccagcagctccagcctgcgggccgggatgtcgatggagacgatatccccctcttcgaccagcgcaatcacgcctccggcggccgcctcgggcgaaacatggccgatggaggcgccccgggtggcacccgaaaaccgtccgtcggtaatcagtgcgacgctctcgccaagtcccatgccggcgatggtagcggtgggggtcagcatctcccgcatccccgggccgcccttcggtccttcgtatcggataaccaccacgtcgccgggatggatccggccgcccgtaatggcttccgtcgcgtcctcttcgctgtcgaatacccgtgctgggccctggtggaccatcatggagggggcgacggccccctgtttgaccactgcgccgtcggcggcgaggttgccgaacaggatcgccaggccgccgtcgggacggaaaggatcgtccagatgccggatgatctccccgtccggctctctcgccgagtcaatccgttcccctaccgtccccgataccgtcagagcgtcgcgatggatcaggccaccccgatcgagctccttgagcatcgcctggatgccgcccacgccgttgagatcggtgataaacacctggctggcgggattgagcttgcagatctggggggtagctttgccgatatcgtcaatctgcttcagggtcagggggcagcctgcggcgtaggacaccgcgacgatatgcagcacggtattggaggaacagccgatggccatatccgcccgcagtgcgttctcgaacgcagcgggggtcaggatatccttgggccggatgttctctttgagcagctccatcacccgttcgccggtctgcttggccagccggatccgggcggccatgacggcaggaatggtgccgtttccgggcaatgccatgccgatcgcctcggtcaggcagttcatcgaattggctgtatacatccccgagcaggacccgcatccggggcaggcggtttcctcaagctcgggcagggtatccgcatcccgtgtccctgccgcgacgcttccgaccgcttcgaacacctcgttgaggccaaccttccggttcccgtcggtaccgggcagcatggggccgccgctgacgaaaatcgagggcaggttcatccggcaggccgccagcagcatgccgggaacgatcttgtcgcagtttggaacaaacacgacggcgtcgagcggatgggccgtgagcatcacctcgatggaatcggcgatgagttcccgggaacacagcgaatatttcatccccaggtggttcatggccaggccgtcgcacacaccgatggtattgaaggtaaaggggacgccgcccgcgctgcggatccccgcctccactgcctttacaatggtatcgagatgggtgtggccgggtatgtaatcgcttttggagctgaccacggccacaaaggggcgggcgatttcccggtcggtcaggcccagggccttgagaagggaccggtggggcgccctcgaaaccccggacttcatcaaatcactgcgcataaaggttcatcctctcattgtattcgcatccgctcggaaaatcaggcagccggctgttccagcggggttttggtaatataggcccggagaagctccaagcattcatcatgcgtctgctggctctgcttaccgcctgccgatcccgaggccgaccgaaccccaaaaatcagctcttccggtgcccctttcatactttcgtcctgcagaaaagaggcgcccttccaactccaggtgcggccgtcctccgaaacgccctcaccctccactccgagctggtcgaaaaaggcggtatccgaatcctccaggtttttcagcaggtaatcccgataataatccggagaaaaaccgaaaaacagcgtgtccccggcgaacatggtagccgtgaacttctgctggttgaccgcactgagctgcccgccgtcgctgcccacatagaggaactcgatcgaaacgagcaccttgccgtctccgttgagatcccgtccatactgttccagctccgcggcgaaggcgtcgttggcagggacgggcaggttcttcgtggacgcaataatcatgtggtaatccgggtgctcccggttcaccatctgggccaccaggatgatcacggcggccaccgccaatcccccgagaaccacgggccatttgtagtggtaccagaaattctgccacttcgccttgaatccctttggcggctcgggaggcttcggcggttccagttcggtttcatcgacaccaacgagatacatttctctggccatgcccgtccagtcctttccagtatcggcggtttcagtccttcggcttcatggtggggaacagcagcacgtcccggatggacgcgcagccggtcagcagcatcaccaggcggtcaaccccgatcccgaggccgccggtaggcggcatcccgtattcgagggcggtgaggaaatcctcgtcgacatccgacgcctcctcatcccccgccgccttcaaggcggcctgggcctcgaaccgttcccgctgatcgaccggatcattcagctccgaaaaggcgttggcgtgctcccggccaacgatgaacagctcgaaccgctcggtatactccggactttccggcatccgcttggccagcggcgaaatctccaccggatgccccaggatgaaggtgggctggatgagatgctcctcgacataggcttcaaaaaagaggttcaggatatcgcccttttgatggcgctcttcatattcgatatggtgggccttggcgagctcccgcgcctcttcgagggtcgatacggcgctgaaatccaccccgctgtactttttgacggctccggtcatgctcagccgctcaaacggcttttcgaggtcgatctcgttgccgtcatagaccacccgggccgtgcccagtaccttcttcgccacggtgcggatgaggtcctccgtcaggtccatcatgccattatagtcggtataggcctggtacagctcgagcagggtgaattcgggattgtgccgggtgtccatcccttcgttgcggaacacccgcccgatctcgtacacccgctcgaacccgcccacgatcaggcgcttgagatgcagctccagggcgatgcgcagatacatatccatatcgagggtattgtgatgggtgataaaaggcctggcggcggcaccgccggccacaccatgcaggaccggggtctccacttccaggaacgcccgctcgtcgagataccgccggatttccgtgatgatggcggagcggcggacaaaggcttccttgacctcgggattgacgatcaggtccagatatcgctgccggtagcgggtatcggtatccttgagaccgtgaaatttctccggcagaggccggagggatttggagagcagggcgatccgggtcgcgtggatggaaatttcccccatcttggtgcggaacaccgtaccttcaacgcccaggatgtccccgatatcccactttttaaacgcggcgtaggcgtcctcccccacgtcgtcccgccggacatagacctgcatgcggtcgctgccgtcccgcaggtcgaggaagctcgccttgcccatgatccggcggctcatcatccgtcccgccaccgaaacggcgcggttttccatctcgtcaaagcgggcccggatgtccgcgttgtgggcggtgacatcatatttggtcagcgcaaagggatcctgtccggagtcccgcagagccgtgagcttgtctctgcggatctggatcagttccgatacctgctgttcggtcagttcctcggtttcgggcgctccgccgttcggttcgttcatcgattccacatcctgtcttcggtttaatatgggctgaaaacggcgggcggacgccgcggatagccccccgccttgtccgcccgccggatagaatgccgcttatttcgaaatttccacaaccatatactgcataacgccgttcgggatttccacttccacctggtcgcccacctcatggccgagaagggccttgcccacaggagattcatcggatatccgcccgccgagcggatcggactccgtcgatcccacaatgcggtaggtcatgaccgagccgtcttccatatccttgaccttgacggtggagccgatatgaacgctctcggtgccgatctcgctctcatcaaggatcttcacgtttttcagctggttttcgatctccgcgatccggccctcgatgatcgcctgatcgtttttcgcttcatcgtattcgctgttttcggagaggtcgccaaaggacagcgccactttgatcttttccgccacttccttgcgtttgacggttttcagctcttccagttccttttcaagcttcttgagcccttcgtcggtgataacggtctgcttggtcatgcgtgcaaactccctttcgacatattactgcggccgatgctgccgctgcgataaaacaaaatcatacatgggtacaatagagttattatatccaaccaaaacccaaaagtcaagggaaaggaccgcgcaaccttttcaagagatgcgttggggaaacgctttaagcggctccgctaaagggcattgaaaccggcttggcgattgtgtataattaaagacaaacaaaccgggataggaagtccgacaagaaggaggtatgaaaattgaaaaaaatccttttcggtgtcctcgcattgatggcagcgtttgggatactcggctgctcacaaaacagagaaacggcggtcaggaacacgtttaaacaaacgccctctcatctcgtcgaagactacgtcaaaaattccaaagatgttatatcggtcacgtattatgaaatgaacgacggcacatggagaaccgacgactatgcgtatacgtacaggttggtcataacaggaaggctaaacaacgctgaaaaagatattacctacaccattctaagtaatattgaaaacatctcgtttgaacaggcatggaaagcaagcggctttagtagctatcgcggcgactatttcaaccctgaagacgctgtatttgtggccactaaaatgggatgatggctcccgtcttgacaaaccggaaagaaagtgttacactttaaagcgaaaaagcgaaaggagaggacgccgcgatgacgacagccggcatggtgcaaagggaataccggtattatctcaccctgggctatcgggccacgggcgtcttttgctgtcggaaatgtaccgtcaccgtccgatagggcggttgtccgagggaaaacggtaccttttgcgaggcaaaaggtaccgtttatttttatcgccgaaacggcaggaggaaatcaatatgatcgtcattctcaaaccccacgcggaaccggataaggtgcagagcctgctcgacggctttgccgccaaagggctgtctcatcacatcagcaccgggcagagcaccaccatcgtcggtatcatcggggatacctcccgggtggatatcgacagcgtgctcgcaaacgacgcggtccaggacgtcaaacgggtctccgagccttacaaggcggccaaccggaaattccatccggaggacaccgtcatcggcatcgagggcccggctggggaaaccgtgaaaatcggcggcgggcattttgcggttgcggccggcccctgctccgtcgaaaacgaggagcagatcatccgggtggcgcaggcggtaaaagccagcggggcacggctgctgcggggcggtgccttcaagccccggacctcgccgtacgcgttccagggactgcatgaccgcgggatccagctcctcctcctcgcaaaaaaggagaccggcctccccatcgtgaccgaactgatgagcctgacccatctcgatctgttcgcggaagtggatgtcatccaggtcggagcccggaatatgcagaacttcgagatgctcaaagagcttggacactgcggcaagcccatcctgctcaaacgcggcctggccaacaccctcgaggagttcctcatgagcgcggaatacatcatggccggcggcaacagccaggttatcctgtgcgaacggggcatccggacctttgaaaccatgacccgcaacactctcgatatttccgctatccccctcctcaagcatcagtcccacctgcccgtcatcgtggatcccagccacgcggcggggatcccatggctggttgagccgctctccaaagccgcgatcgccgccggggcggatgggctgatgatcgaggtgcacaacgacccgaaatccgccctgtgcgacggcgcgcaatccctgacgccggagcagttcgacgccgtgatgaagaaagtcgaacggcaggtggccttcgaggcggcccggtagtcccatccctgccatccgccgctgaagggcctcccccttcagcggaccaccggcccggaacagcacatggcctctgttttggcccacagggctggccttgtgccaggaaagctggtatacttcaaaaagaactcgtcaatcaggagggattccgatgcacgacgccgacaccctgttctgggatctggacggcaccttgaccgatccttatgagggcattacccgttccgtggcctacgcgcttcattttttcgatatcgaggtgccggacaggaccgtcctctgccctttcatcggcccgccgctgaaggattcctttatgcgtttttacggtttttcttctgccgatgcggaactggccatcgcgcgttaccgggactattttgccggcaaaggcctgttcgaaaatacggtctatcccggtatcccctccctgctcgacgcgctggagaacgcaggcagacgccatgtcctggccacatccaagccgggtgtcttcgccgagcgcatcctcacccatttcgggctgcggcgctatttttcggccgtggcgggcagcgatctggatggaaaacgggtaaaaaaagaagacgtgcttcggcacgccctggaactcacaaatgccaaaccggcacgctccctgatgatcggcgaccgggaatacgacgtggccggagcccgcgctgtgggaatggactgcatcggggtgacatacggctatgggtcggaaaaggaactttcggacagcggcgcggtcgcgctggcggattcgcccgaggcactccgccgccttttgcttccctccggtccgttttagcccagacgtagcttttcccggcttttaagcagttccgacatggccaaggcctcggccgccagcgcatgggcatccccctgccgttcgtttttgtcaacgagggcctgcatacggcggtgcagcttgccggcgcgttggtaaatctgctgttccatatccataacgaccggctgctcgctccggccaaagggggtgctgaattccagccgctcccgcaaactgtccattgctttgcgcaggctgtcatattcgcgcgggtccagcagcggctgcagctggtgctggcaggcttgcatctgcagcatgagcagctgtatatcttccatccgcacctgcggtccctgttttttccgccgccctcccgatgccaggcgcagagaaaccatgcagagacaataggtgcccagcgccagcagcgagttgatgctgtaccagaccggatcgatccaggaccgggtcaggtaggtgaaggccagcgtgaagacgaaataaagcagggcaatcaaaatcggcggggcggcggaatggacacgcagatgggtacagatgaccggcagcgccaacaccagcagattgataaggaaaagcgccagcaggacattggcggccatccagggaaataaagcgtctgccaaaattgaacgagggaaaaacaacagggcaatcgttccggcatcgagcagcgccagaacggcgattttgaccgcaaagatgacgccgctgcgtttcattgccctgccccctttaaaacaaacggtatttgttatcattataccgcaatttcgctccatttacaatcctcacaggtcgagcgaaaatacagcccgtctttcagtcaattgttccaatctccttcccctgtgcgtacttttgataggcagagggggacattcccttgatttttttgaaagcgcgcgaaaaatagaggggatcggaaaacccgactgaattggcgatctccgtgacggtatacgccttcctgtgcagcaggccgcaggcttcattgatgcggtagcgctgcaaaaacgcgtgcggggatatatcgaaatgagcgaggaaggcccgataaagctggctgcggctcacaccggcgtaccgcgcgatatcctgcacctggatatcgctggcgtaattgtactggataaagcgcagggcctgatgcagatattcctgtgtaccataaatcggggcggggtcccccgcccttttcatcagatggcccaggaagagatataaatatccggccatgcaggcgtcggcggcgggggtattgccgctcgattcataaatgcgcagcagcagggatttgcagtcctcgggcgaagagggccgcagaacgggacggtcgtgagtgaagcccgtcatctgcaccatgcggcgcgcttcggtgccgttgaatcctacccaataatattcccatggatccagatggtcggcgacatagcagacgacctgggacgggaacaccgcaaacaggtcccctttggtcagatggtaggtttttccgccgccggtataccacccctcccccgactcaatgtagtggagcaggtagtggtcccgcagggccggcccccacgtatacccgggcgcgcatttctgatagcccgtgttgtatactgcgagagccaggttctctttgagcgtgtttttaaaggagtgcttgacatcctccatggagcgtccctccgtttcccggtccagtatacccctttatgcaacaaatgtccataattttgctgttttccaccgttgccaaaaacggcggatgtcctataatagaaaatatcttggttatggtatgtagagaaggaggaacgaaagatgccttcaagcaaagaactgctcaaagcactggacggcggggcgtttgacgcgctgtttgcccggctgtacggtcccggcagcctcccctatcagcgcaaacgctacggcggcgccgtcaaggcctttgtggactgctttggggaccgggcggacctgcgcctgttctccgcgcccggacgtaccgagatcggcggcaatcacaccgaccacaatcacggccgggtgttggccgccagtgtgaatctcgacgtgatcgcggtggctgccccctgttccggcggacgggtccgcgtccagtcgaagggatatcctatggacgtggtggagctggaagagctgtccgtcaaaccggaggaacggaaccgttcggcggcgctggtacgggggatggcggcccgattccgggaaaaagggtttgctgtcggcggatttgacgcttacactacctctgatgtcctcaaaggctccggcctctcctcttccgccgcgttcgaggttttgctcggtaccattctcagtcatctctacaacggcgggaccgtatcgcccgtggaggtggccaaagcggctcaattcgccgaaaacgcgtatttcggcaagccgagcggcttgatggatcagatggcttcctccgtcggcggcatcatcaccatcgatttcgccgacaccgaacagccggtcatccgccaggcggctttcgattttgctgcaagcggccacaaactctgtattgtggacacgggaggcaaccacgcggacctgacgcatgaatacgcggccgttccggccgaaatgaaagcggtcgccaatagcctcggcgtcgatttcctgcggcagacctcgctcgacgcgctgatcccccggattcccgagctgcgccgcctccatggcgaccgcgcggtgctgcgggcctttcattttctgcaggataacgaccgggtcgtccggcaggtggcggccctggaggcggggcatttcgaggaattcaagcgcctggtgatcgaatcgggccactcctcgttcgaatacctgcaaaatgtctacacctccagcgacgtggctttccaggggctgtccctggccttgtgcctggcgcaattgctgctcgacggtcggggcgcctggcgggtccacggcggcggcttcggcggcaccacacagaatttcgtgccagacgatctgctcgactccttccgggagacgatggagggcgtatttggaaagggaagctgccactgcctgacgatccgtccctgcggcggtatctgcgtggaggcctgacattcataccaaacaatcggaaaggacgcgcgccgctatggctgaactgagaaaacatccgctgacgaacgactggatcatgatcgcctcccaccggcagggacgccctcagatgcccaaggactactgccccttctgtccgggatccggcaaggtcccggaccatttcgatgtctataaatacgataacgattttcccgccttgtcgcaggacccgcccg

SEQ ID NO: 53 - DNA, 32759 bp, Unknown
  16S sequences of unknown bacteria
ggcgtatgcgaaaagggatgctgccttgcggtaacatcccttttgtcgcttggttattcaatttttgagctaacctgtttgccctctgcccttaaaagcgttgattttactgggtttctgcttgttttcctatgtcaacgctcttaattcgggaggattttttgcgcccttggcgttatttggattttacttcatcggttttgtagatgaacttaacgctgccgtcggtaccatcggcaattccggcgaatgatttataattcttggaaacgtcaaccgttgcctttactctgtcaacaaggttctggaggtcgtcgcccgcaagacctgtcagcttgcttatgcccttatcgttaagctgttttattccatcggctaactgctttgagccgtcagaaagcttttcaacgccgggtactaactgcgaagcgcccgctttaagctctgccgcgccgtccttcagctgcttagcacctgcgtttaccttagcgctgccgtcggctgccgccgaaacgcctgcggtgtaggcgagcacgccctgatagaatgtgttgtagctgtcaagcgaggcgacagccgtatcaattgaggttttaacagtagcggttacggtaggtgtggcaagtgtggtgtaaagcgcggtaatcttggttgctgcgtttttatcggctgcagctgcctgtaatgccgcctgacccgcttgcgctgccgttataagctcggttgcttttccgctttgcaaaatctgaacgggcgtagccttaccgccgctttgctggcttaatgcattgcaaaccttagctataagcgctgcggtttcttcgcctttgcttgctttaagtatattgtaaacggtttcgtccgcttctacggttttggatattgtttcaaccgttaccgcgggggtgagcaggtcgtttatttctttcattgccgcctccctggtcttgccattgcttaagcggtcgaaaagcattaccttaacgggggtgtaatattctgcgggaacctttgccttttcaagctctgcgtcaactgccgtttcggcggttttaagcacctcggcttttttagtggcgcttaaatatttcatcgggtctttggttaatccgtttaatactgtcttgtagttatctgtcgtgagtgcgtcaaagttttgtatgccgccctcgttcaattgctttgtgactgtggcaagcagtgtatcaaatacctgtttagcacctgatgttaaatcgccgttgtttgaaaccaaggtgttaagccccgcgttaagcgctgcggcgccgcttgaaagctcgtcggtaccggcggataatttatcaatacccgcaactaactctttagactttgaaagcagggtagtaagcccgccgtacagctcggaggagccgtctatcagctttttcataccgcttgtaagctcgttcagctgtgcctgtaaatcgtcggcggagttaagctttgaagtgtcaaattcattaaacaggctgtttgttgcaagggtgagggtagtggtaagggcaaagtttttaacatctgccgtaacttcaatgtaatcgggaatttcaaatttatccttgcttaaattaaggttttcctgcaaacccggcagcgcaaagcccgcaactattgtacggtcgccgtcgtttatgattttgccgtttgtaaccgatacgtttgagaaaacgttgttatcaagcattaagcctgtaagcattgcaaagggaacataaatcttttcggtcttaccgcctatgtttacttcgctgtactgcttgtttgtgtagtcaaagcggatagtagccttgccgctctttcccgcaatttcatcggctgaaacggtcttgccgtctaatttatagcttacctttaaatcaacggggagctctttgcttattgtgccctggtaataaatgtccgcgccgtcggcgttccatacgcgcatattgtcggtatccattacataggattcatcgcccttaacgttcttaacgtcctcaagttctgttttatcctttaaggatttctcattaagcccgtttttaatccaatcgctaacgattatctttttaaccgagccgtcggcatttgcaagcacataaacggtttcgtcctttgcggtctttgtatcggttttgtcgctttccgatgaaacggacgtagaggtgcttgcggtatcctttttattgtttgcggcatttatagccgccgcggtaacgcccgtgccggcaataacgccggcagcggcaactgcaataagttttattaaatcattcttaacagttttcatttcatttagcctccgtttgttttttaggcttaaagcctatacttgtattgcatatgaccttatcaaacagcataaacattgcaggcagtatgaatattaccgcaagcatactgattatagcgccgcgcgccataaggttgcatattgagctgataatatcaacgtcggagtaaagccctacgccgaatgtggctgcgaagaagccgagcgcgcttaccacaaccgaggggatagaggttttaagcgctatgctgactgatgttttcttgtctccgcccaaagaccgctctctcttgtaacgcgtggtcataagtattgcgtagtcgaccgttgaacctaactgaatcgtgcttatacatataggcgctataaacggcattgacgtgccgagcaggtggcagaaaccgaggtttatgaatattgcaagctctataaccgcaaccaaaattatcggcagtgaaacgctctttaaaacaagcagtattataacgaatatagccgctattgaaattgcgtcaaccaccttgaagtcgtggtcggtaatatctatcatatccttggtgcagggcgcctcgcctatgagcataccgtttttatcgtactttttaagtatatcgttaagttttgttatctgctcatttacttcgtctgtcgcggttgcgtactcggagtttataaccatcaacttccagttatcgctttgtaaggtggactttgcctcatccggaattatttcatcgggtattctgctgcccactaccgattcaagccctaatacaaacttaacgccgtctatcttttccatttcgcttgacatctcgcgtattgtcttgccatcggtatcggcagatataagtaccatatgcgttgaacctacgtcgaactctttttcaagcttggtattcgctatcgagcactccatggtcttaggcagtgtttcggtcatattgtaataaacctcgctgtttgccttggtgtagcaccagaaagcaggacctacaagcactaagaagactataaggaatatccacgagcgtttaactacaaagtttgtaagcctgttcatagggggaataagcgctctgtgctttgttttttcaagcaacttatcgcatacaagtattaaagaggggagaacggttacgcaggaaataagcccgaacaaaacgccctttgccattactatgccgaggtcgcggcccagcgtgtagctcataaagcaaagcgctataaagcctgcgacggtggttatcgagctgccgacaaccgaggtaatggtagctttaattgcgtgcgccattgctctgtgcttatcacccgagtagcgctccttttgctcctcgtagctgtgccacaagaatatcgagtagtccattgtgacggctaactgaagcacagccgccagcgcctttgttacatatgaaatctcgcccataaagtagtttgagccgaggtttaccacaatcgccataccgatattcgcaaggaacaggaacgggataatccagttatccatgaatatcatcattgtaaccgtgcaaagcaaaaccgcaatgcctacatatatcggctcttcgtgctcgcacaggtctttaagatcggtaacgaccgccgacatacccgttacatagcagtttttatcggtaatttttcttacctctttaatggcgtccattgtttcgtccgccgaggtggaggttttaaagaagaccgctattatggttgagtcgccagaattaaaggcattgtaaatatcatcgggcagcatttccttcggtacggataaatccataacgctgtcgtaccagatagcgctgtcaacattgtctaccttttcgatcttttcgcgcaaagcggatacctgcttatcctccataccgtcaacgattataaaggagaacgcgcccttgccgaaatcgtcaagcaatatgttttgccctttcattgtttcaatgtcgtcgggcaggtaggtcagcatatcgtaattgatacgcgttttaagtattccgaaaaccgacggcaccattaaggctaccgcgattatcagaataagcacgcggtgctttaccacgccttttccgaattttatcatttatctcccagctttcatttgtttttcagtattttaacggtgtaaaacgcattgaataggttttgcagcccgtcgatagcgagcgacagacccacaaaggtcataagcacgttgttgccgctgaacgggtcaattataagcagcaacccgaaaagcgcgcagataagcgagcctaaaagtatcagccaccagtttgaaagcccgaagcgctttgcgtcaaccgccgtttgcagcttgaacacgccgtccaccaaaacaaacacaccgagtattgccggcataaaggctacgaccctcgcagagcgcagcagaagtatcaaaccgaagataagtgtgaaaactccgagcgccaaatcaaactgaaatgcaaggttgtaaaggtcgtgtgaaaaatagccgagtattttcgaaactccgtaaaaaagcgacacagcgcctataaccctgcaaaaaataattgccgaggcatacggtcttaccattatataaacgcctgcggctataagcagcaccgagcagattatataacaccattttgcctgtttaattgttttcattgtttttttcctcccttcattttctcaacgcaatatattatatacataataatttccgtttccaataaacataaaaaggcttatgtgtgaatttcacacataagccttaaagtgttgtattttcagacatttacacctgtttgtctgtatttttcaaaaagcagtagcgcaccgttccgtccaaaagctcgctaattcttataacaaaatcgtgcgggtcgcccttcatgccgccgctcagccactcaagcgtcatacctacaagcgcgtgggaataaaacgaggctacaagctccacgtcttcctcggtcggggataaatcggcaaccgattttttaatgaatataagtatattgttgtatgtaaccttattaagataggtttcaacctgttcgcggctgatagaattgtaaagatgatatatcgcgcggcggttgttatgcacaaaatctatcgcctttaaaaaggattcctgccaggtatcgtaatctgccgtgtttccgagaatatcctgcgtttccacctgaaaaagctcgtcaaccagcgcgtatacgtcctcaaaataatagtaaaacgtattgcggtttacgccacagcgggtaacaatgtctttaactgtaattttatcaaacgggcgttccgaaataagctctacaaacgagtctaaaattgcctttttggtaaattgcgccatatcgcacctccggatagtgtcagtatagcatattgctttttaaaaatcaagaccttagctgaatatgtaaattacagaatagcaaacaactccgaaatttaaacaacaaacccgccgttaattccgagaacctgtcccgttatgtattcggcggcaggggaggagaggaaacgcaccgcggcggctacctcgtcggcactgcccatacgcccgagcggtatgccctcaacaaaatcgttaagctcctcaattgtaaggtttgagttcattccggtttcaataagccccggggctatgcagttcacggtaatgccgctgggagccagttccttggccagcgccttggtaagacctataactcccgcctttgccgcggaatacgccacctcgcaggaggcgcccacctgaccccacattgacgaaatatttataatacaccctgatttctgattaaccataacgggtgttaccgccttgcagcagttgaaaacgccctttaagtcaatatcaattatgcggtcgaaatcaatttcgtcggtatcggttataagtccctgatacgccacgcccgcattgtttaccagcacgtctatactgccgaatttataaagtgtctctttcaccataatgtccacttcaagcttatttgcaacattggctttctgggttattaccgagtagccgttgctcacaagggaacggcagagcaggtttgccgattcgtaggattcgttataattgattaccacattccagccgttctgcgcaaagagaattgctgttgccgcgcctatgccctttgaagagcctgtgactattactgtctttttcatattaacccccgcttatattttctgaaatcagtataacatattttttcggaaaattaaagccccaattacaacaagttgagtttacataacagcgtgatgtgcacatcttgtgtgatttacataaaaagtttacataatattttccttttttaaaattgacagttgacataactttaaaaatgttgtataactatattgttaaccgcaaacgcggcatacactgattttacggtttaagcggctttaaaaccgacattatgaaaaacggtttacataaagtgtaattaaatctacattttgtggcggcggttttaaaaaaatcaaaatataggttttattgtttttcaggtatatcttgtccaactccggcatattatttcttagaaaccggagggaagaatatgaaaaaaggaacagtattaagccttaaaaaaatcaggttttccgaatttataataaaaaacaatgtgcttgtgctgctggttattttatttattgccggtatagccgccggaacatttgcggggaaaaaaatcaccgggctgacggattactcggcggaatatcttgagcggtttgttgcggagcgtagtaacgcttcttttttatcggttacggtaaattcctttgcggcttcggcgcttgtgctgcttgcggtttttgccgcgggaacgtcggttttgggcgttgtgctggtgcctatagcggcggcagcccgctgcgtgctttacggaagcgtttcggctctgctttactcgcagtattcggtaaagggtattgcgtttaacgctgtgcttataattcccgcagagataattttcgcggttgctctgctcttggcggcaagggaatcggttaagttttcactcggtatggcaaggctcacgctgccctcggctccgcccgttaatctctcggcggatttccgcagctattgcagtaagtacatacttatatgtttgcttacattgctttcggcaattacagacgcggttatgtcctgctcattcggggcaagtcttgctttataaaaggatgttaaattttttaaggaggtgcaatatggctgatatgtgcgacgctttcagggaataccttgtgagcgaaaaaaaagcgtcaacaaatacggttgattcgtatatgcgcgatatacaccaatattcggcgtattgcgcttcaaaaaataccgagcctgcggcggctgatgcttcatttataaaaaaatatgttgagtatttagccgttatgggtaaatcggacgcaacagttacccgcacggtagcctctgttcgttgctattaccgttttttaatttcaaaaagcattatagaggaaaatcccgtaaacggaataaagcttaaaaagaccgagaaaaagctgccgggaatacttgattcaaacgaaataattctcctgctttctcagcctgacggggacgattataagagcgtaagggacaaggctatgctcgaacttttgtacgctacgggtatcagggtttccgagcttatagagctttcggtaacagacgttaatttgcagataggaattttacatatgcacacgggcggcagggagcgcatagtgcccatgtaccccgcggcggtaaaggcggttgctgattatcttgtaaacgtccgccccgtaattgttaccgataaaaccgaggacaggctgttcaccaatatgagcggcggctcaatgtcacgccagggcttttggaaaattataaagcattattccgaaaaggcgggaattaaaaaggatataaccccgcacactctgcgccattcgtttgcggcgcatctgcttgaaaacggcgcgcagcttaaggatattaaggaaatgctgggtcacgccgatatatcctccacacaggtgtatgcgcagtttgttaaaaacaaatatacctcggcttacgccaggttccacccgctggcgagataaagatagcttttgaaatatattgatacaaaacgcccccgtgcttgaaatgtacgggggttattgttatgtataggtattttactcattatttcgtatttcttcacttttccgggcgcctgcaattccgcaatccatgaaattacccagcccagatacacgccgttcatagaaaaataattaacggaaaagaaaaatttcaaagcgcgccgctgagtttattgcggacggcgataccgtctttattgacggcacaacaacaagcgagggaatgggggattatctttccgctaaaaaagatataacggtaataacaaataatatggcgctcggggagcacctcaatcaaaacggcgtaaaggtaattcctaccggcggtgatattgttgagcctccgtagaagtgtaaaaaagagcgaacccacgcatataggggttcactcttttttctataaactaaaaaattgttatttttctttaaaattcagtattcttaatattacagggcttaaaatcatgtttgaggcaagctcgaacaggaaatttccgccgaccatacctaaaaatacatatgatacggtatttgtaaagccgagacccgcaccccacgcctttatggtatcaaggaagaacagcaggcagcccaaaagaaaaacgcctgtgtttacaagcgggcacacaaccgccgcggcaacaaccgccgcatatttattgtattttgcaagcagcctgtaggtaagtcccgccgcaaagccgcacgccgcgcctttaagcagcaccgtcaggaccgtgccgaaaacgtttacggctaaaaatgccgctgcgccgccgctaagcagcacaaccgcaccaaacacaaagccgagccatgtgccgattttcacgccgcatttcgccgcgcctataactataggtatgagcaccagcgaaatggaaaacggaccgaacttgataaatccgcccaaaagctgcagcacaatgacgattgccgtgagtattgcgccgagtacaaggttttctgtttgtttttttctttctgttgacataattcattacctccgatactctctcttacgagtagagttcatttggctgtctttcgtcagccctatatattatccgcaaaagcggttgttttaattatttttttcgtaaatagctttcagtccctcaagtaaaagattttcactgtatataatattctttttgcagtgggctattatttcctttgaaagcccgccggttgcaacgaaggtcggagtttcaccgagttcttcttcaatttggtcaagcagaccgtctatcatggcggcggtgccgtaaacaagccccgattgcatacattccacggtgtttgtgcctataaccgagcttggcgcctctatggggattgacggcagctgtgaggtgttggcggtcaaggctttaagggtgagccgcacgcccgccgctataaccccgcccaaaaacgtgccgtttctgtcaagcacgctcacggttgaggcagtgcccatatctattataacgcagggcattgtgtattcttcaagcgcgcccacagcgcccgccacaagatccgctccgagctgcgcggggttatcaatttttatattaagtccggtttttaccccgggccctaaaatcagcggaactatatggcacagctttgaaaccgcgccgcccacgctttcggtaacagccggtacgacagaggatataatgcagtcctcaatatcctcaaagctctgaccgtaaagcgaaagcacgtccttaatctcaatcgcgtactggtccgaggttttgccgctgtcggtcgagagccgcgcggtaaaggaaagaatatttgaattatacgccccgagcgttacgtttgtattacctatatctattgtaagcagcacttgaaatcactccttcaagccttattatacaggcaaatataaataaaagcaataattttattgacaagcagggaaaaaattgttataatacagtttgctgattataaaaattagctccttgctccgctttcgcggggccaaaagtccaaagggaggtgcaaagaaatgacaaacaagtacgaggcagccattgttttatccgttgcgcagggggaagatgccactgcggctttaaaggaaaaattcaatgaccttatcgcaaagcacggcacaattgagaacgttgacgattggggcaagcgccgcttggcttatctcatcaacgacgaggcagagggctactacgttttcttcacatttgaaagcgagccgtctttcccggctgagcttgagcgtatagcaaagatcaccgacggtgttctccgcgctatggttatcaagaagtaaggaggaacgaaaatgtttaatttagtggttttaacaggtcgcttaactgccgaccccgagcttaaaacaacccagagcggactttccgttacttccttttcaatcgctgttgacaggcgttttcgctcaggcgaagaaaggcaaactgattttataaatatagttgcctggcgccagcaggcggaatttgttgcaaagtatttcaaaaagggtaatcttatcggtattcagggctctattcagacccgcaaatataccgataaaaacgggaacaacagaaccgcatttgaggtagttgcagacaatattcaatttgtggaatcaaagcgtgattccgcacccgcaggcaattcagagcctgcccagtcgtacagtaacgcgggcagcaacgattttgccgatttgggcgatatgtcggatgacgatttgcccttctgataattgattttatctcattcctgtatataggaggtttgttagaatggaaaacgagaaaaacgacagagcaatgcacagaaaagcacgcaaaaaggtttgccatttttgtgttgaccgtgtagaagctattgattataaggatgttgcgcgtctgcgcaagtttatatccgagcgcgctaagatacttccgcgccgcgttaccggcacctgtgccgctcatcagcgcgagcttaccaccgctattaagcgtgcacgccagatagctcttctgccttacgtaaacgattaaggtttattgtaagaaagcttaattattgtttgagcgtgtcgaaaatcgccacgctcttgggcgggaatgccgctcgctcgaaaatcaaagattttcggactgcactctatccccgccaataccaccccagtatccttgaaaacccgcttaataagcgggttttcgcttacaatgtgtttttccgccgcgcatgtcagcggaaaaacgaaaaatgcggcgtaaacgccgcaaaaatagaatttggagtttaacgacggactgaagcaagcaactgcttttttgcagctgcttgctttttttacaatacttgattttttaaaaaatcgtgatgagttaaaaacgtagttttgtgtataaaattagctgaattcaggcttgtgccgggcgcacttgagagtatgaaaaccggcaccgtaaccgatagctttgaaagggtgagttttgccgcaattgcaataacaggcattgtgagcggtatttgtaagggctcaaaccaatgcgctattgcacataaattttacgaggaatgtcgcagctttttctacgaaaacacacttaatttcctgcacggtgagcttgttgcggtaggacttttggtacagctttcttattccggctcggattgcgcctatatgataaacgagcttacaacacttaagctccccaaatgtctttcggagttgaatataccaacggacgccgtagaaaaatttgccgatgagctttgcaattcgagtgcaattaacgatacatccgatataagccgcaaaaggatgcttgacgcattggaaattattaaaaaataaaaaatctcggaataacctgtaaagcacttacaaaagtataaaaaaacggatatcgagtatgatttttccggttgtgtaagctatataaaaggtttataataataattgaaaattacttttattattatacttttcatttcttacgggaggcaattatgacttcttacgaaagaagaaaaatctggtatgatatgcttgataaggatatgcccttgattgataagcgtatttctgacggaattgaaaaaaaccgaaagggcaatattcaaattaagcttacagataaaagcggcagacccgttgcgggtaaacgtgtgaaaattcttcaaaaaagccacgatttcaagttcggtgcaaatttatttatgcttaaaggctttgaaaccgaaagggaaaatgccgaatacgaaaaggcttttaaggagttatttaaccttgccacggttcctttttactggaacacgcttgagcccgagcagggcaagccgcgcttttctgaggatagcccttttattcttcgccgcccgccgacagacctttgcgttgagttttgcgaaaagcagggcattgcgcctaagcttcactgcctggtttatgataattatattcccgattggctgcccaaaggtgatatgaagcagatggagtattactatgaaaagcgcgtttcggaaattgccgagcgctacgcgggcagaatgtatgaatttgaggtcataaacgagacgctaagcacacggtggtggcataatcaatcggtaataagcggcaggcgtgatgttgtggagtgggcgtttgcgttggcaaaaaagtacctgccgaatgaaaaacttattataaacgacggctatcccttggcggaggctgcaattatgaattacagaagcacctattttttacagcttgagaagtgtctgcttaataagacgccgattgataaaataggcacacagcaccatatatttgttggcaacaccgcaagaaccgaggaggaatacgacgcgtcggtaagggagcaccttaacgagggcagcccgcttatgcacctaaaggcgcttgacgttttggcagagcttggcttgccccttgagcttaccgagcttacaattcccaccttcggcgatactgccgaggatgaagagttgcaggcggagcttgtaagaataatttactcggtatggttttcccacccggctgttgagtcggttgtttattggaatttggttgacggctgcgcctttaaatctgaaaatgcggattggtactgtgatgaaaataactgccgcggcggtttttaccacagagatttaaccccgaaaaaatccgctcttatgttgtcatggcttataaacggcgaatggcgcacagaaaaacaggaaattaccgataaaaacggatgtattaacctgcgcggcttttacggtgattattcactggaaattgacggggaaaaatacgggttcggattacataagaacggagacaaagcggcagaactggttgtttgattattttactgctatcaaatcaggcggagggaagaaatttcctccgcctgcggcttattaaaatgggctgccgccgtcaaacataatttcgtaattcacagggttttctttgcgaaattcagtcggcgattttccgacattgcgtttaaaaacctcaaaaaaatatttatagctgctgaaaccgcaaagcgacgaaacctgctcgaaggtgtaaacctcgcttgcaatcaggcttttggcatggtttattcttatttcggtaagatatttaacggcaggcattttatacgcctttataaaaagcttgctgaaataaatatcgcttataaacgattgcttggctatatcgtgaatggtgatattggggcttgaaaaatttttctgcatatattcaaccgacgggcgtattctgctgagtgcaggcgagcttgagtactccttcatagaggtttcatatgccaattgtttataaaaaatgtaattacaggtatagcggtagcccggaagcttgcttttccaggcttcatacatttttctaaaggcttttatcattccttcggggtcataaagctttattacctctatttccttaggccagtacccgccgattttgctgtgaattactattaaatgttcgtcttcctcacagcactgtgaatagcttatatttccggggcttaaaatcagctccccgggattataggggaatattttaccgttttgcttaaaatagccctttccgcttatacggcagctgataaaattaaagggcgcattatctgtggtaaatgtcgtgggtgttctttcaatctcaaatatatcacaaatccaaatagtcagatcctgagtttcaagcagcatattattcacctgagcttattataaaattcctgattgcagtatagcacatcaaggcgtatataacaatatttatttaaaaaattcgtattaaaaaacagatgtattataggcgccaaagtatggcacataattaacttaaaatttacaattttccgctgttgtaattttaacttaaatgttatataataatatgatagtaatttgcggaggatagaaaaagcaatggatttacaaaacaccgcgacagagttatttttaggtattgacataggctctaccacggcaaaaatagtgttgcgagagggagacgaaatactgcttgaacgctacgagcgccatttttcgcaagtgcgcgaaaaaacggcggagcttttgcgccttgcaaaggaaattgcgggcgaaagaaaaataaaggcggcaatatccggctcggcgggcttggggcttgcagaggcggctcacataccctttgtgcaggaggttttcgccacggcgcaggtggtaaagctgcgcgaacccgatacctcgtgcgttatagagctgggcggcgaggacgcgaagataattttctttaagggcggcatagacgagcgaatgaacggcagctgcgcgggcggcacgggcgcgtttatagaccaaatggcgaccctgcttaacataacggttgacgagcttgataaactaagtcttaacgcgggcaggctgtaccccatagcatcacgctgcggcgtttttgcaaagacggatattcagcccctcttaaatcaaggcgcgcgcaaggaggacgttgcggcaagcatttatcaggcggtggtaaaccagactattgcaggtcttgcgcagggcagaaaaattgacggtaaggtgctattcctcggcggtccgctttattattgcaagggtcttcgcacaaggtttaaggaaacccttaaattggatgatgaacacgcggtattccccgaatacgcgcgctttgcagtggcgctcggcgcttcttactacgcagagcagcagcccgaaattttcactgccgatgagcttttaagccttgttgaaaacgcggcgaatgtatcctctggcaaggggcggttaaagccgcttttcagaaatgaagaagaatataacgagtttaaacaccgccatgccgcatcatcggttaaaaacgcggatattgaaaaatacagcggcaaagcatacctcggtattgactgcggctctaccacaacaaagctatgtttgctcggcgataataacgagatactctattcatactacgcttcaaaccaaggcaatcccgttgaaattgtgcgcgagcagctgaccgaaatttataaaaggtgcggcgaccgcgtaactattgcaggctcggcggtgacgggctacggcgaggagcttataaagcacgctttttcggttgatttggggcttgttgaaaccattgcgcactacaccgccgcaaagtattttgaacctgacgtgggctttatactagacattggcgggcaggatattaagtgctttaaaatacgcaacggcgcgattgacagcataatgttaaacgaggcgtgctcctcgggctgcggctcgtttcttgaaacctttgcgaaggctatgggctacacaatagccgattttgccgcaaaggggttagagggaaaagcgcccgttgacctgggcagccgctgcacggtgtttatgaattcatccgttaagcaatcgcaaaaggacggcgcaacggttgaggatatatcggcagggctttcgataagcgttgttaaaaacgcgctttacaaggttattcgcgcatcttccgccgcggaattaggcgaaaaaatagtggttcagggcggcacgttttataacgacgcggttttgcgcgcctttgaaagagaaatagggcataacgttatacgcccatcaatagcggggcttatgggggcttacggcgcggcgctttattcaaaaaaatgcgagaaatcgggcattatttcgcccgaggatttaaaatgctttacccacacggcaaagtctgcggtgtgtcagggctgcaccaaccattgcaggcttacggtgaactcattcggtgacggcaagaaatttatttcgggcaaccagtgcgaaaagggactgggtaaagcgactgcgggcgagcagctgccgaatctttatgaatttaagcggaattatttaacacaccttaaatccgaagaaggcgcgcgaggtacggtgggtatgccgctggctcttggtatgtacgagcttttaccgctttggcacgcggtgtttacaaagctcggctttaatgtgaaagtatcgcccatgtcaacccgccgcatctacgaaaaggggcagttttccattccgtccgatacggcgtgctaccccgcaaagataatgcacgggcatattgaaacgctgatttccgacggtgtggacgcgattttctacccctgccttacctacaatatggacgaaaaaatgaccgataatcactacaattgccccgttgtagcctattattccgagcttttaaacggcaacgttgaagagcttaaacgggttaaatttttatacccataccttaatataaacagtaaaaaggagcttgcaaaggagctttacacttatctcggtaaattctataacggaattacaaaatcggaagttaaagcggcggttgaatacggacttacgcgttacgccgaatatatgaacgccgtaagggaagagggcgcgcgggcgcttaaattcgcgcgggaaaacaacaagcgcattatgattttggcgggcagaccctaccatatagacacggaaatagggcatggcattgataaattggctaataccctcggctttgttgtggtgagcgaggacagcgttttccgccttgcagagcctttcacggtaaaggtgctaaaccagtggacctaccacgcgcggctttaccgcgcggcgcgctacgccgcagagcatgaggataccgagcttgtgcagctggtgtcattcgggtgcggggtggacgctattacaacagacgaggtgcgcgaaattttagaaagccgcggcaaattttacacacaaattaaaattgacgagataaccaacctcggcgcggtaaaaataaggctgcgttcgcttataggcgcgcttaacgaaaggagtgacggcagtggaagagcgtaaatacataccctttaccgaagaaatgcgcaaggattacacaatacttgtgcctaatatgctgccgcgccactttaaaatatttttaaaaatatttgaagattacggctacaaaatggagctgctggaaacctcgggacaccgaattattgaaacagggcttaaatatgtgcataatgacacctgctaccccgcaattttggttattgggcagtttattgacgcgctcaattccggcaaatacgacccgcacaaaaccgcgctcatacttttccaaacgggcggcggctgtcgcgcctcaaactacattttccttttaagaaaggcgcttgaacgcgcgggctacggctatatacctgttatttcgcttaaccttgcggggcttgaaaatcaccccggctttaagcttaccttgcctatgctgcataggcttttctacggcataatttacggcgatatgcttttaagccttgtaaaccagtgcaagccgtatgagaaaaacaaggggcagactgaaagcttagcggacgagctgaccgcgctgcttgcaaacaaaatgcagacagagggaatatcctttaaaaaggttaagcaaaactgcaaaatgatactctcgcgctttgcggaaataccgcgcgtaaacgaggaaaaggtaaaagtaggcgtggtgggggagatatatgtaaaatattccccgctcggcaataataatcttgagcagtttttaattgacgagggcgcagaggtggtagtgccggggctgctcgacttttttatgtactgcatagtttcaaatatttcggatattgagctttacggtttacataaaatcagaaagcccgtgcttaattttgtattcagttacctgcaaaaacagcagaatgaaataatcgaactgatgaagaccgccggcaatttcaccccgccgactcccattgcgcacaccatgaacctgataaaggattttatgggcttcggcacaaaaatgggcgagggctggttattgcccgccgaaatgcttgagctcaacgatgagggcgtgcacaatatagtttgcacccagcctttcggctgcctgcccaaccacatatgcggcaagggaatgatgaaaccgcttaaagagaaaaaccccgatatgaatattgtggctatcgactacgattcgggcgcgtcaaaggtaaaccaagaaaaccgaataaagcttatgcttgcaaacgcgcgggcggatttagccgagaaaaaccgcgaaaataatattaagacggaggaaaaagcatatgccgaggcttaatattgttatggtggagcccgaaattccgcaaaacacaggcaatgtggcgcgcacctgcgccgccacgggggcaaggctgcaccttgtaggacctatggggtttacaatagatgataaaaagctgaaacgcgcggggcttgactactggaaatatcttgatattacctattataacagccttgcagagttttttgaaaagaacaacggcgcttatttttatttcaccaccaagggcaggcaaactcattccgatgtaaattatcccgataactgctaccttttattcggcaaggaaacaaagggcttacccgaggaactgcttataaaaaatcccgaacgctgcgtgcgtatacccatgcagggcgaaatacgcagcttaaacctttcaaattcggttgcaattgcggtttacgaggctttgcggcagtggaattaccccgagcttagcaatttcggtcagctgcacaattataaatgggaggatataggctaaattttacggcgcgggataaaataaatattgaaaaatcagaaaaatgtggtaaaatagaattgtaaaaattttaacaatgttttacacatgtttgaaaggatgtttttaaatgaacgctcttaacaaaaaaaccgttgacgacattaacgtaaaaggtcaaaaggttcttgtccgctgcgattttaacgtaccgcttaaaaacggcgttattaccgacgaaaaccgcataatcgcggctctgcccacaattaaaaagctcattgccgacggcggcagagttattctttgctcacacctcggtaagccgaagggcgagcctaagccggagctttctctcgctcccgttgcaaagcgcttatcagagctgctcggcaaagaggttgtttttgccgctgacgataacgttgtaggcgaaaatgcaaaggctgcggttgctaaaatgcaggatggcgacgttgtacttttacagaacacacgctaccgcgcggaagagaccaagaacggcgaagagttctcaaaggagcttggttctctggctgatatttttgttaacgacgcgttcggcaccgcccacagagcgcactgctcaaccgtaggcgttgtttcctatgtgaaagaggctgttgcgggctaccttataggtaaagagcttaagtacctcggtgacgcggttgaaaaccccgttcgtccgtttgttaccattctcggcggcgctaaggttgccgataagctttcggttattgaaaacctgcttaataaggctgatacccttattataggcggcggcatggcttacaccttcttagccgctaagggctacggcgtaggtaaatcgctgcttgataccgagaagattgactactgccgcgatatgcttaaaaaagccgacgagaagggcgttaaaattcttctgccggttgactgcaatatagccgatcatttcccggatccgattgacgcgccgattgaggttaagaccgttgacgccgataagattcctgccgattatgaggggcttgatataggaccgaagacttcggagcttttcgcaaacgaggttaaaaacgctaagaccgttgtttggaacggacctatgggcgtatttgaaaacccgactcttgcagcaggcaccattgccgttgcaaagagccttgccgagaccgacgccgtaacaattataggcggcggtgactctgcggcagccgttaacacgctcggctacggcgataagatgacccacatttcaacaggcggcggcgcttcgcttgaattccttgaaggcaaagagctgcccggcattgccgcactaaacgataaataattaactttatttcaaggcttgcccggtgcaagccttgaagtgtgtaatattaaaggagatttttaaaatggataaagcaaaaagagccgcggttatcgcaggcaactggaaaatgaacaaaacccccgcagagactaccgcgcttataaacgaaatgaagccgctcgtagctgacgctgactgtaaggtagtgctttgcgtgccttttgttgatattgtcgcagctgttgccgcagcagatggctcaaacattgaaataggcgctgaaaacgttcactttaaggaaagcggagcctacacgggcgaggtttcggcaaaaatgctggttgaaagcggcgttaaatatgtggtagtaggtcacagcgagagaagacagtatttcggcgagaccgaccagacagttaaccttcgcaccttagccgccgtaaacgcgggtcttaccgccattgtttgcgtgggcgagacccttgagcagagagagctcggctataccgaaactctgcttaaattccaaaccaaaatggcgctcaccaacatttcaaaggagcagcttaaaaatataattatcgcttatgagcctgtttgggctatcggcacgggcgttaccgctaccgctgagcaggcagacgagggcaacggctatgttcgcgccgctattgccgaggtttacggcgaagaagcggcgaactccgttaccattcagtacggcggctctatgaacgctaaaaactgcgacgagctggttgccaagactaatgttgacggcggacttatcggcggcgcttccttaaaggctgaggatttttcggtaatcgttaaggcggcaagcaaataatttttaggagcaaagcaaatgaaaaaacccgttgttttaactataatggacggtttcggcataaaccccgaagtaaagggcaacgccattaaagccgccaaaaccccgcggcttgataaaattttcgccgagtggcccaccacgcagataggcgcctccggtatggacgtaggtctgcccgacggtcaaatgggcaacagtgaagtaggtcataccaatataggcgcgggcagaattgtttatcaggagctgacccgcattacaaagtcgattaaggacggcgacttttttgaaaacaaagcgttttcagacgcgattgaaaactgcaaaaagaacgacagcgcgctgcacctaatggggcttttatccgacggcggcgttcacagccatattgagcacctttacggacttttagagcttgcgaagaaaaacgggctcacccgcgtttacgttcacgccctgcttgacggccgcgacgtaccccccgcaagcgctgccgattacattgataccttaaacgacaagcttaaagaaataggcgtaggcaagcttgctacggtaatgggcagattttacggaatggaccgcgataaccgttgggaacgcgtaggcaaggcgtatgccgcactggtttacggcgagggcgttcaggctgacgacgcggctgcggctgttcgtaaatcctacaccgaaattgacgaagagggcaagcacattacagacgaatttgtgcttccgaccgtaatttccgatacagagagaataaagagcggcgacagcgttatattcttcaatttccgccccgacagggcaagagaaattacccgcacctttgtggatgacgatttcacgggctttgagcgcaagggcggcagacaaaaggtattttacgtttgtatgacccagtatgacgcatctatgccgaacgttgaggttgcctttaagcccgaggagcttaacaacaccttaggcgagtttttggcaaacaacggtatgacccagctgcgcattgccgaaaccgaaaagtatgcacatgtaaccttcttctttaacggcggcagagaggttaaatttgagggcgaggacagaatattagtagcctcacccaaggttgcaacctacgatttacagcccgaaatgagcgcaaacgaggtttgcgataaggtttgcgccgctattgaatcgggtaagtacgacgttgtaatactcaactttgcaaactgcgatatggtaggtcacaccggcgtgtttgaggcggctgaaaaggcagttgaaacggtggatacctgcgttggcagagtagaggacagcacccttaaaatgggcggtgtaatgctgcttaccgccgaccacggcaatgccgaccgtatgctggcagaggacggcacgccctttaccgcgcacacaacaaaccctgttccgtttgcggtaataggcaagcagtgcgagctgagagacggcggcagactttgcgatatttcacccacaatcattaagcttttgggtcttacacagcccaaagaaatgaccggtgaatcaattattaaataataaaaccataaaattcctgttgctattaaacctgtatagcaacaggaatttttattttaattcatataagataaatgtgaattattttctttatgtgtaaatatatgtcgatatttgttgtgtattcacaaataccgacatatattttttatatttgtttcggagatttaacaaaaatgacttgataattgcctttaatactgctataatatatgtgttaattacgttaagaggtgcattatgaaggaatttttaaaagcattttcatcagcgggcgcttcggacgcttataaatatttgggcacgttttccgaaaaaggaaaaacgcttttcagggtttgggcgccgaatgccgcggctgtttcggttgtaggtgattttaacgaatgggacgtatctgctgaccctatgaataaaaaggacggcggtatttgggaaataaaaatatcggggcttaaaaactatgccgtgtataaatacgcaataacaggacctgacggcgttacggttttaaaatccgacccatacgcgcggcattacgagaccgcacccgcaaatgcctcaaagctgtatttttccgattataattggaatgacggcgagtggcaggaaaagcgccgcaaatgtaatatttacgaatcccccgtgaatatatatgaggttcacgcgggctcgtggaaacgctttgcggacggcaatacttatgattatgtaaccttggcacgcgagctttcaaagtatatgaagaaaatgaactatacacacgcagagcttatgccgattacggagtacccgtacgaaggctcgtgggggtatcaggtatcgggatattttgccccgacctcgcgctacggcacgcccgatgattttaaaaagtttgtcgatattatgcacgaaagcggcataggcgttattcttgattgggtgcctgcgcacttcccgagggataaattcgggctttaccgttttgacggcacgccctgttatgaatacgccgacccccgcaagggcgagcataaggaatggggaacggtggttttcgattacggaaagcccgaggtccgcagctttttaatctcaagcgccgttttttggattaaggaataccacattgacgggctgcgggtagacgcggttgcctcaatgctctatcttgattacggcaggcagggcggcgagtgggtgcccaattcctacggaggcagggaaaaccttgaggctgtgcagtttttaaaggacgtgaacaccgcggcattcggcgcagatccatctgttatgatgattgccgaggaatcaacggcgtggccgcttgtaacaaagccgccgcacacgggcggacttggctttaacttcaagtggaatatgggctggatgaacgatatgctccgctatatgtcgcttgacccgcttttccgcaaggataatcacgattgccttaccttctcgtttttctacgcgttttccgaaaactttattcttcccatttcgcacgacgaggtggtgcacggaaaatgctctatgatagaaaaaatgccgggcgaatacgatatgaagtttgcctcgctcaaggcgttttatacttatatgatggcccaccccggcaaaaagctgctgtttatggggcaagagtttgcgcagtttattgagtggaactataaaaacgggcttgactggttactgctcgattatgacgcacataaaaatatgcagagctatgtggcgcagcttaataaattctaccttaaatcgcccgagctttgggaaattgattattcgtgggacggtttcagctggatttcaaacgacgataacagccagagcattatatcgttcagaagaattgataaatcgggcaatgaaattataacggtttgtaattttgtacccgtggcgcgagaaaactaccgcataggcgtgccccgcgcgggcagttacaggcgcgttttctgctcggatgatgaaaaattcggcggaaaaacgcatacggcaaagagctttaaatccgaaagagtgcctatgcacggctatgaaaattcggttgcgcttgaaattcccgctatgtcggtaagctattaccgcgttccggcgagcagggataaaaagtaatattttttaaaaaaagcaagtatttataacttgtactatattgttgacgggagtgttatctttgaacagcaaaaaatgtgttgcaatgcttttggcgggcggtcagggcagtcggttgggcgtgcttaccgctaaaatagccaagcctgccgttccctatggcggaaagtaccgaataattgattttccgctttcaaactgcgcaaattccggaattgacacggtgggaatacttacccagtataagccgctggagcttaacgattacgtaggctcgggcaagccgtgggatcttgaccgaacaaacggcggggtgcatattctgccgccttaccggggtcagcagggcggcgactggtacaagggcaccgcaaatgccatttatcaaaaccttgaatttatagagcggtacgaccccgaggttgtgctggtgctctcgggcgatcatatttataaaatggattactcaaaaatgataaatgaacatattgaaaacaaagccgcctgcaccatagccgtgcttgaagtgccgcatgaagaggcttcgcgtttcggaattatgaacacccgcgaggacggcactatttacgaatttgaagaaaagccgaaaaacccgaaaagcaacttagcgtctatgggtatttacgttttcagctgggataagcttaaaaaataccttaccgaggacgagcagaaccccgattcatcaaacgatttcggcaaggacgttattcccgcaatgcttaatgcaggcgaaaatatgcgggtatacaggtttgacgattactggaaggacgtaggcacggtaaattcgctgtgggaagcaaaccttgatttgttaaacccgaaaatagaccttaatttagccgaccagaactggcgcatttattcaagaaccacgggtatgccgccgcagtatatatccgattcggctatggttgaaaattcgcttataaccgacggctgcgaggtttacggaacgcttgactattcaattctttttgaaaacgttacggttgaagagggcgcaacggttgaatattcgcttgtaatgccgggcgcggttattaaaaaaggtgcaaaggtgcgttactcaataattgcggaaaatgcagtgattgaagaaaacgccgcagtgggcgcagaccccgccgtggcaggcaccgaaaactggggaattaccgttataggcgataacctgacggtcgggaaaaacgccgtcattagccccgataaaatgattaccgaaaatgttaaggagggggagaaaatatgagagcatcggcagttgcgggacttgttttcgcaaatattaacgacgatctgcttaaaaagctgacttcaaagcgctcaatggcgtcagtaccgttcggcgcgcgctaccgccttatagatttcccgctttcaaaccttgtaaacgcaggcatttcgagcgtaggcattattacaaaggaaaactaccgctcgcttatggaccatgtgggcagcggcgtttactgggatttagaccgcaaaagcggcgggctttaccttttgccgccttaccttacaagcggcgttaaacgctaccacggcacggtggacgcgctttacggcgcgtgggattatatagaccgctgcaaggcggattatatggtaatatgcagcgcggacgttatttcaaatattgatatttccgccgcggtggaaagccatatcgataacggcgcggacgttactttagcgtatcactctgcaaagccgcctgtaaactgcgccgatacaatgttccccgaaatagggcgcggcggcagaataaacaagctgagctttgatattgaaagcgccgacgaaaccgatttttgcataggacttataattatttcgcgcgagctgctgctcacccttattaacgacgcgcacgacgagggcgaggtgagctttgcaagggacgttttagcgaaaaaggttgataaactgagaatttacggctacgagcacaaggcatacgccgccgtgcttgacagcaccgaggcttactataaggcgagtatggacctgcttaataaggacgttcgctctatgctttttgataaggaacgccctattttcacaaaaacccgcgacgatatgcccacccgctacggaacaaaggcggttgttaaaaactgctttatagccgacggctgtgttataaacggcacggtgcgcaacagcattgttttcaggggtgttaccgttgaaaaggacgcggttgtggaaaactgcattttaatgcaggaaaccgcggtaggcgagggcgcgcagcttgtgaacgttattgccgataaaaacgcttcggtaggggcgggtatggtgcttaaaggcaccgccgccaagagcttctttataaagaaaaatcaagcgctttaaaacagataggagaaagaaatgaaagtattatttgcttcaagcgaggcttatccatttgcaatgtcagggggactggcggacgttgccggcgcactgcccaaggcgctcagaaaaaggcttgtgggctgccggatagttatgccgctttacagctgtattcccgatgagctgcgcgaaaaaatgaattttatttgcagtataaccgtttcggttgcatggcggcggcagtattgcggaatatttgaagcccatatggacggcgttatttactactttatagataaccagtattatttcaagcgcgacgggctttacgggcattacgacgacgccgagcgctttgcgttcttctcccgcgcggtgcttgatattatacctcacataggctttacacccgatattatacactgcaacgactggcagaccgctatggtgcccgtgtatcttgatacgatataccgcgataacgatatataccgcaatatcaaaaccgttttcacaattcacaacatacagtatcagggtaaatacggtcacgagcttacgggcgacgttttagggctgccgtatgaatcggaaagccttgtcgagtatgacggctgcgttaatcttatgaagggcgctatacagtgcgccgataaggttaccaccgtatctcccacctatgcgcgcgaaatattagagccttactattcaaacgggcttgataatattttaaagcagtttacctataagcttacaggcattgtaaacggaattgattatgatgtttacaaccccgaaacggataatttgatttataaaaattattctgttgacgaactgaaaaataaggcttataataagaaaatgcttttaaaggaaatgggcttgcccgaaaccgacgcgcccgttataggtattgtaacgcgccttgtaaagcacaaggggcttgaccttgtgaagtgcgttttcgaggagcttttaaaggcggatttaaaattcgtcattttaggctccggcgagtgggaatttgaaacatttttccataacgctgcgcaaaatcaccccgataaggtcgcgctgaaattgggctttaacccgcagcttgcgcataaaatatatgcaggagcggatatgttcctgatgcccagccaaacagagccatgcggacttgcgcaaatggtggctctgcgctacggcacggtgccgatagtgcgggaaacaggcgggcttaacgataccgtatccgacagcggcaacggcgagggcaacggctttacctttaaaaactataacgcgcacgatatggaaaacactgtctggcgcgcacttgcaggctacgatgataaagcgggatgggatatcctgcgtaaaagaggtatgcggtgcgataacagctggggcgtttccgcaaatgcgtatatcaggttatataaggagcttgcgggcaagtgaactgatattataaccggtgctttgggggaattatggatattattaagtcgattattttaggaattattgagggtattaccgagtggctgcccataagcagcacgggacatcttattattgccgacgagtttataaagctcggaatgacggatgaatttatggagatgttcaacgttgttattcagctcggtgcgatactcgccgtggtggttattttctggaacaaaatgtggccctttaccgccgataaagctaagggctataactacataacaaagggtaacggcttaattaaaaaggacgttatggatatgtggttcaaggtaattgcggcaatgctgccggcggcaatcgtcggtattccgtttgataattattttgaaaagcatttccacaactggcaggtggtttccgccgcgcttatagtttacggtgttttgtttatcgtaatagaaaaaataaataaaaaccgcaagcctaaggtaaacagcatacccgagctttcctataaaaccgcgcttttaataggctgctttcaggcgctttccttaattccgggcacttcgcgcagcggctccaccattttgggcgctatgattctcggcgtttcgcgcgttgcgggggctgagttcagcttctttcttgcggttcccgttatgttcggcgcaagccttataaagcttttaaaattcggctttacgtttacaggcatggagcttgctgttttagctgtgggaatgctcacctcgtttattgtgtcggttatcgcaataaaattccttataagctatgttcgccgccacgatttctcgctgttcggttactaccgcatagcgctcggcgtaatagttatagcatattttcttatagcgggttgattttatgaaaatacttattgcatctgatattcacggctctgcgtattactgccggatgctgcttgaagctttagagcgggaaaaagccgacaggcttttcctgctcggggatattctttaccacggtccgcgcaacgacctgccgcgcgattacgcgccgaaagaggttattgcaatgcttaaccccttaaaggaaaagcttttctgcgttcgcggcaattgcgatacagaggtagaccaaatggttttgaatttcccgattcttgccgattatgcggttcttccgcttggcgaccgcgtgatttacgcaacgcacgggcataagtttaactgcgataatccgccgcctttatctaagggcgatatacttttaaacggacatacgcatattccggcggataaggacatgggtaatttcagatatttaaaccccggctctgtttccatacccaaggagcaaagcccgcacgggtatatgacgcttgaaaacggcgaatttctttggaaaaggcttgaaaacggggaaatatacactccgtaaggaaaatgtaatatgatgatttcaacaaaagggcgctacgctatgcgggttatggcggaccttgccgagcatataggcgagaccgttccgctttccgacatagcaaagcggcaggaaatttcacttaaatatttagaggctattgtgtcggctctgtcgcgcgcggggcttattgaaagtcagcgcggcaaaagcggcggctacaggctgaaccgcaagcccgaggaatacaccgcccgcgagatattagaggtgaccgagggcgggcttgtacccgtaaactgcgcctgccttacaaagggcgaggagtgcaagcgctcggggctttgcccgtcactgcccgtatggcaaaagcttgataagcttatatacgattatcttgacagcgtatcactttccgacctgatttcaaaatgacataatttctgaattttttgctgcaaggcggtgcgatagaatgaaaaaatcgacattacctaaaataattataataatagctgcgccgattctggttttaattttggctgcggctgcatttttgtcgataccctatgtaaaatgcaatagcttaatagtttccgcaaacaataccgttattgacgattcctttgatgaggacgagacatttatttcaaaaagagactatgaaaagttggtcgttgtgcctaaggaagaaattaacgaggataattacataaaagtaaaaacctccaacagaattaagctttcagcgctaaaccgaatgacgattaagtgtaaaattcgtgctgatgtgcaagactatgacgcctttgaaaagaaaaacgaatacaagggcgaggtttcggtagcctttgcttttcgtgatttcaagtggcaggtaacatctgttcagtgtgattgaggactttataatatggaaattaaacttggctattttacaaatgatttaatactttgtaggggcgaaaacagcaaatcaaccgttgagctggcgggtataaatcccgatgaaattataaaagaagaattattgcaaaaaataattgtatgcggcgctcgcacagaagaaatggaaaccgcaaaaaacaaaataatgtatgtgctgttaagcctgatttttaaaaataaaggaatttttgaagacccgctcagagcgattgaaattatatacagtgatttcggctgcccgaaagctattgaagggcttgtgcgttatatgccggcagaaagcaaagaaacggtgtgcacagaagaacaaatatacaaggattgggaaaagtatttgtctgaacaaaagcattattttgcggcagaataagcatatatttttatttttcaaattcctattgactttgtaggaattatatgttagaataaagtcacaaagaaaaagggaagtgagcgataaatgaaagtttacgcggataatgccgcaacaaccagaataagcgacacggcttttgacgctatggctccgtattttaaggagctttacggcaacccgtcaagcctttatacgttaggtcagttatcgcaggaggctttgtattccgcccgtgaaacggttgcaaaatgccttaattgcgatatgaaggaaattacatttacctcgggcgggagtgaggctgataatcaggctatactcacaggcgcgtatttgggcgcggcaaagggtaaaaagcacataatatcctcggcttttgagcatcacgccgttttgcacacgcttgaaaagctcgaaaagcagggctttgaggtaactttattacccgttcattcggacggctttgtgcgtgttgatgagcttgaaaacgcaataagggaagatacggcgcttgttaccataatgtttgcaaacaacgaaataggcactgttcagcccattcgcgaaataggcgaggtatgtcataaaaagggcgtgcttttccacaccgacgcagttcaggcggcggggcatattaaaatagacgttaaagagcagaatattgatatgctttcactttcggcacataaattccacgggccgaaaggcgcgggcgtgctttacgccaaaaagggtattaagctgtatactcttattgagggcggcgc

SEQ ID NO: 54 - DNA, 32759 bp, Unknown
  16S sequences of unknown bacteria
actgcgaaatcgagagcatggacctggctacctatctgtctgccacagccgaaggtgacttcactgcagctatcggcggctatacctccagcgacctgctttcctatgtggtgggcgtgtatcacagctcctccatcaacgcttccaacaagacccgtctgaacgatcccgaagtggatgctctgatcgatcaggccaagaagaccgtggacgaggccgagcgcaaagtgatcatggagcagctgtccgccaagctgaatgagatctgctctcaggctcctctgtggcaacctttgagcatgcgtgccttcaacgctggtctccagggtgtggaagtcaacgacggcggctacctgtatttcgaaaatgtgtattgggctgaataaaaaagcctgatcctttcacaaaaaacctggcccttcttcgggaattttcccggagaagggctttttttattgtttttcgcctggaaatcaataaaatgaataaaaatttaaaaaattgtgaaaagaaacgaaaataattaaaatagcatattttgctgggggaatatgtctagaaaagctcttttgaaaaaagagtgaaaatggtaaaatagaccaaaaagaaagttctgaaactgtgcaaggtgcaaaaagaaaagcctttgtgaagaaagagtaaaaagatcggcccgttgcaaaaggaagaaactgcgtatataataagcccgtcatagattggcaatcaatagaacatgatttgataataaatattcccatctttgggggaaaagagatggattcggcggggcccggccctgttgaaaatattttatgaggtgaataccatgagaaacagaaaagttcggctgctcagcctgcttctggccacagtgatgctgctgggcctgctggctggctgctccagtgataagggcagcggcaccggcaccggaaccaagggcggcgacaaggacagcattgtcattgccacggccaacgagacaccgtccctgtctcccaccgagcacaatgctgtggctggcgactatatgaaccagctgacttacagcatgctcttccgcaccgatatggatctgaagccccagcctcatctggtggagagctatgagaatgtggacgagagcacctggcacttcaagctgaaagaaggcgtcaagttccacaacggcgacaccatgaccgccgacgatgtggtggcttccctccagtgggcccagggctttgccgaagtcaacctgtacaacaagaactttgtctccatctccaaggtggacgacatgaccgttgagatcaagaccgatggccccgacgccatggttctgagcaacctgtgccatcacggcaacgccatcgttcccaagaagctcatcgacgaaggccatgacttcaacgaagatcccatcggcaccggcccctacaagctggtggagtggaagcggggcgacagcctgactttcgaagcctttgacgagtacttcctgggcgctcccaaaatcaagaacatgacctggaagatcatccccgaaggctcttcccgtaccatcgctctggaagccggcgaagtggatcttgtggtggaagtggaagccatggacggcgaccgtctgaaggaaaacagcgatatcactgttctggagtacaatgacaccagcctgagctggctgatgctgaacaacgaaaagcccggcctggacaaccaggatgtgcgtcacgccatcaacaccgctatcgacaaggaaagcgttgtgactgtggcctacaacggcatggcgactcccgctgtgtcccagatgtccatgaactttgagggcgctactgaggaaaacgccgacacctatgatgtggagaaggccaaggaatggctggacaagtccggtgtggaccctgcttccgtcaagttctccatcatctgctctgacgacaccaagaagcgggcagccgaagtcatccaggccaacctgaaggaaatcggcatcaactgcgaaatcgagagcatggacctggctacctatctgtctgccacagccgaaggcaacttcactgcttccatcggcggctactcttccagcagcctgctgagctatgtggtgggtgtgtatcacagctcttccatcaacgcttccaacaagacccgtctgaacaatccggaagtggatgccctgatcgatcaggccaaggtgaccatcgacgagacccagcaggtggccatcatggagcagctgtccgccaagctgaatgagatctgctctcaggctcctctgtaccagcccctgaccatgcgtgcctttaacgccggtctccagggtgtggaagtgaatgacagcggttatctctattttgagaatgtttcctgggctgaataagcagcagcttttgaaggaaatttagacaaaatacccaaagactctccggagaaaaggttctctggagagtcttttttcttgcatatccgggaaaatgacaggaatatcctgtgcaaaatagctgaattcaaaatattatatttcattcgatatagcatatattctgaaaaacatggaaagggcaaaaagggtcttgcaaaggggaaaaagagggcctataatacgaaacaagctcccccgaaccccttccaaagggcccttggagggaggggaaaagcgaaaaaatattttgaaattatgaggtgattcccatgaacaagacgaaacagaggatgctgagcctggtactgattattgcggccctgatcggtattgtagcagcctgtcagaagcagtcggcccagaccaccaagaccgaaggcggtcaggccgtaaccacagcggctggaggcaaagacagcatcgtcatcgccaccatgagcgaaacacctaccctcagcccctattcccacaatgccacagctggttcctatatgaaccttttgacatacagcaccttgtttgccaccgatatggatctcaatccccagccggagctggtggaaagctatgagaacgaaagcgagacccggtgggtgtttcatctgaagcagggcgtcaagttccacgacggcagcgagatgactgcccaggatgtaaaggcctctttggaatacgccaagacctttgctgaagtctctcagttcaacaacatgatcgccagtgtggaagcggtggacgattacaccgtggccatcgagacaaacggcccctccgccgtgctgctgacaaacctttgctcccacggcaacgccatcgttcccaagaagctcatcgatgaaggccatgacttcggagaagatcccgttggcaccggcccctacaaactggtggaatggaagcggggcgacagcctgaccttcgaagcttttgacgaatatttcggcggtgcaccggccatcaagaacatgacttggaagatcatccccgaaggttcctcccgcaccatcgctctggaagccggcgaagtggacttcatcgtggaagtggaagccatggacgccgaccgcatccaggaaaatgagaatctggaacttctgagtgtggattccaccgccctcaactggatggtgctcaacaacgaaaagcccggcctcagcaatgagaatgtgagaagagccatcaacgccgccatcaataaggaaaatgtcatcaccgtggccctcaacggcctgggcgaggtagccgaaggcgaaggcgcctccatgctcaccggttacagcgcagagaacaccgattcctacgatgtggaaaaggccaaagaatacatggagaaatccggcgtgaaaccctcctcggtggagatgagcatcgtttgctccaatgataccaagaagcgggccgccgaagtgatccaggccgatttgaaagagatcggcatcgaggccgagatcgaaagcatggatctggccacttacctcagcgccacggtggaaggggacttcaccgcagccatcggcggctataccgcaacagacctgatcacccatgtgcagggtgtgttccacagcaattccatcggcggctccaatcaggcccggttcagcgatcccgaagtggacgctctcatcgatcaggtatccgccacagtggatgaagatgcccggaatgagctgctccagcagatcatggccaaagtcaaccaggcctgccccaatatccccctctacaccgccaccagcctgcgggcctatgccaagggtctggaaggtgtggaagtcaatgccggcggcaccatgcgctttgaaaagtgcagctgggccgactgaacactgcaaattccttcatactcatattgttttcacaaaccgaaaaccgcctgggagtcgctgcccaggcggttttcctttggtttgaggacggacaaagtatgacaaaaaatcaacaaaaaggactttgtgaaaaaatcgtcaaatatgccaaaagatcgaaaaacaaaataaacagtaggggaaaaatagataaaagcgatgtttgataaatgcttaacaaagtgaaaaaatcgtcgaaatgctgcaaataaattcatggtttttggttatattttaaaatagtgttttgaaattattgcgaaagtatgaaaaatctcgttgcattttgttacacgccggactataatgcacatagtccttcgggacggggtcctgtgccggagaaaagggaagcggtgatggggccataaaattgacgaggtgaaaaagatgaaatccagaaagatccgtatggccagtctgatgctggccggggtgatgactctgggcctgtttgccggatgcagcaaggatgcatcccaaagcagcacttccggcggcaacaaggacagcatcgtcatcgccaccatgagcgagacaccgtctctctctcccaccgaccacaacgccgtggccgggtcctatatgaatatcctcacttataacacgttgttccgcggggatatggatctcaagccggtgcccgagctggtggatacctatgagaacaccagcgacaccgaatgggttttccatctgagacagggagtcaagttccacgacggcagcgaaatgacagccgatgatgtggtggcttccattgaatatgccaagacctgcccggaagtcaacctgtataacggttcggtggagaagatcgagaaggtggacgattacaccgtcaagatcaccacccctggcccctcggccatcctgctcaacgacctgtgccatcacggcaacgccatcgtttccaagaagctgctggacgaaggccacgactttgccaccgatccggtgggcagcggtccttataagttcgtcagctggaagcggggcgacagcctggagttcgaggcctttgaagattatttcgacaaagaccatatgccttccatcaagcacatgacctggaagatcatccccgaaggttcttcccgcaccatcgccctggaggccggtgaagtggactttgtggtggaagtggaagccatggatgccgagcgtatcgagagcaacagcgatctgactctgctccagcatgattccaccaaccatatgtggatgatgctcaacaacgaaaagcccggcctcagcaatgtggatgtgagaagagccatcaacagcgtggtcaacaaagagaacatcgtcacagtggccctcaatggcatgggcgtggcttcttactcccagactccctccaacctggaaggggccaccgaggaaaagagcgaaaagtacgatgtggagcaggccaagaaatacatggagcagtcgggtgtggatccttccaccatccagctgagcatcatctgctccaatgaccaaaagaagcgggccgccgaagtgatccagtccgatgtggccactctgggcatcgatgccaccatcgagagcatggacctggccacctacctgagcaccacggccgaaggcaattacacagccgccatcggcaactattcggccagcaatatgctgtcctatctcaccggtgtttaccacagcaagtccatcggtgcttccaacaagacccgtctgaacaacccggaagtggatgccctgatcgatcaggcgtgcgccaccatcgacgaagcggagcgggaagaagtcctgcgccagtgcaacacgctcatcaatgagctgtgcccccaggttcctctgttccaggatgtgtacctccgggcctacaacgccaatctggaaggcgtggagatcaatgcagccggtttcctctatttcaacgatgtgaagtggaaggaataacaaaaccgcttacactttgcggcaatcgccgcttctcataaaccctcataaaagccaaaggccagggacgaaagtccctggcctttgtgcatgccaaaatgtcctgttggaaatataaaaaggaaaaaatacgaaaagtataagaaaaaagtcgttttctttttgggggcgccatggtacaatcgaaacagaaaaaaggagggggaatgatgaaaaaacacccgtggggtctgctggacaggcgggccatatccaatttgctggtggctgtgctggccatttccttttatctggcggtggccaatctcacttccatccgggagcatttgcgcaattttctggacatcctctctcccttcctggtggggtttgccattgcctttctcctcaatgcccccatggaattttttcgccaaaaggtctatggccgcctgcggggcgggaaggccctggccatccttactgtctatttgctggcgacggcggtggtggccgtgctggtgcagctggtactgccccaggtggtccggtcggtggagctgtttgtttataatgtgccctattatctcagcaatctgaacgatttgtcccaggagatcgtgtcccgtctgcatctggacagccgggtggtgggcagcctgatagacacctatgacgaactggtgcgccaggccggggataccctgtaccgccgcctgcccgatctgtttaacctgggcgttgccttgggcagcggcgtgatctccggctttaccgccctgatcgcttcgatttatatgctgtacagcaaggagaacctggttcgcctgctgaagcggctggtctatgcctttgtgcccaccgataaagcgcgggtctttttgggctattgccgcaagagcaatcagatcttctcggcctttctcaatggaaagatcatcgacagcgccatcatcggcatgctgtgcttctttttgtcctgcctgatcaaaatcccctttgccattctggtcagcgtcattgtgggcgttaccaatatcattcccttttttggccccattgtgggagcggtgccctgtctgatgattctgctcattgtggatcccttcagcgcactgcggtttttcatcctcattgtggcgctgcagcagttcgacggcaatatcctgggccccaagattctgggggacagcaccggtctttctccgctgctggtgttggccgccatcgtggccggcggagggctctttggctttttgggtatggtgttgggcgtgccggcctgcgctgtgctctattccatattgcgggatgtgaccgccctcaagctgcgccagcggggagtggatgaaaagggcaaccctcttcttccttcgtcagaggaaggggagcaataagtccgaatctattcaaagagaaacccacaggggagacggtcggagcgccgtctcccctgtgggtttttatgaaagaaaagcggtcaatccagtttgctatccaggattttgtagaggataaacagcagggcgatgcctcccagagccagcagcagatggatagaggcgatagagtaggtgataaatacattggcccccatgcacagaagcatagcgacaaagaggaggagaaagaaaaagaacgcttcttttttctttgggccggcatcggtgcggaaggcgtttttgcaaatggcctggaccagggcggtggaaagagccagaatcaacaggccgctgatcagattgcctgcggtcagcgttacataaggccatgtgctgggcttgatcatctgctggacgcactggaagaaaagccagagggccagcagcatactggtcagaaggaaaaggtctctgcaaaaagaaagaatacgggtacggcctgtcagtttggggatttctgcaatgacatcgtcgcagaacagacgatagtcctcgccgatgacatctttgataggggctccccggtgttcgccatccaggatcatttccgtcatgtcccggcgcactttttcctgatcgtatggactgatgttggctgcgcggatatacaccaccatattggtcaggacctctttgttttccgggttttggatgcagttttccaatgcattgttttcattcagcagttgtttggttcgtttgctcattttcggtccctccctgaatgtcgcagatcaaagtgtgtatggcttgggaaagttcggcatagctgctgagaaaatcggtcagggcctgctccccttggggcgtcagtgcatagtattttcgcttgggacccagatcggaggcctggtatgtggcatggacccatttgtttttttccaatcggagcaacaggggatagatggtgccttctgtgattttcccaaagccgtaggccatgagctgttgggatatttcatatccataggttttctttttgctgatgatggccaggacacagccctccagcgtacctttcagcatttgtgatgggatcaagcggccacctccttgtttgcgactatattgtaaaacaaagtacctgggtatattgtattgcaatatacctgtattgtcaagaaaaaatccccaatgggagggagcggtgctggggcctgtggcttttttctgccgtttttggaggaaagcgcagggaaaagcaaacattcacttgaagcggcgggggatgtgatgtataatcgtatcactatcagaggaatggacggggaataggaagaaaaatggcccccggcagaggaccttttcaggaaggcaggaggggtatcaatggaaccaatgggattgcaggaaaccatggaacaaatcctgctggaattgcggcagaaccggctgatgctggaacagctggaggaaacccagcagaatcatacgaaaatgcttcaggagcattaccggttgctgaaagagcaggatgaagatctgctcaagatcaaggtgcgtttggaaaacgatttgtgccctaagctggatatgctgtttgaaggccaggtgaatctggccgagcagcgggatcgggatcagcgggaaatccgccgccgtatccgggaagtggaggacaaaaacaccatcctcaccgtgcaggtggaggaattgttgaaagcatgataaaaccgcccggctgtcggccgggcgatttttctgttggagacagttttgctgctttatatataataaggagaaaagccgatgcagatcatcatatccccggcgaaaaagatgcgggatgaactggacagcctggcgccccgctcccagccggtgtttgggcaggaggccgggcagctggcggagtggctgaaaagtctttcctatgaggagctgaaagagcgcctttcctgttcggaagccatcgcccgacagaactatgagcggtatcagaaaatggatctgacaaagaacctcagcccggccatattgtcttatgagggaattcagtatcagtacatggcccctggggtgttcacctatcaggagtttgattatctccagcagcatctggccattttatccgggctgtatggcctgctgcggccttttgacggagtgcgtccctatcggctggagatggggacaaaactgaaagctccgttcggggaaaatctctatgatttctggggcgaccgcttggctcgtgagctgacgaaggaagatcgggtggtggtcaacctggcctcctgggaatatggccgggcggtggtgcgccacctgggagaagatgcacagtgcatcactccggtgttcggtcagctgatcgggggcaaagtggtggaaaaaggggtctatgtgaagatggcccggggagaaatggttcgttttctggctgagcgccagggggaggagccccaggtgatgcaggaatttgacgccctgggctatcggtacgatccggcccgctcggatgaaaaaacctatgtgtttttaaaaccctgagaggtggaaaggagaatatatcaatgaaagaaaaacgatatgccaatctggcgctggtctatgcccttttggccatggccggtggggtattttaccgggagttcaccaagttcaatggctttcaaggccgcacagcgttggggacggtgcacacccattatttccttttgggaatggtctttttcctcctgctgcttttgctggagaaaaatctggccttttccgggagaaataccgggaaagtgctgatcttttatcaggtgggactgaacctcaccgccttgatgttgctttgccggggtatcgtgcaggtgtgggggattgacctgtctgcggccctggaaggagctctttccggtatggccggtataggacatattctgctgggggtctccctggtgcttctgctgctccagatcaaaaaaagctgcacacggtaaaaacaaaacaaggcccgtcctctgacaaaggggacgggccttgctgcgtctgtatcaatgtagcgttcttatttgcttacggcggctttcagacggagcagatcggcatcgtcgggatggctcaaggcccgatcgaagttttccagcatggcggtgcgccgggggctgtcctccattccctgatagcgatcacgcacgctttggggcatcttgccctggcacatataggagccgatgcattcggtgccttctggcaaaagggcttgcacccggcctaagatctggccgaaataggcatcatttccgccaaaaccggcggtgccgaacaagaacacctgctgatgggtcaggctttggagaaactgggcggtagcggcatcgcaagtgcctttgtcggtccagaaccccacatagatggtttgggcggccagggctttggcatcgggcgcgccgcaatagaggcagtccccctggggcagggcctctttcagagcctgggccagaagagcggtattgcctgtgcggctgctgtaaacaatggcataactcatgattgtgcttcctcctttttatcgtagatacagtggacgccctggtgggccatcataccacccaggcattttttgttgcagcggacacaacggtgaatctctttggcccggccggttgccaccttattgggccactggggatcggcagtgagctggcggctcatggcggcacagtcgatccgtccgtttttcagctgcctttccacaaaatccggatcggtcaatccacccacgccgcacaccggcaggcgggtcagcttttttaccgtatcgcagaacttcaaaaagcagccttccgctccgaacaccggatggctggcgggagggatggtatcggtcagcccgccgtggttggccagggtcacatgaaagctggtcacaccggcctgctccaaaataggcacgaaaatgggcagctcactttccagcacgccggcatttccataatgagggtcctcctggcgcacggccagcttgaaatcaatggggatttccggcaagctgcggcggatggccgatacggcttctgcggcgaagcgggctctgttttccgggctgccgccatagcgatcggtgcgttggttaaacagagcagagctgaagctgccgcacatccggtctccgtggacctggaccatatcgaatcccgcctggacggccagctgtgcggccataccaaaggcggagatgatctcgttgattttttccaccggcagattggtgatatacggccccacctgctggttgagcaaaggccgcagttcctccatggagatccggtgggtcagcactttggggatgtatttgatcatggccttccagttggagtccgattggtgaagctgggcgcagatcttgcacccttcctggtggacggcgtcggtgagggatttgtaataggccatgcccttcttggaatagagagaggggccaaagccatggggaagcaccggcacatctcccaggatgatcatggcgcagccgccggcggcgatgttccgcagccgctctatttgctccggttggggaagccccagagaagtcggagcgaaaatgatccggttttttaaaggaagaccgccgtaatttatagggctttggatggtttcgtacaagtgggatccacttccttccgggtaacttttgccaagaggttcaaaagctgctgctgttccgcgggggaaagggaggccagggcctcctcgtcccaatcaaaaaacacctggtggctcacttcaaatgtttcctgccccttggggctcagatccagatgataggaccggccggatttttcccgggtgagaaaccccccttccaccagcttggtgatgaggcgctgggaatgtccccagtccagattcaaagcggcggtcagctgggcctgggagcatccggggtgttttcccacatagagaatggggaacagggagccgaagctcaagcccacctgatgcagccgggccgtggtataggtgacaaagctgcggtgaaacagggtgacatagtacgccagggtttgaaacatgaatgattcagctcctcttcttgactttgaaaagcataccgggataacttgacaaagtcaagcggaaaaaagtaaacaatttatgtcgtagaatgcaaaaaggacacgctcaaagcgtgtcctttttgtggtgcggatgaagggacttgaacccccacgaagttgcccccactagcacctgaagctagcgcgtctgccgattccgccacatccgcatcttttgttgtcgttgttctctcgctgagaacagtgtttattataccagcgttctgggaaaagtcaataggttttttaaagttttttaaaaaaatctgaaaaaagatggaggagagaaaaactacaaaaaaagtatatttttttacataaaaatgattgacaaacgcaacatttaaaagtatactaaatgcgtaaacaaaagcggtggtgagaacatgaagatcacgagagaagccgattatgcggtgcgcgtggtatacaccatcatgcagcagggcggcaagatcagcgcccgggagatttcggagaactccggcgtcacccagcgctttgccctgaagattctgcataagctcacggccgccggcatcgtgcagtcctataaaggagtcaacggcggttttgctttgggcaaggtcccggaagacatttccatcggagagatcatcgagatcatcgacggcccctttgagatcgcgcaatgcctgtgtgaggactttgactgcacccggatccaggataaaagaatctgccaattccgtcagatcttcgatcgggtgagccggaatctgcatgatgagctccacgcgattaagatgagtcaatttcagtgagaatgagttgaaaattcaaaaggtacaggaggaaatggaaaaatgaaaaagtttgtttgctctgtttgcggttatgttcacgaaggggattccgcccctgatttttgcccccagtgcaaggctcccaaggagaagttcgtggagcagggcgctgagatgagctgggctgctgagcatgtggtaggcgtggcccagggcgctcctgaggacatcatggaggatctgcgcgccaacttcaccggcgagtgcaccgaggtcggtatgtatctggctatggcccgtgttgctcaccgcgaaggctatcctgagatcggcctgtactgggagaaggctgcttatgaagaggctgagcacgctgccaagttcgccgagctgctgggcgaagttgtgaccaactccaccaagaagaacctggagatgcgtgtggaggccgagaacggcgctaccgctggcaagaccgacctggccaagcgcgccaaggctctgaacctggatgctatccatgacaccgtgcacgagatggctcgcgacgaagcccggcatggcaaggctttcgctggcctgctgagccgctacttcggcaaataagaagcggattttaccgaatatctgaagagagaacagggagacctgttctctctttttttgctgggatgctgtggggaaggggcgcaaaaagaggacggcactgcttgtaccgtccttttttcttagtggttagcccattgcaaaagaatagtcctcgccattgatatgaaaagtaatcatggtattttggctatctgtttgcaactgatttggaacttcaatacagaatcgcacatagcgggttttatttgaacttagcggctcaaaagttgccgagcattcataatcccaatctcccgtttcgacattatcggttattccacagccggaatgatacccgtttccattgttccatgcatcaccctctgcaaaataaaacagataaccgtcatcataatcaacggtaaaatcatatttaaattcctcattctctttggaatcgcccacatagtttattgtgccagagaaatacatcatgaccttttcgtctgctgcaacataaggtgaatttccagagaattgcccatttggggtcatgtaatctttgtcgggccaattcgccaatttgtctgtaaaaccttcgaatacaggggtaaactcaaacattccatcgcttacgcttacggtatcaccaaaatgataaaccgttgtgttcgctgtgtcttcgccctctgtttcttcctgctctatattttgctctgaaccttgttcaactttcacatcagcatcattcttattcgattttgtctgcgtacaagccgcaagagatgtacataatatcatcatcgaaagtaacagcatccattttttcattttgttttactcctttctgccatctcatgttcctccgctgtttttgctgcactccgccgccttacggcagcagggcaacggggtccaggggatccggctcttcctcctcccgctgggcctccagctgagcaggggcatattgctttttgtaggtgcgggtgatggttttctcctggccctcctggttcaccgacacctctttgacgcagttgctgttttcatcataggaataggtggttttgctctccccttcgctgtcagcgtaggtcttttccagcatattccccttttcatcataggtgtattggctcaaagcggtgctgccatccgcccgggaggtctcctttttcacgcagttgccgttttcgtcgtaggtgtactgaatgagcagggcggcggtgtctgatttgtaggcgtcttcgtcataggcgtaggaggcttgggtgcaccggcctttttcgtcataggaataggagatggtcttttcccaggcccgctccttccagtcttcatccggatcttccagcagccagtccgagcggcggtactggctttcttccgccagaaggccgttgtcgccgtaacggtaaagggtcagagaagtgtccttgtccccatcatccagatcccgttccagcttccgttcttccaccagacggccttcttcgtcataggtgtaggtggtctcgtattcttcctccagatagtagacagtgcccgtttcccggatgcagcggcctgcactgtcgtattcccaggtgatgtgctggctgtctccctcatcgtccacctcggtttcctcgatctggttgcccactgcatcatagcggtagtcgatctgagtgaagctgctgccgaggcctttcatataggtgcgtgtccggtttccttctttgtcgtaagtaaaggtgtttttctggccgtcgccgaagtcgatctccgttgtccggccctctctatcataggagtaggagagggaagatttttccccttcgtagtccaccgtggtttcctgggtgagcacccaggcttctcccgcctttcgctgggccattttctggggcaggatcaccgccgcagccccggcacacaccagcacaagggcgcctagggcgatgagcccggcctttttccgctttttcgcttttttggcttctgcggcctgtttttcctctttctgctgagcttcctgagccaggcgtctgtcccggctggttttcagcgctccaaggtccagagagaaaagggcggccttttccttgccgcaaaggtggcaggtgttttccccctcttcattccaggctccgcagacgcagtgccacagggggccgtcctcacgggggaaaaaggcggcaccggggaagtgggagcggtattccttgcaaagctcggtgtcccccagggcctgctccaaagtctgctgttccggcaggctctcccagggctggccctctgcttcccagatgctgttgtccgaaaagatcacctgctgcacctgggcagaaaagccccgggtgttggcgtcggggaaggggatgggctctttctgcccgaactcgctgtcccggggagcgctgagatccaggtactggtgctccaccggctctcccagaggcaggccccgggtgtccagggcctggagggagaccgtcagggccttgatgggcttgatttgcaggttcttgtatttcacctgggccagaacctggccggtgacattgtctttcagaagggctcctgccatgatgagcaggggggcctttggggtatgcagattccccggcagggaaaacagccttatatagcgttcactcatggttcttcctcctttgtttccaaaaataccaaagcatgtcggcacacatcagggccgcaatcaggacaatggggacgatcagggggttggagccataggccccggcaaaatccccctgtaaaagccggtccaccgctccacgcaggccgcaggcgaaacagtgttctccggtgacgctgcaccggaagtccaggggcagcacccattgcaccagcacgccgttgagcaggaaagcggcatagagggcaaagcgaacctgacggaaaacgcttttattcacggatgttcgccgcctggagcagcttgcctccggcgatcagccccagaatggcagggacgaacagaatcagcccgatgccgcagaagagcagcacgatggcctgggggaagataacgcccagagccacagcggggagcagccacagggccataaagaggaagacaaggcccttcttgtttttcttggctccccgggcggcgaaaaagcccaccgccatggccgcaagggagatgccctgccacaggcccagggctttcagcaacgcttcgttgctttcccgccgctccgcttcctttgccgcccactccgccattttttcgtccggggtgacgatcttggcggtgtcatagcccaaaaattcccccagcaggtcgtgctcgatggtgtagctgccgtccgggggatcctctccgtgctggacgcctgtcagaaaaaggactgcgcaggccacaaggctgagaaggaaggccagcacattgagcaccatggccgaagtgatgcgggaatgctttttttcagccaggagccgggaagcggagtccccgggctggccggagacagaaccggccgaagcagccccggccggggcgccgcagttggggcagaaggcggcatggtcttccatctggccgccgcatttggaacagaatttcatagggtttggctcctttctctctcttgtaaaagaataaaaacagggaccccaggaaaaagggtggatttcctggggccggttttggggatgagttatttcttttcgtagcggacttccaggcccttgttggggtgatagctccagctgacccggtatttgccgttttcctccgactgcattcccatcagggcggtggtctccatcatctggtcatagaccgagctgctgaagcccagctcctcattggcgaactggatggccttcaccgtgtcgtcctgggtctgcttgaaaacggtgtattccgcttgggtcagatcgtccacatcctgatcccgggggttggtgtccagtttcaggtagctgccgtcggcggcccgggcgttgttggcgtaggggtatttgtccaggatgtcgctgaccagccggtcaaacaccgagccccggagaagcccgatggacaccacggcggctaccaccaccacagcagccacggcgccggtgatgatcttccgctttttgctccaggccttgatgctatccaggaaggacttcttcccggcggccgggacggcttctcccgtgggcatcacttcgctctcgccctccagagggggcagggattcggaggacagcagatcctcgggagggacatccagaggggccggggcagagaaagtgggctccggctgggccggggaagtggggcaaggggtgccgcatttggggcagaaagcggcgtcgtcagccagttgggctccgcatttggaacagaatttcatattgtttctcctctctttatccgcctgtggcggtaattgatctgtttttgtttttctctctgtttacttgatttcgcaggaaaccacatctccggtggagttgttgatcttgatggtataggtgcggaagggagtgccggaatcgtccacccagccagtggtcagcttgccgtatttgtcatacagggtgacgctgccatagacataggtgtaattcccctgtttttcctgtttgttgatatcatagcggcagctgcctgggtcagcggtgtcgtacttggagccgatttcctcccgcagcgcctgggtcacctgaagcttggtgatgtccacagagccgccagaggaagcagacccggaagaagctgccccagaggagggggaatagccggaggacgagggctggtaggaatcattggacccgcccagagcgatgaccagaaccaccgctgctgccactgtggcggcgataccacagaggaggcctttttgctttggcttcatctgtttccattttgccccaaagcctttgccgctctgggcagggccggttggggcagccgggatagaaggcatcggccggggagcgctggcctggggaacagagggctggttgggagcggaagcggcgccgcatttggcgcagtaaatatcgtcatccgccatgggcgagccgcatttggtacagtatttcatgggaaaaacctctctttccgtgggaaaacaggatgattattcttccaaccaaaggaagcccaggtccatcatttcattctgcagattcttcatctgccggtcgtcgtcgtagaggaaaagatggaaggaaatttcaaatccgctatctgccagaaaatcgctggcgccggtgccgtacagaatctcattggctaggctcaagatttcatcatcggtaaattggctttgatctgccagcagtcccagggtcacagtagagccttccagggagaatgccacggtggtgccgggagcatattctttcatttccagtgagaaatcatggagggcatcccggacaaagtcctcatcggatgcagcggcgctgccggaacttccggaagccgagccggaatcatcggaaggggcagaagtgccggagtcatcggcagcagccgagccggaatcatcagaaggagcagaagtgccggaatcatcagaagcggcagactgggtgccgccgccagagccggaagagccggaagaagcgggctttccccggttggcaaagaagacgccgacgcccaccagcaccaccagcagggcggcgatgccggggatgagccactggggccggttgcctttggaaggagcctgagaagcggcggcctgagaagcggcggcctgttgggcggccatggcctgctgctcccgggccagccgggcatcccggctggctttcagctgctccagatccagggctttcagctgatccagatttttgccgcaggcgtggcagttggcttcgctctccatgttccaggccccgcaggtgcaccgccacagccccttgtcctcctggggcatgatgcggcagttggcgccgtagaggatctggtattctttgcagagttccttatcccccagagctgtttccagggcctgaaggggaaccatgggactccactggctttgttcctggttccacagggtgccgtcggcaaaaaccacctggtatacctccacgcggaaggcacgggtgatggcattggggaaggccaccggttctttttgaccaaactccccgtcacgggcggcattcagatccaggtactggtgttccaggggctggtccaggtcgatgccggtgaggtcctgggggaaaaagcgcaccttcaggccccggatgggttttgttcccacattcttgaacttcatcagggccaggatgccgccggtctggttgtctttcagaagggcaccggccaggatcatcaccggcgagccgggctgatacaggttttccggcagggaaaacagtcgggcatagcgttcgctcatggaagatcactctcctttggaattggatgttttgaagatatggaatgtaaaataatagagcagaaagactgcgatcagaaatagcaaagtcattaccagcagaaggtccggagcgccggccctggctcccatgggaaaggccagcacatacaaaaggaaaagcccacagcagaaggacaaccctgcatcaagcctcatgagtttttgggagaagccgggcagagcaccgcagatcagccaaagaaccccggtgatcagggcaaacacaaggctgtaaaacagctgggtgtagcgctggctcatggaagatcactctcctttttggataaggttctcagtcgatgactggattttcgaagtttataaagcccagatcatccatggagatgcccacttcttcacacagttcactcaggcgcagaatggaaaaatgcatgagggaggtgcagcttttggtaaggggctggatgtattccggcgcttccgccccggtcttcgcttcctctacgctgctggggatcacatccatattggcgtggtagtcggctatgtccacgctgccccgcagggtataactggtcttggctccattgctggaggtgacctctacagtgggcatgaggctgacaaatccttcttcccaattatagaacagggtgacttccatattggaatcgtcgggccactgggcgtggaaccacagcagatcattatcctcttcatcagccaggaagaaatacttgaccccggagtccatggttttttcatagacgaagcaatcctcatagtagatggggaagacgggaaaatccacccggtcccggatctctccctcttcccggataaagtcaaagagagtgtccaccggactggccgccgtggctgtgcctccggaatcatcggaagtggccgattgggtgtcatcgccgccggcggccgagctggaatcgtcggaagcggcagactgggtgccgccgccggaggcagaagggccggaagaagcaggctttccccggttgacaaagaagacgccgcctcccaccagcaccaccagcagcgcggcaatgccggggatgagccactggggccggttgcctttggaaggcgcagccgaagaaacagcggattgctgccgcagcagggcagcctggcgttctttttccgcccgggcgtcccggctggccttgagctgctccagatcaaagcctttcagctgttccaggcttttgccacaggcatggcagttttcttctccctgccggttccaggccccgcaggcgcattgccacagtcccgcctcttcccggggaaacacctggcagttggcgccatactggatctggtattctttgcaaagctcctgatcccgcagcacgctttccagggtgcgggtgggggacaaaacctcccaggccccttccgccgggccccacaggctgccgtcggtaaacaccacctgggtgatggctccgtggaaagcccgggtggtgggatcgggaaaaggaatcggctccttttggccgaattccccatcccgggcggcgtgaagatccagatactgatgctccaccgactggccgttttccattccggcggcgtccaggggagtgacagagacctttacggccttgacggactttgtgcctacatttttcagtttcagctgtgccagcactcttcccgtctggttgtctttcagcaaagctccggccagaatgatcagcggggagtcttgggcatacagggaaccgggaagcgtaaacagccgggtatagcgttcactcatggtacatccctcctgatggcattacagttcgggcagttcgtcccggggagcggactggggatgggaggaagcggccagacggttgcggatctggtgcacatcttccaccagcttgccaaagcccatgatgggcagagcaaagagcagcgagctgagcacgccgcagatcagcatcacgatccccatcagagccagaccttcgatgacatagaaaaagaatgtcaggctgccgcagatgatgaacagccagaagagcacctggcccacttgaaacagcgttttccccacattttcgaacatagtgcatccacctttctttcttccccgtccaagggggttcctgttaatcgtactatatcaaagattccaaaatcaaataataagctggctgcatagtattttccagagaaaaacggccaaacccattggaaatcaaggggtttggcaaaaggggaagtatggtttttttctttcctggctcctggcggaaatgaaaggggaaaaataatttgagaaaaaataaaaccccatggcctcctttggaatcttacagggcggaaggggagaaaggacccctggttttcattgacaaatgctctgcccatagagtattctgaaagcaggaatatttctttctattgtgcagagggaaatggaggaagaaagatgaaaaaaaggcttgttaccattcttttgaccctggcactggcggtgctttccgccctgcccgccatggccgccgacaaatcgggaagctactattactacctctccatgaaagagggagagctctggtatcgccgggcgccctatatgcagaagttctgggatgaaggaaattttccctggggcgtcggtccgctgaacaacggcggcgtgctgtacggcatctcctatgaaagctgcaacctgccccaccagggcctggtgctggtggaacactacataaaggacagcaacggctcatccagatgggaatatgactatgtgacatatgaaaaccacaaagtgcccatttacggtatctatgaacacatcctcgcaaatctgaaccagggccgttttgaggagatgttcgatttctccgacgatgcctatggcctggccgccgcagtcaacgactactggcagaacggagaatttcacaagcagcagtattatgtggacaccgcaggggtggtggccatcaccctgcctttggaggtcagccccatccgctatgatagccagtattacaccggccgttttgtggatggcaaggccatcgtcttcaaagacagccccgccaccgacagcctgttggagaagtataccggcaacgatctggacacccgcacccttacctatgcttatatcaaccaaaggggcgagatgatcaccgactggcaaaccgcctccaccgatgcccagtacaaggagattttcacttcggtgtataactcccatggtatccgtctggtggatgtgctctattccgacggctaccaggccccggaggagcccaccggcccggtggagccgggaggggagaccgccgagcccgaagaaaaaccggaagagaagccggaagtggagaccacctatggtcagtcccaggtgaagatcaagggctataccattgaaaacggcgacggctttttgctggtggatgtggtaaacaacaccaaaaatccggacgaaggggattgcttctatctccggtacgacaaatacaaggaaatgggcggccttgtggattccaatacggaatttctccccggcaacgactggatcatgagtatccactattccgcccaggccggagagcagaagaccctgcgcatcccggtgggcatcatccccggcggctggggcgtggatgtgaccgacgaggacagggaagcaggctggacagagctggattacatcgccgacagccgggtgatcctggcccaggccgaaaccaaagaggaatttgaagagctgaccgagtttttcaaagggatgcactattacaatgaagtgcagcgggatttccagatggacgaaaacggcgtcacctatctggccgttccggcttccaccctggattaccggcacaagctggatgaaaagctgttttacttcaccaatcagttttaaaagaataaaataatacaataaggagaaaatgctatgaaaaagctcattgccctgtgcctgtgccttgtgctcagcatcctgcctgctttcgccctgaagggggaagtggtggacccggatgacctgccctatatccccacggaacaaagccccagcgactgggctgtggaagagatcaaagaagccaccggcgccggactggtgcccgccctgccgggagatccctcctatcaggcggcggccacccgggagcagtttgccgccctggcggtgacgctggcagaaaaggccaccggcaagaccctgccggccgccccggcggacaccttcaccgacacccagagcgaagtggtgcgcaaagcctaccaggcgggcatcgtcaacggcatgggggacggcacctttgctccccagcagaccaccaaccgggagcagatcgccaccatgctcctgcgggccatcctctatatccaggaccagaacaaaaccgattacatcgagcagtttgaagacctgagcctgtaccaggatgccggtcaggtttcctcctgggccacccaggccatgggcatcctggcccacaacggcatcttcaaaggggtgggcggcaacaacatcgcccccaagcagagctgcaccgtggagcagagcatcctgctgtgctaccgtctgtatcaaaagacccaggcctagggcccgggctttgatgataaaagaaaacagaaaaggagaaagtatctatgatgaagtttgaaaaaggaaccctgaaaggctttgccgcaggcacactggtcaccgttctgaccctgggcaccattctgccctcttccgccgccaccatgaaggagatcaaggtggccatgggcggcatcaagatctatgtggacggcaatctgaaaaagcccaccgatgtaaatggcaatgtggtggagcccatgatctatgacggcaccacctatctgccggtgcgtgccctcaccggtatgctcaccgacaaagaagtggcctgggatcaggagagccagacggtgtatatcggccagcgtcccgatgttggcgtcaagagcgtgcccatcgatgagctggaggcctatgatacctatagtaacggcgctgttggtgccatttcgtctttgtacactggaaaagacgcccagttcaccgtgctgggggatacttattctccctttaatcggatgagtttgagagggggcggttatcgggtctacaagctggattcaaattatgacagcatccacggtaaattcatcattccttttgatagattgggaacttatgcggagtccacccttcagttttacaatgtggaccaatacggggaagagaccctcatcaaggaatattccgccaaagcaggagatccggttatcgatgtggatgtgaatctccagggctgcaatttcctcaagatcaaaggatatacagacaacggcgcatttgccttctatgatgtgactctgaccactgcgaaataaaaacaccccaaagcagcaaacgccccgccgagttgaaaccggcggggcgttttttctgttctattctgttatatggtgttagcgccgtcacgccgctgccaacggtgcagcagcacggccatctgggcccgagtggcgctgcgtcgggggaaaagacggcggcgccgggtcccctggatcagtttttgctccaaggcccactgaaaggcaggctgggcataccggctgatgagacgggcatcggcaaaggttgcaaattccatcggcgttgtttccgcctgcacccccggggaaacctgggccagacggtaaaacaaagccaccagctgctcccgggtgatgggttcctccggccggaacttgccccggccgcatcccagcacaatgcctttttccccggcccacagcacggcttcgctccagtaataccctggcttcacatcggaaaaccggctttcccctttgggggcggggcaggattccaggcggtggagaatggtcaccgccatcccccggctcaggggcaggcggggggaaaacaaagtggggctggtgccggccatcagaccgtggcgccaagcatagcgcaccccctcttcgtaccagaccccggcggaaatgtcggtgaaaggaagggctgtgcgcttctcctcggaacaaatgtccatggggaagacaaaggagctggaaggactgctggggatgattttgcggatgttttcagtcattgggaaggggcctccttttcgccagggacagtgctctgtttttaatgtatcacaaagaaggcggtttgaaatcatcccttttgcagaaaaaaaggactatatccaagagttttttggcatagtcctttggaaattgcgttttgcggcttaccgcagcatatattgcttcaggtcttttcgctgtttgatgttcagcttctgcaatgcggtggagatgtattgcttcaccgtgttgggagagatgcccagatggcctgcaatctcctgattggtccagccacgggcggccagcatggcggcggcaaactcggtggtggtcaggttgtcggccaccgggtggccggtttccgggttgtggaccttgcgccagcctgcggaaaaccggtaggtgatggcaatgatctgccggaagtcctccggccagtcctttttcagaacggcttccagcatcccgcccagcaagccgtggtgctctccgaacccttcgatcagatcgtcaggctgagccagtttccaggccgccagcaagtgggcctgggcatgttccggctgcttcaggctcatataatccatcaccgccaccagatggaggtaaatggaagggatgggatattgctgtccctccagggcaaaggcggtttccacaatgccgatgctttttccatattccccctccagataggtctggtgggcctggacatatagagcaaacatccgcagaccgggaggaagcaagcgcaggtgttctttcagggagatcagcccggaggggagaggaaggtggagcagcaccgaggccgtggtgatggcaaataccgccgttgcctgcagctgaggggaaagctgctcctgggaggtcagggtgttctggatctgggccagggtatgcttggccctctggatctgcccgatggacagattggcataggtgtagatcaggcaggcagaaagacgcagggacagttcctcatacgaaagatacagttcggcgattttggcagcttcttccggctgaccgctgaaataatagtattcggcccaggcgatgttccgcaaatgtgcatcctggatgcgttccacatattccttgcaatgcccggggacaaagggactgctcaaaaggggcatggggatcgggtgagagggcggaacttcttcctgtggatttgtgatgggaatagggcttttttcttttggaacatcggcggggtttggggcagaggcgggaatggcccagtctgtgccgattttctgtgccccgggaatgcggccttcggcgcagtattgcagggccagggggagagaaatgttccatttttcggcagcttgctgtatggtgatgtaatccatcccgtgtcactccttctctgctgggaaaacgcttacttatttattttattatatgcgtctgcctggacagttgcaagaaaaagccgcctggaaaggcggcttttgcgtgtcaaaaaagtggcagaagccacttttttaagtttttgcaagggcctgcgtgcacaccttcggcgcacacttgtcccttgagaagtgcaaaaaccgacgcaccggtcgccggtttttgcagattgataagagaaagggcaaacagtttctttgcgctgtgtaggtttttcgacagtctgaaagccgcctggaaaggcggcttttggcttggtttattcttcctgatccattaaaccgtggaaaatttcatccatcagcggattggtgtaggtatccataaatgccccggtgtccagttgcggaacggaaggcgggttttgacccatggaagaggaataggcctccagctgggggcaattctgaaggggagtcagatcacagggacctccatcaatcgctgcggcccgcagagcgggaagaccgctgagaggggacaggtcgacagccgttccgaaagagaacagttccagcacttccagagaagaagcaccccggagaaattccaggttatccggctggccggaataaagctgcaaaaggcgcagtttggtgagaggctggctgctttccaggtagaaagtgccgccccgggtgccattgcccatgggcatcaggcccaggtaggtgagattctccagccgggacagatccagggaaacactgccgcatcccagctgcaaggcacgcagcgcagtggcagattccaagggagtcagatccacattgtccccaatggtgcagttcaggctgcggagattgggaagaccctgcacaaaggagaggtcagtaaggtcctgggtgtcccgccaggtggcgtccacttccagcagatgggggttttctcccagggtgttcagcaggggttgggcatccccctggataaactgaagagaagtcacctggggcaatttttgcagatcggccaggctttctaccggcacggtgccctcttccgggtggggatcgttgtaaaatgcgttgtctgtgtgtgcaataaagccgtcgggcagaatggtgaggtgggaaagatcctggcaatccttgggatagatttttccttccggcttgtggatgagcacccggatattctgctccatggctggatcggaaaagacgatggggtcgggcagattggaaatgaccaccacagcgccgccggtgaccacggcggccgctgtcacactggcaatgattttggccttgatggtggcaaacagcccggttttggcggcttctcctgcaccggtgcccaaagcaccggccgcagcggttcctgctccggccgccgcccccagaactttctccaacccttgccagatctgttcctgctgctgcggagcggaaacattctccagcagccgggaaaacagcagagagaagggaatggcgccatggtagcggaccccgtcacgatcttccatggccagcacttgctgacgaagtttttgccgggcatagttgagacggctttttaccgtgccggtggagcactgctgcacctgggcgatctcctccaccgacaagctggcataatagtaaaggagcacacattcccgctgtacatcgggaagctgctgcaccgtctcttccatcagacggcgggtctcttccttgtccagcacttgctcgggcaaggtttccgggtcgtcatcgggcagggaagaaaagaaatccagctcgtcttccttttgttcgggagaaaggaagcggcctttgtttttcaccagacggcggcattgatttgcggcaatctggcatagccagtgggggaaggctgcactttcccgcagggaggacaaatgctgaaaggcagataaaaaggtttcctggcagatgtccatggcgtcttccgggtttttggtgatgcccagggccagggaatagatcttttgaaagtattgctgatagagagtgctttgcgcctcacgctctcccgctttggcctgggccactatcttttccagatccatatggttcctccattttgttatttttgtcaaaagaagccttgttttattgtacagaaggaacacttcggggtcaacagtaaggaagaaattatactactattggctgtcggaaagggaaaaatattttatgatagggtcgaggtgatgtcccatgactttcgcagaaagactgcgcgaattgcgggaagagcggaacatcacccaaaaggaactcggtgcccatttggggatttctccccgcatggtcagcttttatgagtcaggggcccacttcccccgggacgccaagatgctcatcgacatcgccgcttttttcggcgtgacggtggactatctgttgggctgttcccagctgcgggaagagggaacgctgaaaaagctgtgtgccgaatttagtgtcctgcccccggcggagcgcaaaagcctgttggattttttggagtttctgcgctcccagcagaaaaactcccggtgaaaaaaagcgctcgccgccccgccggggcaaaaccgtgagtgttccgctcacacacataagacccgccgtcaccccggcgggttttatgtttttgggaaaaatttttagagaaaaaagaaaagcgccctttgggcgcttttgcaatagaacgagaaatggttttgcagagcgattatcgcagatagccctggagaaagaccaggtgaaacagccatgcgccggtcaccagcaaacaggcacgcagcatgagcagcttcaactggcggctggccgcctgcacgggcagaggcacggccagaagcagctcctgggcagtttcctccggcaaacggaagcaggcagacagttcttccagagagatggtgggatggagagcggcgtattcctccagttcctgggataagccggacagaagctgccggcgggtctttaaggggcagtcggccagatagggtttgacctgtttgaggtaactctggatggaatgggcggctttggttttcatgtggatttctccccttccataatttgctgcactgcaagctggagttcctgatattctccgcggagagcagccagataatctgtcccggtgggggtgatggcataatattgccgcacccggttgtccggggagatctgctttccgctttctttcacataacccagcttgaccagccggtagagcaccggataaagaagggaaagagtataccggccctggctgcggcgggaaagttcctgctgcatctggtagacatacatgggctgctgggaaagaagatggagcaccagcatgggactgatggctcgtttgaaatagtcctcgaaggaatgcccggaatccgggctgtgttcttttttcatggagttcacctgctgtaaggttactttcagtatatcggaattttggcaaaaagcaacgacaaaaagggaatatgtcacaaaagtgccagaagcacccttgacagagcatggaaaagagaatatgctgtccgtataataaacaatgctaaatatataaaaaagagagggaaggacaatgaaaaagaagctgatatgcattctgggattgctgttccttttggtttatgccggtctggccgggaccggggccaagctgcagctggatgcagcacaggagttccgacagatgaaagcggcgctggaacggggagaagagattgaccagacccactacacagccacggcccagcggtcggaggagctgaaaagcctcggccggaaagtgggccgggtagcctatctggctgccttggcgctcaccgcagtaggcttgatcaactggaaggaatatattttggtggtgggcattcccatgctggccggaggtcttgccattttgcccttctggctgcaaagcgatgtaggagccgtcaactattacatcgagcagtttgtggaattttacagcgctgccgtctgcggcgtgggagccgcgcttttcaccatgctgcatcaggggatcaaagcgtggaaaacagcgcacaagggataaaaaactggtcttagcgaaagaacacaaaaaagcccggcagcatagctgccgggccatgtttttgtttgctgtggattctgacatcaggctgttttttctttccttcgcaggtagagcaggcggaaggcccacaccacaatgccgatgcccagaaacagagcggaagtataaaaagaaaggtacaattccaaggtatagttggaaagaccggcaccaccccaggcggggccgatgtaggaaagaagccaggcgcccaggtaactggcggcaaaggtgcccagcacctgccgcagacgaagatggcccaagaccaaaagaacggccagaatcacaaaaatcacatgaacggtgcagacaatctggcccatccggttatccagattcataaacagctggtatcgttcccactgagggccgctttggctgctcacttcctggaagctctgggtgcgcatcacccggaagcagatcagcatcagctgaagcccccagaagcatcccacaagaatcataagccccatgtttttacggaaaaaacgcttcatacaatgcacactcctttcccggaaagcaacatagcccgcaacggtcaagaaagtgatggtttggatcgtcggccgccagcggacttccaacatcggatgaaagaaaaatatggaatatgataatataaaaattatatcaggaagaaaaataaaaagcaagaaaaaataaaatggtttccatttttagtctattgacagaacggtttacacaatgtaaaataaaaacagaagattttgggaggagggattg

SEQ ID NO: 55 - DNA, 3083 bp, Unknown
  16S sequences of unknown bacteria
aagacacggccctttcacggctgtaacatgggttcgaatcccgtacgggtcaccaaatagggctgcgttggataatgcagcctctgtttatttaaaatttaatatggcccattggtcaagcggttaagacatcgccctctcacggcgaaaacagcggttcgattccgctatgggtcaccatcaccgacgcaaatattgcgtcggtttttttgtgcataaaaaccacttgtatgtcagtcaaaacactgtcaagtgagcagcaaaccctacgcatgtgtcggcttctaccggcgcggtgtgatgtgtggcttgtggcaaaagattaaacctatctgtgaaaaatgccttcaccggaaggatagctgtttgcacctcacaaaaaatatgaatatgcaaaaattgtttaattttattctctttgttttgtcggttttattgattaaaataacataagattaaatttatgctttgttaataaagtgataaattgtgcaatcttaaccaaaaatttgcaatttatcctttttttattaacaaattttaaatattagcttgcaaaatgtgtaaaatttgttataataaatattactttgtcagccgcatagcggcgcaaaaccgcataaaggtattaaatctgctgcggtttacagtatatttaaaaggagaataaaaatgcaaacttatgtggatctttccggcagcggattgctttatgctttggttattgccggcctcgtatttgttgccgttttgtgcgttattttttaccgcaaaacttacaaaagagctcttgaattgggtatcacaaaggacacactttcaagaattaacaaaaacacaatatcccttacgatagttccttcaatttctatcgtaatcggtcttttcacactttctacggttatcggtattccctggtcttggttccgtctttcggttgtaggttccgttacttacgaacttatggctgcacagatggccacagcctctttgggatttgaacagatgacagacgccatggcttccgacgcttctacattcggtgccgttatgcttgttatgagcgtcggtatcatcgcaggtatcgttactaataccattatcggcaaaactctcaccacaaaaatgggtgaggccggccaaaaagaaggcggtttcggcccgattatgaacggctgtttcatgcttgctcttatgggcgttatgcttcctttccaggcggttaaaggcggtacaaccgttgcggttatggcaacaagcgttgttatttcacttctcataagccttattgttaaaaagacaggtgcaacatggcttgcaaactttacaatggctttcacacttattctgggcatggcttccgccttgttctggacaggaattttaggttaagggggtaacttataatgcaggacgaaaagaaatataatgacagtattcactttataggtcgtgtgggcagtattatagctgttgcctttatggttggtattccggttgttgtttgtgcggtttacaaatgtttcccggatatgaaaacggttgcaggcgctgcaggtactcttttggcaatatttgttccgacagctatttcggaagttatttcctacgcaccgatcttgggctccgcttcatacataacatttatcacaggtaatgttctcaaccttaaattgcctgttgcgatttccgcacagcaaattgccggtgttgagtccaacacacctgaatccgacgctatcacaacaatgtctatcgctctttcatcacttgaaactattataattattgctttgggtgttgttttgcttaaacctttgcagcctgttcttacattgccggctattaaaacagccacagcatacatggttccggctttgttcggcggcttgttgctgggcgtttacacacagacaggcaagacatatataaagaacaaaaaccttattgcgcttttgcctttggttcttgtaagtatcggtcttgttgtttggcctaaacttgcaggctaccagggttatgcaattttggtaatgattgttgtaactgttgcttgggcataccttttgttcaaaaaaggcgttgttaaagtggttacaagaggccaagaaaataaagaagaaaagtaataaaaactttttgaataacgaaacgcagggcaaaaaccctgcgttttatttttattctatatttttaacaagaagagatgcggcaaactgtaaaagggtcttattatcgtcggttaacgtctccctttcgccgcccaaaagcataagtgccccggggcagtcgccgtttgcgcttacaagaggcattatgcccagacaaataaaaggggagttttcacatgggtgtatcggattatcttcctgcccggttctgtaatatggcgttcttttctgtataaaaaaggatatttccggggaaatgagcgaattttcacaatcgtatttcttttcgccgccaaaggccgttattttttcgccgtcgcacacggcgcatctgacccctgcacttttgtaaacaccggtggcgcagtccttggcaagagatgttagccctgccataatagaatactttttcaatattacttcgccgccccgatcggtaaaaatttccaacgggtccccctcgcgcattctcaggttgcgccttatttcttttggaattactattctgcccaaatcatctattcttcttattacgccggtcgctcgcatacacattgcccccaaagtcatttgatattagtatggcctgcaaaagcaagtttaatcaatatggcaaatgtgatatttcaataaataaatttgtaactttcaatgacaatatgctataatcaaaatatatgaccgattttaaggagaggcgcaaaatgttgagattggtaatcggcactgccggcaccggcaaaagcacatacattaacgaaaaaataatagaaaccgccaaaaacgggcaaaaatgcctgttgcttgtgccggaacagttttcaaaaacaggggaaagtttgctgttttcacggcttgatgacacccgggcaaatcttgttcagctttttacctttacatctcttttaaacg

SEQ ID NO: 56 - DNA, 22925 bp, Unknown
  16S sequences of unknown bacteria
caattcctttgagtttcaaccttgcggccgtactccccaggtggaatacttattgcgttaactgcggcacggaaatcctacgatccccacacctagtattcatcgtttacagcgtggactaccagggtatctaatcctgtttgctccccacgctttcgtgtctcagcgtcagttgtggtccagtaaaccgccttcgccaccggtgttcctcctgatatctacgcatttcactactacaccaggaattccgtttacctctcccactctcaagagtatcagtttcaaatgcagtttgtgggttgagcccacagttttcacatctgacttgacaccccgcctacacaccctttacacccagtaattccggataacgctcgccacctacgtattaccgcggctgctggcacgtagttagccgtggcttcctccacaggtaccgtcattgttttcgtccctgttgacaaaggtttacaatccgaagaccttcttccctcacgcggcgtcgctgggtcaggctttcgcccattgcccaatattccccactgctgcctcccgtaggagtctggaccgtttctcagttccaatgtggccgttcaacctctcagttcggctatggatcgcagacttggtaggccgttaccctgccaactatctaatccaacgcgagcccatctgctatcggtttccctttggtatacagaacatgcgatccgtatacatcatgcggtattagcacaagtttccctgtgttatccctccttagcaggtaggttgctcacgcgttactcacccgtccgccactatgaaattgtctccactatatagatcaacttcgtttcttacctacatcatatagcctttactatattttgtaggtgaggatgttcctcagaacatactcacgaagttgcttccacatagtggaaacaacttcaccgttcgacttgaatgtgttatgcacgccgccagcgttcatcctgagccaggatcaaactctctaaaaaattgtatatctaaatcaaggtctccctcgacttaatatcgttttctagagcttttgctcttgctctctattacttgttagagcttcttttaaattcaaaagaattttcggagtctacatctctactcgcgtttccgctttcgagaacttagtacatcttattgttgttcaattttcaatgagcgattcgctgtaacctttcggtcgacagcttgtttattatatcactttgttgtcggtttgtcaaggggtttttcaaacttttttgagttttttcaaccttgacttgagctttgcttttgctttacgctctcgccgacagctttgttagtataccatattcttcatcatttgtcaacccctttctttgattttttattgttttcctcatattttttattacatcgggtaaaatagcgatatgctaacattatttatacgaaccatcatcatttatttcgcgcttcttctcgcactgcgccttatgggaaagcggcagatcggggagcttcgcgtatcggagcttattatcacgctcatcctgtccgaaatagcggtacagccaatcaccgaccgcaacaagcctctcctttacgcaattgtcccgatactcctgcttctctccgtcgaggtcatcgtctcgtatttgctgctcaagtcggattttatcaaaaagctgttctatggctcgcccacaatactgattcggcgcggaaggctgcttgaggaggagctgaaaaagaaccgtattgaggcggacgagcttgcttccgagctgcggcagaagggattttcaaagctcgacgagatttactacgccgtgctcgaggaaaacggaaagctctcggtattcccccgtgccgccgacgctccgctgaagcctaaggatatgtccctcgcaacggatgaatgcggcatcgaccacctgcttgtgattgacggaaaaatactaccctctcggctaagtgagcttggatgggacgaggagcggcttgactacgagattaagcgaacgaagataccgctcgacgagatattcatcatggcggctgacgacagcggaaaaatcacctgcatacgaaaggagaagaaaaaatgaagtcactcgtctgcgccctctccgtccttgccgtcatcacgggatttgtcgtgttctcatccgtttacatcacgcgttcatgtgacgagcttgaaaagctggcttacgcactgccgagtattacaaaaggagaggaagctctcgagtgtttttcgagatactaccctctccttgatgaagaatggcaaaagaggaacggatatatccgcgcaaccgtcgggcattctgacgccgaggatatcggaagcacgcttgaagaagtaatgcttcggttcaaatccgacgacctctccggctacaagactgcccgcgcaaagctcatttcgcttatcggtgagatacgccgtgcggaggagttgtcgtggtacgcgattgaatagccgaataaacaatcaaatatagtccgatatatacggctcttcgtggagaagcacgtcgtcaagaatgcgcactgtctcctcgtccgcgtctatcctgccgagcctgtacagcttcgcggcggtcttatacccgaacagcatcgttgtaagcgttgctacggtcatttttgcgcggtgcgcggcttctccgggtatgatactgcactcgccgcccgagaagcgcaggttaaagattttgtcgttccacggaaggaactcgtcctctatctcaaaggatatctcagccgtctccgcgcttgagtcacagcggtatttcgagaagaactgctcaacgtcgactattcttcccataatgtacgggcgtatcgtctcgcggatgtcgccgtcgtcaagctcgaacgctataggctcgccgaagtatgagttgccgtgaacctcgtctatcatggagtcgtgcgcacggatgtagccccacaagccctcctgcgcctcgcgattcaggtatatcatctccttgatgtgcatgatgtcgtccttgatgaggtacaccatatatccggcaggcttttctgcggcgtcgtagtatatcgcaaccatcgtgtcgtcctcgtcccatcgccaatactcttcccacgcgaggttattgcggaagagacagccgtgtgtagccgccgcgaactgtgcgtggagattgcggaagtcctcgttttcccagttcactctgtgtacgcttccgggaacgcgcggagttgtgggtatctgtctgtcctttaccgtgtaggatatcttattcgagacgatttcccatcccattttgcggtacagcggtatggagtaggggaacaacagcgcgaccgactgccctctctgacgcatatgctcgaggcttttgtgcattatccgcttcattatgccgcgtccggagtattcgggataggtgcagacgctcgtgacaaagccgacgggatagactgcgccgtagatgttcattttcagcgggtacactgctatctgcgacacaagctcgtccccgtcaaagcagcccagcacgtccgctctctcgattaccgggaatttcgactgctttatctcgtcatcctgccagccgcactcggtaagctccttttcggttatctgaaaggcgtagcggaggagggcgttgtactgctcaaggtcgtccgctttaagatttcgtatatcgtattctttcataatcaaataaattcgctcccaccgtcggacagaagcagcttctttctggttatgacgtgccagccgttctctccgccgaggttgtatttttcttccactgctttagcgacgtattcgggattgaggtagttctccgcgtcggctgatgttatcacattcactgtaagctcaccgcccctgcacactgccgagatttttttcacaaggggggatatgtcacattcacgctcgccgctcttgcttctcttcataatagtgtacggcgtgtcgaacattttcgtaatttcgctaagtgcattttcggtggtctctatcctgccgccgactttgccgaactttatctcgcattccgcccattttatgtcgttcagcttgcccttctgctcgtacacgcgcgtgatttcgataccgttcggcatgacggcgcgcagcttttccgttatctcttcgtttccgacgggattcatgagcctgatgtcaagcacttcctcttctccgccgcagcctaccgaaagaggcgttgcaaaaacgagcttcggcttcgggttgtagccctcggtatagtaaaccggcagaccggagcgcactaccgacttcatgagagttttcgcgaggtcgaggtgcgagatatacagcattgcgccgaacttgcggaaacgtattctgataaggcgcgcgggctttacggtgttcttcatcgtctcctcacgagtggggaacaccttgtccgatgtgattctgcctgcgctgtcggagctttcgggatgtccgggacaccagcggcagtattttttgtcgacgagcttgttcacgccgcaaccggagcatttttccttgcatgacggagttgctaccgctttctgcgccttgtgtctctcggagagcagaaattcctttgaaactccgcacgagagcatatcccacgggagaatttcgtcgtcggggatgcttctgtttgcgtagaacgacgggtcgattcctacagtcgcaaagatatccatccagttgtcgtagtcgaactgttcttcccatgagtcaaagcggacgtgtcgtcttatcgcttcttcgagagccttcgagagtcttctgtctccgcgggcgaatattgcttcaaggcgggaaacctttgcgtcgtggtagttatagcgcacctttctgtcctttatctttgacgagaggaagtcctgcttgtctctcagctcttcaagcgtgttctgaccctcccactggaaaggcgtgaacggcttcgggataaagcacgcgacggaaagagtaacctgcggctgtctgcccttatgtctgtcgggtgtgcggtagtattcgtccacaacatggctggcgagggtggaaattccttcgatgtcctcatatgtctcatacggcagaccgtccatgaagtacagctttatctgattctttcccgcggaatacgcaacggagcaggcacggagaatttcttcctcggtgatgtttttgtttattacgtcgcggagtctcggtgagccggcttcgggggcaaaggtgagcgttgtctggcggacggtggctattttgtccataagctcctttgtaaagctgtcggcgcgcatggatggcagggagaggtttatcatcttctcgttcgtccagccgagcagcttgtcggtaagctcgcttatctttgagtagtcggagatggacagcgacgagagagagatttcgtcgtaaccgctgttctgcaccatggttctcgcaatgcagtcgagcgtctcggggcttctttctcttaccggacggcagaccatacccgcctgacagaacctgcatcctctgatacatccgcggaaaacctccatggtaactctgtcgtgtacagtctcgatattcgggagcacgggattgagcgggggtatgcacttgtcaaaattctctacaactctttttgtcacgactgcgggaactttatcgtcagccggaattatagccgcaatagttccgtcttcgtggtattttatgtcgtaaagcgagggtacgtagaagccttttaattcggttgcacatctgtaaaggaagtctttcttattgtatgtgccgtttttcttcatctcgaggtagaggttggcgaactccggcagtgcttcctcgccttctcctatggagaaaatgtcgataaagtccgcgacaggctcgggattgtatgagcagggtccgccggctatgactatcgggctgtcctctcctctgtcctcacgtctgagcggtactctgccgaggtcaagcatatttaaaatatttgtgtagcacagctcgtactgcatagtgaacgcgacaacgtcaaaatcgcacagtggatctccgctttcgtgagtgaacagcggaatgtttctcttgcgcatttcgtcttccatatcgacccacggagcgtaaactctctcgcaccacacgtcgtcgattttattgaagcactcgcagagaattctcatgccgaggtttgacattccaatctcgtaggtatcggggaagcagaacgccacgcgcatattgaccttatcgaggtctttatagacgctgttcgtctcgccgcccgtgtatctgcccggcttctgcacgtcgagcaaaaagctgcgtatatcttctctcatgttgttttttttactcctgttatatttttcatacaatttattacttgcttattctaagagacttcgctatctgtaagtctcactttggctcaagtgagggagatagaagaaaagactccgtcttttcgatttaattgttccactccgcgtggggcgcccttttcagggggaacgcagagaggttcagacgccacccctctgtgcgccctccgcgtaggagcgtcccctcaccgcagtgagatataaattaaattggaaagggcgaagctctttctaccattttacatatcaaaaagagtgaaaagcgttatttcctttcactcttttgttttttatctgatgaacaccttcgacgctatcgttatcgggatgagccatacaagctggtacagcacgatgagcagggacgagagtacgctgagcgaatccgcaagaaggagcaggacgagtatcgcagcgcctatcataacggacagaactccgagcgcgatgtctgtcttcttcgtgtggagcaccttgccgcagtatgtgatgacctgaagcagtgatttcggcgagccgcaggtgacaagtccgctgtctaccttttcctcgtacctgccgacttcatccgcacttgaataacgcactatcttgagcggcattttcttcattccggctttcttcgctatcatagcctcgtcaatgttcgggtcgaatgtacgaacgcaaacgtaaagtccgcttcccgagaactgctttaggatgaggtcgatatcggaatccatgacgtattttatgtacatcttcgcgacgagcttgttctctcggaacatatacattatcgaaagctcatctgagaggtcaacgtcgtctcgcagcgcaccctcgggtatttcaagaccgcggctctggagattccggctgctgccgaagattatgtttacgccgtcaacctgtgttgcaaggaatccggcttcggtatcgaaaatcttgacgttctgggacacgcccatgtcctttgtagcgacttcaaacacgtcctgtaaaggtccgccggcatatgcgaacacggaagcggcgtagtaaagcactctgtcgattctcgcgttgttgtagattcgcatgttctgcaccttgacggagtatgacgggaacacgttcttgtcgtcaaacgagatgatggaggcgttggagtattcctcaagggaagcgtcgcctattattgcactgtcgtattccttagccgcgatgttcgccctgtacatggggtaggagaacgtaacgtaagcggacaggggagcaagcatgagcatagcggaataaactactctgcaaacggacgtattgtctccgccgcgcaggtttacgaaaataccgaacaacactgctatagcaacggacgcgctcatagcgaaggtcataaacacgccggttgaggggtcggggcgcgacagtctggcgaagaagccgtcgatgaagtcggttttctctatcttcataacgtcgcacgcgtcctcgctttcggcaaaggctctcgcttctccctcggattcttcatcgtgaaggcggcggacgatatgcttaggcttgcggtttgctatcacggcgaagttcatgctctcgcgcttgttgttgtacattgcgcagataagggtcagcatagcggaaactgccgtaacgaagttgaacattaccggctcgttcgggctgactacggtgactgcaagcacagcggagtaaacgataccgccgagggtgagcagtgctgtcatgctggacggggtaggagtaccgcggaagatattcttcactcccgctgttatctcgtcaaccgcacagaagcaggcaaggagcatgagctgcaaacttaccatgatgtaaaccacgggataaaccgcagggtcgaacactccggcgaactgctgctccgttcctgtgaacagctttgtgatgagcggaatattttcaaatatcatgagaagcaccgtgaggactgtgcatacggtgaatctcacccaaagggatatctttttgtcgcggaattccttgcgaatcttcggaatctgcgttttgtcgacgaattcgggatggtcgagctttaccttatggctttcacggctgtgctgtttagcttcgagacggtcgccgaactccttcgcctttttgttgtccttattgtcaagcccgaacgccaccatgaggtttatgtcggtcgggtcaaattcgtcgttctcgtcctctttttccgcgtcggaggaaacttcttcgatttcccggttcagctcatcgggattttcggacggttcttcgactttagcaggttcttcggtttcttccgcagttttttcgacttcttctgtaacttcggcagatgtatctgcggcgttttcagcgggattttcttccgtgatttcggcagttgtatcgtcagccttatccgtcaccatgtcgtcatcgaggtctgccaaaaggtctgcgtcgtctgtaaccgtcatttcgggagctggcttttccttatttttacgtcttccgaagaacgagaacaccgactttttctccatgaccggttcttctgtttcttcgccgatattgtcgccgatactatcggacgagtctttttctgtttcttccggctcggcgaggaattcttcgtcaaacacgggctcgaccgctgctttctcggaagcttcttcttcgaaagctgctttctcggaagctgttttctcggaaaccggctcttcctcgggtatgtccacggtcaagtcgggttcgtcggagatttcgtcatcgttcagctcatattcgtcaatgaagctgtccttatccgtctttttcgcgggaattccaaaagcgttgtcaagtgaggagataagctgctcgtcctcgctcggtttgtcagcagtgtcggttgcaggcttctccgccgcagtgtttttcaggcgcgagagaataccgccctgacgcgcaagtgattcttcctctgcgggagtgtcgctgttttcgtcagagtcgtagtcgggcatatatttgcgcagaagctcgtttatgtcgaggtcgctgtcgctgttgttttgcgcgccgcttacgtcaatggagttgtccgcgccttcgtcaatgaaggatatctcgtccttcagctcatccgcgctctcggatttatcccgtccgcgcttgccgagcttaccgaagaggtctcccgccgtgacttttttatttttctttttatctttagccataacaagtacattgaccgaaaccttatccgtccggtcacaccttccgttagctttatttttgccgatatcatcctctgtgagatgcaccgggtacctgaacttgaagcctatgtgctgttttatcttatatttcacttcattatgcgctgcattctcgcggcatgacagagaagcacagacgccgcggttgaaacgttgagcgaattgagcttaccgtacatcggaatggaaactgtgtagtcgcatctttcgcggacaagtcttgaaactccgctgtcctcaccgccgagaactatagcgcatccgccggagaagtcggtatcgtaaaaatcctgaccgtcagcctctgcggcgtatgtccagactccgttttccttgagcttttctatagtctgggcaatatttgcgacctttgctacagccatatgcataatcgctcccgcggaagcctttgacacagccggagtaagaccgcacgcacgtctttcggggattatgattccgtgtgcgccctcgcattccgcacatcttatgacggctccgaggttatgcgggtcttctattccgtcgcagactacgatgagcggcttttctcccctctcgcgtgcgatttcaaggatatcttcaacggtgcagtaggctttttctgcgacgagagctgcaacgccctggtgattttcccctccgcagagtctgtcgaggtaatccgaggtggtatcgactacgggaattctcgcttcctttgccttggctacgatgaccttgaccgagccttccacacccgagacgagaattttgtcgataggcgttcccgttttgaggagttccgcaacggcgtttcttcctacaactgcgttttcgcgtcccttgctgtcgtcacggttctgtctcggtctgttaaagcttttgccctgattatcggaaaaattttttcttcccgagcttctgtcttttttatcgtaatttttgaatcttttttcttccatagtttatattatacggtaatttttgtatatttttcgatagactgcgcctttatacagtaaggcatactaattatagcatatttttttcggtttgtacagttttattttcaacaaaagcgatttattccgatgaaaaatctgcgcgaactggatggaaaacgaaaaaagctgccgcactactgaaaaatacagaaatgcagacagctttttaagagaatcaaactgttagtctgtactttttctcctttagcgaggagcgacactcataaatgagtatccaaagtaccaaaaagagaaacttttttgtaagtcttgggtgtttcgagcgtagtttccctcgggatactacagcggaggtcgacaagggacgccgtccctttgatccctgcaaacttttgaaaaagtttgatcaaaacttactactgcgtttgtttatcctaatccttccagctgaatctgagagccatgacgcggacgcattcgtttgaaaccataagcattccgccgtcagcatgaccttgttttattgtgccgtccgggaggtacactctcgagtctccgtcggcgagcgctgttacaaacgggatatgtcccgcaagcacggcaagctccccgccgataccgcgcaccgacagctgggttgcgtctccgtcgaacactactccgtccgggaccgcgatttgcagcttaaacgtcttcatcttcgctcctaattctcggtttttactttatatttttagtctttgcttgctaatttagctttttcgacgataaagcgacagctacactatcaatccttagccgctaatttcgctttttcgtacgcttcatctatcgagcctatgaagaggaacgcgctctcggggaggttgtcgcatttgccttcgattatctccttgaagccgcgtatcgtctcttttctcgaaacgtactttccggggaagccgttgaacgcctcagcaacatgaagcgcctgtgacatgaatctctgcaccttacgcgctctcgaaaccgtaagcttgtcctcctccgaaagctcgtccatacccatgattgctatgatatcctgcaggtccttgtatctctggaggatgctctgcacttctctcgctaccttgtaatgctcctcgcctactatatcgggggagaggattcttgacgtggattcgagcgggtctacggcgggatagatacccattgacgctatcgaacggctgagcgcggtcgttgcgtcgaggtgggcgaatgtagttgccggagcggggtcggtatagtcgtccgcgggaacgtatactgcctgaatcgaggtaatagaacccttcttcgtagaggtgattctctcctgaagcgcgcccatttcggtagccagcgtcggctgataacctacggctgaaggcatacgtccgagaagtgcggaaacctcagagcctgcctgcgtgaatctgaaaatattgtcaatgaagagaagcacgtcctgtccctcggtatcacggaaatactccgccattgtaagaccggacagacctactctcattcttgctcccggcggctcgttcatctgaccgtacacaagcgcggttttctcaagtacgccggattccttcatttcgttgtaaaggtcgtttccctcacgggttctttctcctactcccgtgaataccgagatgccgccgtgctgctttgcgacgttgttgataagctccatgataaggacggtcttaccaacgcctgcgccgccgaacagtccgaccttaccgcctctggtataagggcagatgaggtctatgaccttgatacccgtttcaagtatctccgtttcgaccgactgatcctcatatgcgggtgcgggacggtggattgaccacttttcgcagttctcgggtgcgggcatttcgtctacgggttcgccgagtacgttgaagattctgccgagggtttctctgcctacgggaactttaatcgggctgcccgtatctacggcttcggttcctctgacaagaccgtccgtcgagctcatggcgatacatctcgcgacgccgtctcccacatgagcggaaacctcgaccacgagacgcttgcccgaaaactctatctctacggcgtttaaaatatccgggagatgctcctcgtcaaaccgcacgtctactacaggaccgatgacctgagtaacatgaccgatatttttttcgtttgccatttattctttcctctatatttactcttaattacgcgtttgctccggccacgatttccgttatctcctgcgttatcgcgccttgtcttgctctgttgtacttcaggctgaggctttccatcatgtcgtcggcgttctttgtggctgtatccattgcgttacgccttgccgcaagctccgacgcgtatgattccgcaaccgacgagtacagcacgcccgaaatgtattccggtatcacggcggctaagacctcctccggattcggctcgtactcaacgagagcttgtgcgccttccgttttttccgcttccggtgcgtttcccttgcggtttctgcctttttcaagcgggagaaggtatgttatatccggactttgcgacagcatcgactcaaagcgtgtatatatcagcgtcactgcggagattttgccctcgtcgaacatattccgcgcagtctccgccaccttagccgactcctccgaggtgaatttctcgacggaattaaactcccttgtgacgatgtttgagtggtgtgtgtagtactccgccgcacgcttgcctatcgggataacaaggtcgttatctctcagcacagtcatggcagagcggaagatattgttgttgtagccgcccgcaagacctctgtctccggcgattatgatgtacaaaacggggagatttctgtctctctgcgcggaatacgagcttttttcaaccgcaaggtcggagaaggcgtcgagcatgacctgtctgtagaatcttgacgcttccattttattgcttgcgcgttttatctttgaagccgcgacgagctgcattgcctttgtgatatgtctggtggagtcaacgctttttattctggcgcgtatcgcctttatatctgcacccattcattcacccccgctcagttttcggaagtgatatggtaatgctcgcggcggaatttttcggtgaattcacggcacgcttctgcgagagtttcaaagccgctgtcctcgagcttgcccgtctttctcactatgtcaagaagttcggagtagcggaggtcgaggaattcatagaactccttctcgtaagcggaaacgtcgggcacgttcacgtcgttgagatatccgtttgtggcggcgtagattatcgctacctgcttctcaacgggaacgggcgagcttttatcctgcttcaaaatttcaacgattctctcaccgagcgcgagtctttcctttgtgtccgcgtcaaggtccgagccgaactgtgcgaacgatttaagctcgatatactgcgaatagagaagttttaacttacttgcaaccttcttcattgccttaatctgcgccgagccgcctactcgcgatacggaaataccggggtttactgccggaacaacgcccgagtggaacagctccgtttcaaggaatatctgtccgtcggtgatggagatgacgtttgtcgggatgtacgcggacacgtcgcctgcctgcgtttcgattatcggaagagccgtgatggagccgccgccgtattcgggagctactcttgccgctctttcaagaagtcttgaatgtaggtagaaaacgtctccggggtatgcttcacgtcccggcggtctgcggatgaggagggagagtgctctgtaagccacggcgtgctttgagaggtcgtcgtagactatgagaacgtccttgccctgcgccataaagtattccgcgatagcgcagccggagtaaggagcgatatactgcaggggagagccttcggaagctgacgcggcaacgataacggtatacgagtccgcgccgctctttcttacggtttccgcgatgtttgcgatagtggagtttttctgaccgattgcgacatacacgcaaatgacgtccttgcccttctggttgaggatggtgtcgagcgcgattgtcgtcttacctgtctgacggtcgcctacgataagctctctctgtcctctgcctatcggtatcatggagtcgatagccttgattcccgtctggagaggtacggacacgctttttctcttgatgatgccgggagcttcatgctcaataggtctggtttcctttgtgtcgatgggtcccttgccgtcaatcggtttgccgagcgcgttcacgatgcgtcctatcatgccgtctcctacgggaactgacacgaccctgcccgtgcgctttactttagagccttcgcgtatctcggtaccgtcgtcaaggaggactatggagactgtttcctcttcgaggttcatcgccatgccttcctcgccgccttcaaaaacgacaagctcattcgccatgcagtcgtcaagaccgaacgcgcgaactattccgtctccgcaggtgattaccgtaccggtttcggcttcttcggctttattttcgtagtttttaatttggttctttataatattgctgatttcttcaggacggatgtccagtcgaagtcccatttattgaccccgcctttcctgtatgtttgattctgttacgatgcggtttacagtaccgtttgcgcgagtttttctttgatttcgccgagctttgcctttacgctgccttcgacgaggtggtttccgtagtcaagccgcataccgccgatgagggttttatcaacgacgtactgcacttcgacgcggtgtccggtgttcttcgcgagcttttcctcaaggcgttttttctgctcgtccgtgaggggaaaggcgcttgtcgctgtagctttgactatttcatatctgtcgtaatacagcttttcgtattcgccgaagctgccgggtatttccgttgcaagtccgcgctccgtcatgagaagcatgaagttgagcaggtacggatgcacgccggagaacgcctgtctcacgcagttttttctctcttcctttgagacagaggggtctatgaggaaatggaggtattcgcgggagagcagtttttttatttccctctcttctgtgagaagctcatccgcgcagttttcttccgcggcaagctcaaacagacccgcgccgtactctcttactatctcgttcataaatcagtctcctctcaaagcttgtctatgaagctgtcgataagctcgcggtggtcgtcttccttgatttctctttcgacgacattttccgcgatctgcactgatatgtcggaaatctcggttttcagttcgttaagagccttcttcttttcacgctcgatgtcggcttccgcttttttgacggtatcggaggctttttgctttgcctcgtttacaatttcgtcgccgagcttgtctgcccttgcggatgctgttttgattatgctgtcagcttcttcctttgcgcccctgagcttttcggagtagagctttttgtcgctctccgcctgagccttagcttcttccgcgccggtatagagggtttcgacttccttctttctctgggcgaggacgttttgcacgggtttaaacaggaatttcttcagaatgagcgtaagtatcagaagattggctattgtagctatgatatgccatatattcagcgatatcagctcaaggtattctgcgtccattattttctccgatacttttttagattagagcttgctgatgaagaggttcggtgcgaggagcataagaagaagtcctgttacgaatccgtaaataccggtagtttcggcgatagcgcatcccatgatcattgtagaggttacgcttcctttacattccggctgacgtcctattgcttcgcaggctttacctacggcataaccttcaccgataccggggcctatacctgcgatgagtgcgagtcctgcaccaactgcgcatcctgccatgattattgcttttgcgtttgcgagttccatattgttttttctccttatgtttttataatgtagaaagaactaaacgctctttctgattttatcttaattttatttcacttaaacttcaagtgagaagatagaagaaaagactggcgtcttttcgattttattattccacttcgcgtggggcgcccttttcagggggaacgccgcacttacatagtaagtgcaaggttcagacgccatccctctgcgagtaccggcttaccggtggagtatggctgatatggtttactgccgtctccgcacatttttaccgattagtcgcgcagtttcgcgtaatccgtcgaatgagctacgctcattcagtggagcttaaaatgtgcgcgcggtgagttttggagcgcgattaagcataagccttagtagtggcattagaatgaccgcgtctgtttattgggctgaaatttataaagcgtttctgcaatcgctgacggaagcaaaacgaaattggacgttcgctctacgtcaacgcacagattaacgacacaccgcggttagcctaatccatttcactttgattaggtattctcaactctgcgcgatgaagtacaaccgatttaaaccaatctacccgcgtctaactctcccgcgcgaacattctaatgccactactaaggcttatgcaaacccgcgcgactgttctgttcaagtgggcgatgatagagttaatcatatcaaccgaactccaccgcgagcgtagattcacaaggagacggcgtctgagtctccttgtgtgccccacgcatagtggcaactcccctcactcgcaggtgagacaaaaatttcctcagcttaatttaaagcctaaatctaaaatttgaaagcttaatttgaagcttaatcctccgtgcttgccgctccgccaatgtacagcatcgtcagcatggcgaaaatgaacgcctgcatacatgagctgaacacgtcgaagtataccgaaagcaccgccggaacgcctatctgcaaaaacggtatcttgccgagtatgccgggcagccagccgagaagcacggtcgacagtcccgccaaagccgcgtatacgagcgccgatattaccgttcccgataccacgtttccgaaatgacggaacgccatcgacacgggagtgccaagctcactgagcacgttgaacggtgtgaacagcgcgaaaggctcggtatatcccttgaggtagccgaggaagccgtttgttttaatcttgtagtaggtgatgagcacgaacacaagtatcgcccatccggctacggtgttgaggtccgctgtcggggggtacattcctacgagagaggaaagggacgagaacgccgaaagcgagattatcgcgcagatgaacgggcagaaataatcgaatttcagtcccatgttttcgttcacgagctttgttaccttctccactatccactcggcgatgatctgtcttttcgagactgctctgacctgcaggttatgcgtgagcacaaggcagaggatgaaaatgacagccatgactatccacgagtttacctgagtttccgttatcggtattccgccgaaaatcggtatctcgaaaaatattttcgcgcctgtaatgttgattgagtccattatatgcctcttatgatttaatttttgtcttccttattatcctgcttctcgggtgctttcggaacctctccctttgagaatccgctgacgaatttttcaaactcatcggttttctcttcttcctcgtcttcgggaacgggatcgtatgtcggcggcgggtcgtttctcgttttatattttctccacagtccgcgcgcggtgatgataattctcggatagaacaccgacgccaccacgggaacccaattgacaaactcgactgcaatcgacacgccaatgaccgcgagcattaccaccgtgcggaaaacgtaggagcgtcgcattttgagctttgccataacctcgtcgcctgtttcgagggcttttaagacgcccacagacatgagcacgaagttgccgaacgagaggacgtagccgacaagcgttccccacagcacgggcaaatcgaacttgcctattactgcgaacacgagtgctacgacaatcgagcacacgccgcacccgagagccataaagccgatatccttttttacctcagggtcaaatttcatagccaaaatctccgattacttgcatcagggtgaaaatccatagttaaatcttcagttaatgcaatttctgagtaattttattgctgattcacggaaaatatacaggttatgaaacagtaataaatttttcatcaattattaaaggtattatatcattttatccctctcaatgcaatagggacatatgtttttaattgcaaactttttcttcctttggttcaaatgaacgaaacatattgttcatttttgcactattccttagacggcttgcgccttctgagagactttcctgatgtaagtttcacttagattttaagtaagggaaaagtagaaagagcttcgccctttcagattaattattccacttcgcgtggggcgcccttttcagggggaacgcagagaggttcagacgccacccctctgcgagtttcggcttgcggtggagtttggtttatatgatttactgctgtcctcgcccccattaacagctcagtcgcacggctacgcataagccttagtagtggcattagcatgttcgcgcggtagaggtagacgcggggaattcggcttaaatcactgctttcactttcgcgcggagggttgaataccaaatcataactgaattggagtaggctaaccgcggattgttgttagaaattgcgttgaaatggagcgaacgtccaatttcgttttgcttccgtcagcgaaccaatgaacgttttataaatctaagccaaataaacagacgcggacatgttacgctccactactacgctttatgctttatcgcgccccaaaactcaccgcgcgcacattttatgctccactgaatgagcgtagctcattcgacggattatgtgtaaccgcgcgactaatcggtaaaaatgtgcggggacaaaagttaaccatataagtcatactccaccgtgagcgtagattcacaaggagacggcgtctgagactctggcacttactgtgtaagtgcggcgcccatccgcgtaggagcgtcccctcaccgcagtgagatataattaatctgaaagggcgaagctctttctacttccttctcacttaggatttaagtgaatcttcactggggaaagtctcttagaatacgctcgtagtctaaggaaaagaaaattgcttcgctctttcttggggaaatctcttagaaggctttagtcgtctaaggtaaagaaaaagccgccgctttggtttgcgacagcttatcaatttcgttttagtttgccagctcgttcagcatagcgtatgtcttcttgaaggtttccttcttctccgctatgaactgcttcatcttgtcaagctcttcctcggaatacttgtcagtcatgccgggcttcagcgtgcctttgtacatacggtcgagtacctgtgaccagccgataccgcatgtcgttacctcgccctgtctctcaactatgatgatgtcggagtttcctgcgaaaagctcgtcaactgctcttgcacccatctttgttgcgagaagtctgtcggagagtgtgggagatccgccgcggacaacatgagcgagacggcagaactttgactcgatccagagcttgtcgttgccttccttctccgcgagttcctttgtgatgcttgttatcttgttcttcagctcttcgcccaaggtcgggaacgcttcggaaacgatgatgaggaaggagcgcttgccctctctgcggagtcttatcatcttgtttatgcaagcctcttcgtcaaattcgcattcgggaataaccgcagcaaccgcaccggaagctatagcggtgttgagagcgatgtcgcccgcacctctgcccattacttcaacaatgttgcatcttgcgtgggattcgcaggtgtcgcggagtctgtcaacgttgtcgataacggtctgcatagcggtgtcaaagccgatggtgttgtcggaagccgtgatatcgttgtcgatggttccgggaacgcctattgtgggaatacctctctgagaaaggtcagtagcgcctctgaatgtgccgtctccgccgatagctactataccgtctatctcgtgcttcttcagcgtagcgatagccttctgcattccggcttcttccttgaactcaaggcatctgtcggagtagaggatagtgccggagcggtctatgatattggatacagcgcggtttgtgaggtctatcatctcgtcgtggatcattccgcggtagccgccgtaaataccgacaacttccacaccgcgcgcgtttgccgttcttgcaactgctctgacagcggcgttcattccgggagcgtctccgccggacgtaagcacgccgatttttctgaacttcttttccatgttgtttttcctttcaggtatttgcgtttttatgtattcccgtctattgtaatacaaagcggacaaaaaatcaagctaaatccgcaaaaattcccgcgtctgtgtcaaatataattgataacgggggattttttaagtaaagtgcgctgttatccgccgaagttcacgccgtattgtattttctttccgtcgggcgcggtcatggtgtagtacagcacgtcgtcggacattcttatgcttgcgagccgctgatttgtgacggtctgcgctgttccgttcgggtagatgaacacaaggcggtactcgtctgcaccggtattgtacagtcccgagccgtagagtacggtacagcgcgagtttttctgctcgaacatgatatccgctccctttttggcatcggcaagggcggtggaatagctctcactttcgcctgcggatgaatccgatgaagaagaagagcttccgttatacgaaatattcttgtcggcggcgtccaccagtgaggaaaggtcggacagtccgcagagcgagagagtgttcgcgtccgcttttccgcagaggaggtctatcacgactgcgttgtcgaagctcactttattgtcgaagtagaacgcgtatgttgtgtattcgtcgtgatctgcataccacatctcgcgcaccgtcactctttcttcatctataaagaggtagaaaacggagtttatgtcggaatagcagtcctcggcggttgaaatctgcttgccgttctgtcctaccgcgtcgtcgttgagccatcctctgactatgccgagagcctcgtagcctgaatttttatacagtctgaatgaaatattatcgctctcgaggacgacgttgttcaccagctccagcgaatatgaagcgtcgctcgaccatacaccgctgtggtttttgaatcttgcggcgactgcggtaatgccggagaactgctgctccttcacgcttcctttgtaaagctcaagggaggtcgtcgagggatttgtgctttccgcgggtttttggcttgatgagcttccactgccggacgagggcgagcttacgttcactctctcgtcgggataggcgattctcatgacgaccgcggatatttcactgcgctttacggtgccttcgggattgattttgccgccgtttcccgtcatgattccccaacggtacatacggtaaaccgcacctgcataccaagcgtcggctgaaacatcggagatgtcgcccattttcgcgggatttatctcctcaaactccgagccggaagaaataatggcgcgcgagaacagaactgcaatctgaccgcgtgttgccggagtagtgtagctgtcgtattcctcggtgacgataccgtttttctcggcgtaggagaggtatccgtcgtaccagtttttgtcgccggcaagctcggtggtttttccgtcggtgagaagctgatggcatgacgcggcgagctttacagcctgggcaatggtgatagtgccgtcgggagagaagtgcgtatcgtccacgccggagataagaccgagggaatacgcgccggacacgctgtcatagtaccacgcggacgacgaaacgtcggaaaactgaccgttatacgagcgagtgggggagatatcggcggcagaaacagaagccgccagcacagccgagattattttatgtttattcttaatcatatcgctctctttcaatttaggtaatcttaacatttcaattatatcagttttggcggaatagtcaaggcagtaaatgaaaatttacctttttccgaaaaggcttcaaaaaaggatggggaaaaagtagaaagagctccgctctttcgatttcattattccacttcgcgtggggcgcccttttcagggggaaca

SEQ ID NO: 57 - DNA, 32759 bp, Unknown
  16S sequences of unknown bacteria
cttcgcccgtttccgccactggcggcggcgaagctccgtccctctcgcgctctcccatggggttttgacagtctgcactggcgcgcctatggagcaccagtgcaaatcttttataactagcttatttgctgctctcttccacagccacagccacggcaaccgtcgcaccgaccatggggttgttgcccatgccaatgaggcccatcatttccacgtgcgcgggcacggaggaagagccggcgaactgcgcgtcggaatgcatgcggcccatggtatcggtcatgccgtaagaagccggaccggcggccatgttatccggatgcagcgtgcggcccgtgccgccgccagaagcgaccgagaaatacttcttgcccttgtcgatgcactcttttttgtacgtgccggcgacaggatgctggaagcgagtcgggttggtggagttgccggtgatggaaacgtccacatcctcataatgcatgatggcgacgccttcgcgcacatcgtccgcaccatagcagcgcaccttggccttatcgccatcggaatacgccttttcgcgcacgatcttgagctcgcccgtatagtagtcatactgggtctgcacataggtgaagccattgatgcggctgatgatcatggcggcgtccttgccgaggccgttgaggatcacgcgcagcggctctttgcgcaccttgttcgcggtgcgggcgatgccgatggcgccttccgctgcggcaaagctctcatggcccgccaggaagcagaagcacttggtgttctcgcgcagcagcatggcggccaggttgccatggccgaggccaaccttgcgctggtccgcgacggaaccgggcacgcagaacgcctgcaggccttcgccgatggcttccgccgcttccgcggccgtcttcacgcccttcttaagggcgatggcgcaaccgagcgtgtacgcccagatggcattttcaaaagcaatgggctggatggagcgaacgatcttgtccacatcaatgcccttggagaggcagaaatcgcgagcggcctcaaagccgtcgaagccatactgctccagcaccggctggatcttggcaatgcgcctgtcgtaaccttcaaaacggatcatctgtgtcacctcgctccttccttattcctgccgcgggtcgatgtacttcgccgcgccctcataccggccataggtgccgatgttcttctcgtaggcttccttggggtcggtgcccttcttgatggcgtccatcatcttgcccaggctgacaaacttgtagccgcaaatctcgttgtcctcatccagagcgatggagagcacatagccctcagccatttccagataacgcgcgcccttgagcttggtgccatacatggtgcccacctgcgaacgcaggcccttgcccagatcttccaagccagcgccgatggacagaccgtcttccgagaaggccgactgcgtacggccataaacgatctgcaggaacagttcgcgcatggcggtgttgatcgcgtcgcacaccaggtcggtattcagggcttccaaaatcgttttccccggcaggatttcgctggccatggcggcagaatgggtcatgccagagcagcccagggtttccaccagcgcctcttcaatgatgccgttcttaacgttgagcgtcagtttgcacgcgccctgctgtggcgcgcaccagcctacgccgtgcgtcaaaccggaaatgtcggtaatttccttcgcctgcacccagcggccctcttccgggatgggcgcggggccatggttggggcccttcgcgacgcagatcatcttttccacttcatgcgtgtattgcatcgtccgtcctccttctttcgcgcaaaagaccggcgattcaccgatccaaacttgggcaatcacccagcccagagaaattctcctccgagcccacgtgcgctgcgcgcacaatgattccctctataccattctatattatatcacaatttgcgcctggttcaatgccaaaagtcgatttttaaccgagaaatacggggcattccctattagagcaaatatgcaaaaagcgaatacaggcccaagcccgccacgccggaacccaccatcacataaatgggatctgccttccatttgcgcagcacaaagaggcccaccgcaaaaaggaatatggcgatgccgtcggtgtcggagagacggattgcgtccatcgtggtgttccagaaggcgagaaccgcgatggtcacgcctgccgaagcgatcagagcgatgatcgcaggccgaagccccttgaggatgcccttgagcaaatccatctctttgtacttgagatacaggtgcgcgagaatcagcacaataatgcacgaaggcagtacgcagccgatggtggccacgatggcgccagccaacccggcgatgcgcatgcctacaaacgtggcggagttgatggcgatgggcccaggcgtcatctgggagatggaaatgatgtccgcgaactccgtgaggtttagccagccatgcaaatccaccacttggtgctggatgatgggcatcgcggcatagccgccgccgatgctgaaaaggccgatttggaaaaaactccacagcaattcaagataaatcattttccggccctcctcatggcgcgcagggtatccaccgcgccaatcgcgccgcagcccagcaaaatgaccaacacattcacgcctgtgaacaccgaaagcaaaaatgccccggccatcaccagcaccggcaaaatccgtttttccttgataatgtcccaggccatggaaatcaccacgttggcaatcactgccgtcaccccggcttgcatgccacgcagcaccatggagacgatcgcgttatcgcgaaacgccgtgtaccccagggaaatcaccgatatgatgatcagcggcggtaaaatggtgcccaagatggataccaacgctccccagacgccccgcaggcgataaccgaccaaaatagcggcgttgacggcgatgggaccgggcgcggattgcgcgatggccgtcatgtccagcatttccccttcttccagccaatgatattcttccacgaatttcttgcgcatcagtggcacgatcacgtatccgccgccaaaggtgaacgcgctgaggtaaaacgtggagaaaaagagcttcgcgtaaaatcccctgtctttcatgggcatccctccgttttttctattataccgcttgcgctttgccgcgtcaaatagtataataggggtgcggaggtggatcatgaaaaaatttctggttcttttggttgcttttcttttagcggcttcctcgtggggtgcgcttgcagatacaacgcttatgggaaatggattccaaatgacgctgggagaaggttggagcattttggacgcggcgtctcaagcaaacgtttcccatctcgcttccggtatggcgcccgctggcacgtgcatggcggtcagtgaaaacggcgccagtttgtgcgcctatatacagccttcgcaaggcatgaacatccagtttatggagctcttccagagcgaatacgtatggcgcatcgaagaagccatcgcccccattcaggcggaaaacgtctctggcgcgcaaacgctgtgcggcgcaaacaacgtgtattgcctttcgtttactgcggcaggcgttcccgtggccgtgtattattctttttctagcgaatccgtggtcacggcgattttcaccaacgcggaatcggaagaaatggcgcagattctttccaccctttccattcaagaagtcgcttctcccccacagtcataaccgttcgcaaaaacttgttctgctgttccattgactttggcaaattgatcgtggtataatccatatattgtgtggaaggcattgcatctacaccagatgctgtgcttttgcgcgcgcgatttttgcataacaagagaatcgagggagaagaccatgcaggtcagaaagcgaaatggcaacatcgtggactacgaccgcgaattcatcgttcgcgcggtaacgctcgccgccgctgccgcaggggaacacgatagcgcggtgcagcgcgtggtagacggtgtggaagaaaaaatccgctcgcgcaacgagcgcgttgtcgatatcgaaaccatccaggacgcggtggaagagtcgttgttcgaaaacgaatgttttcgaaccgcaaaggcgtatatcctctatcgcatggataaggaaaaaacgcgcggactgatggaatggaaagacggactgctcagccgcgaattcctttcgcgctataagcacgcccccactcccatgggcgagttgggcgcttttgtgtattcgcgcacttattcgcgctacattcccgtgctcaaccgccgcgagttctggtgggaaaccgtgcggcgcgccgtggaatacaattgctccctcgcgccaaccacgcgcgaagaggcggaaaaactctacgacaacatctaccacctgcgtcaattcctttccgggcgcacgctgtgggttggagcgacggcggtctccgaggcgtatcccatggccaattacaattgcgcttttgaggtgatcgacgattatcatgcgttccatgatttgttttacctgctgatggtcggcagcggcgtcggcgtgcgcgtactgaagacggatgcggaacaattgcccaaaatccgcaccgacctggaaatcatccataaagcctataacccgcgcgaaaaatccgaacgcctggaatatacaaacctggtcttttccggtgatacggtgaacctcgccatcggcgattccaaagagggctgggcacaggccatcgaccactatttccagattttgaccaaccaggaatattcgcggattcgcaggatcgtggtggaatacgattccatccgtccgcgcggcgaacgactaaaagtgttcggcggcacggccagcggctatgaatccatgttgaccatgctggataaaatccatcgcgtcatccgttccgccggattgcgcgacggttgcgagcgcacgcaactgcgccccatcgacctgttggatatcgccaatatcatcggtgaaaacgtggtttctggcggcgtgcggcgcacttcggagattggcctcgtcgaccaggacgatcctgaatgcatccaggccaagagcaacctgtaccggcagatcaacggccgctgggaaatcgataagtccattgcccatcgccagatgagcaacaactcgattttttaccgccgcaagccgacgcgggagcaattgcactggcatctgcagcaaatgcgcttttctggggaacccggctgggtcaacgaagaagcgggcaaaaagcgccgtcccaatttctgcggctgcaatccctgcggcgaaatcctgctcgatagccacggcctgtgcaatttgacgacggtaaacgcgatggcgtttgtgcacgaaggcgtgctggacgaaaaggcacttttggaagcccaacggctcagcgcccgcgcgggcctgcgcatgacctgccgcgagctcgaaatgcatcgttggaatcaggtgcagcagcgcgaccggctgctcggctgttcgctgactggctggcaggatatggtgaacgccactggcatggatcgaacggagcaagccgcgctgctcgaccggctgcgcgccacagcgcacgaagctgcggaaaaggccgccgctgccctggggctaaatatgcccctgctggtgacgaccatcaagcccgaaggtacgctatccctgttgccgacggtttccagcggcatccattattcccatgctccgttctatgtgcggcgcatccggatttcttccagcgacccgctctgccgcgtgtgcgaggaccttggctaccccgtgtatccggaggtcggccaggatccagaaacctgccgcacaaaggttgtggaattcccggtgaaggcgcccgccggcaaagtcaagggcgatgtttccgcactcgagcagttggaaaactacaaaatgttcatggagcattacgtggaccacaattgctccatcacggtgcatgtgcgcgaaaacgagtgggacgccgtggaagaatgggtgtgggagcactgggacgatgtggtcgccctctcgttcttgagctacgacgaaagcttctacgagctgctgccctatgaagcgattaccgaagaagagtatgaggcgcgccgcagcgccatgcgtccgttcaatccctcgctgatttccaaatatgagcgcgaggaatccgagctggatgtgggcggcgcggattgcgctaatggcgtttgccccgtacggtaatcagaacaatcagaaaacttgcccgtgccagctaggaggcttcggtttcccagcttgcgcgggttttttgcagattttatggtatgcgacttataaaaaagtacgtttcaaaagcgcaaatttcttcccaatttcctcttgcgacagcttgcaaatcccgtgcttccatgatacaatacaaagggaatctcaagtaaccccaaaatcaatgccgcatatcctgcggcagaggaggacgcttatgaaaaagttgctttcccttttgcttgcgctcacaatgctcattctcccctgcgccttcgccgaaaatgctgaggatgccgagaatacggaagctacggaagaaatcgaagtgcagttggtggaagacgccatcgcgggcctgcgttataacctgccggcggattggatcgttctgagcgccgccgccattgagagcctgatcgccgcgggaacggaaacggaagaagtggaatcggcgctttcggatgaacttatcgcgcaggtggaagcgctgacgcagagcggcatcagcatgagcatgtctgccgatatgctgtccaacgtcaatattttggtcagcccggcttcgggtatgaccacgcaaatgctgtatgatagcagggatgtgctccttgaatcctacaaggcacaggaatcgcaggggttgacgctggaaaacgatggcctcctggccacctttggcgagcgggactttatgtccatcagttgcacgatgctggaacagagcatggacgtgtacatgttcattgaaaacgacatgatgtacaccattacattcaccaatgccacgcccgaagtggaagaagtgatgctgggttccatcgaagtcgtgcccgtggaagactctgctgacgaagccgaggacgccactgagtccgccactgtagagacggaagaatctgctgcgcccgaagaataattcatgcacaaaatgccgggaaatttttcccggatggccgccgcccctttagcggcggttttttctaccaatttttatgaaggaggcaactatggtatttcaaagcgctgaatggatctggctttctcaagcttccacagtcaatcaatacgctttgtttcgtgcggatttttgcgcaaagggcgcttgcccagctagcttgcggatttccgctgacgcgcgctatgtggcgtggctaaacggcgcatttttggaggcgggacaatatgcggattatcccgtgcaaaaaatatacgatgaaatcgcgctggatggtttgctgaagcccggcgcaaaccagctggaaatcggcgtatattcgccggttaccgacagttcggtgtatgcttttggcgcgcaggcggtgatctttgaagttctggaagaaggcgcttgtatcgctcgcagcggaaaagagatccttgcctcccccatgcccggttatgtgagcggtccagttgatttgatcaccggacaaatgggctatagctttgaatacgacgcgcgctttattcccgaagcgttggaattcgcccctgccaaagtgctcgagcatacgcgcgcctttgcggaaaatcccgtgcggcgcgtgcgcattggcgagcgcagcgcgggcaacgtcgtgtcccagggcgttttcttctggccgcaaaacgccaaaactttgggtcagcgcatgcaatacgcggccatggcgttccgcgaaaaccgcgatatgagcggactagccgcacaaccgtccattccttgcgctagcgggattgcctatgccgcggaagaaggcgacggcatctatgtattgctcgatttgggacgcgaaaccgttggctatttggacattgaaatcgatctgcctgcggaagcggaaatcctcatcggttggggcgagcataccgatgatttgcgtttgcgcacctatgtgggcacgcgcaattttgccgcgcgctacctgggaaaggccggccatcaacgatttacccatttcttccggcggctgggccttcgctatgtacagctctttgtcgccgcgcgcgccttccgcctggtttatgccggcgtgctgccaacggactatccgctgcgccatagcccggctttgcagatcgcggacagtttgcacgcgcgcatcgctgaaacctgtgccgccaccctgcgccattgcatgcacgaacactatgaggattgcccctggcgcgagcaggcgctctacgccatggatagccgcaaccaaatgctgtgcggctattacgccttcggcgaatacgccatgccgcgcgccagcctgaaattgctgtcccaatcgctgcgcacggatggcatgctggaattgtgcgcgcccgcgcgcatccccatcaccattccttcgttcactgccatgttcctcgtggaattgcaggaatatgtcctctatagcggagatctggattttgggcgcgaaatgcttccctgcgcgcgagccattgcagatgccttttgcgcgcatgtggacgagtccggtttgatccctgcctatcgcgaccagaaatactggaatttctacgagtggcagccatatttggagggctatgcgacgcatgaacgcgataccgagactttgcgctacgatgcgccgctcaattgctttgtgagtcttggcctggatcgccttgcggcgctcatgtcctatctgggagaaaacggcgtcgcttatgcgcgttgcgcgcaaggattgaaagcggccgtggatgcgcgtttttgggatgaggaagccggactgtaccattcctttgccaatagccagggacaatggcacgaggcggaattgacgcaggcgttggccgctttctgcggcgtgtgcccggagcgcaaacttgatcgcgtgctgtcgcgtctggcggacgaaagcctcgtcccagtaacgctagcctattccatttttcagttcgaagcgctgcttatgcggccagagaagtggtcgcgctgggtctttggacgcatcgcgcgcgactgggggcacatgctgcactgtggcgctactactttctgggaaacgttgaagggagcgtgggatttcgaccgcgctggcagcctgtgccatggatggtctgccattccaatttatttgtatttcgcctatgcgctgggcctcaagcctttggaaccaggcttttcccgttattccttggagagggtggacgcgggcttaggcgaaacatcgggaatgtttgttctgcctgacggaaaacatctggaattataatacagttctgacgaaaatgacggaatagaaaaaaataggattgacaaatatcactttttcccgcaaaataagtgcgaggtgttggattatgaaaaaggccctcctttggatgctcgttttcttcctttccttgggcgtatattctgcgcaggcgcaaagtggcttgccccaagcggcaggctggctcaatcccgaaattttcgagcggtatccttcttactttgtcgaggaaaccaccggcaaatggcgtgtgcgcacgctggaagccgatgcgcttctcgaccgattttggtccgatggcgcagactacgatggcgaactatgcatatttttccctgagattgaagggtatttccaaagcggcgtatggatgccggtgctgaggatgtatttcatgcaaggttcgcgcgaggtacaagcgcacgccgttgcattgcgcgtggatgagacggtttacactttgccggcacacacggcaatcgtagaaaatggcaggcacgcggcggaagtcgtgagcgtgccgttgggcgaatatgccgcacaggtgctttccgctcttgacgaaggggaagatatttccctccggctgattggcgaacgaatctatacccaatctttggatgcggagagcagccgcgaacgcgatgaaatcgcctgcgcttcccgcgaaacgctcgcgccgtccactgccctcttcgcgcaggcgggaatggaaaactacactctgtgggatttgagcaacgctgcttgggaagcggagtatggctacccgtcctccctggaaatgggcgacatcagttcacaacccgttatcggcgaagatgctgtgttggacgatgacttcggccttatctgcccggatgatcgggatgaagctgccgttgccgctcaggaaattctcatcgaggctggatttttgagtggagaagccgccaacacttttgatgacgaggccgttgccgccacgctacgcgcgcagcggttctttggccgcattgaaaccggctgcatggatatcggtctgatccgcgcattgcgcggcggcgcggcgctggaaaccgaagaaactgtggcggcggaagcgggcttggtgggagaaagtgtggaaatcttcttggaacgctattggtttgctcaggcatatcatcccatggctgcgcctacttccattcacgccgtttccaaccgcgataatgtgtttttccttgccgacggctggatccgtaacgtttcaagcgatcaactcaggctgttcaccgattgcacggcgcgcgttgtatacaacggcggtgctagctttgacgctacgctttcttgcgagcgcgatgcgcagacgcaatttgattccacgctgattcccctggcgcagacccgcctagtgctcagcgcagagataccgcgcgcgctggcgctggaagcggatgcgcagtggcagattgaattccaagtaggaaccgaaactttggcttatgccattcagtgaggttgcatatgcgcgcaaaacatgtttggctgcttccctgcggcgtgctggcggttttgctcctgtcgtcatgttctttgttgccagaagaggaaacgccgcgaagcgcccccattctccgctcatatgagggagaaacgtttgattttgcgttcgtggaacggggcgatctcgttttgagcgagcgcatctcctgcacctacgtgccggtgcaaagcgcctcgctatcctttggccttgggggcgaatacgtggatgagatctttgtacatgtaggcgacgcggtagaagaaggacaactgcttggccaactggagctttcttctatcgaagaacaaattgccagcgcggagaactccattgcggaactgcgcttgcggctggagtatctggaagaagagcgcgcattggcgttgcgccaagcggagctatcggcagacccaaccgcggaaccgcagacgttgcaagaagcgctcattttggtggaagaagaatacgacgcgcgccggcaatcctatgaagattccctgtatttgcaggaactcacgctggaaacgttgaatcgccgcttaagcgaacgccagatccgtgcgccttttgccggcaccgtgacgtatgtccgcaactatagcgaaggggcgcgtagcgtatttggagaaaacgccgtgaccgtggccgattccaccctatccttgtttcgggcggatacggatcaatgggcccgtttttccccgggcgacgaagtggatgtcgtcgtgagcaacgacatttaccctgccatcgtgcgcagcgaggaagagcttggacttgcgccgcaggaaaagctggaaggggaaaccgcatatgtgtattttgctctcaaagagccgagttttgatctggaagatggggatcgcggctctgtaacgctggtgttggatgagcgccacgatgttctcctggtgcccagcgacgcagtttcatcggccagcggccagcccattgtgtattaccagaatgaagagggtatgaaagcgtataagcccgtggaaaccggtctaacagccaacaagcaaacggaaattatcagcggcctcgttgaaggcgagagcattatcgtagattaggagagcgcgcaatgatacgagaaaagccattgcccaaattccgtcgcgcatgcgcacgctttacagcggcgctgtgcgccgctggcgcgtttgtgttgcccgccatggcggaacaggcggttcctgcgctgttggagccagtgggcgtaaaaagcgatactgcggttgcatatgtgggcgaaatatctgaaatcaccgtttacgacggctccgttgcgccctatgtggaagaactttattttcccattgacggtcaggtcagcgagattcatgttatcgtggggcaaaccgttcaggcaggcgatcctttggtggcattggatcaagaagcgcaggaagaacggcgggaagaccttcttgacgccatagaagacgcgcgcacagacggcgctttcgcggatgcgctggccgaaatcgatatccagattttggcaacggaactggaacagttgcgccgccagtctcctgcggatgaaacggccattgctttgaaggaattggagatcgaaacggcccaactcaatctttccctggaacaggaactgcgcgcaatggagttggaacgcatgaacagcgagctggaaacgctggaaacccaactggaggaaggcacgctttatgcgccgtttgatgggcggattctgtttggacagcccattgaaaaaggatctggcgtcacggcatacgaccccattctctatctggccgatgattcacggctttccatcacggcagactatatttcctccacctatacggattcggcagatgaaatttatgcgtggattggcgcaaagcaatatgaaatcacgcctacgcccattgatatgtcggagtacttgtcactgctgctttccggggaaaccctcacttcccatttcacctttgagcaaagcgatgaaagcattcaatccggcatgtatgcggcgatatgcctggtgaacaattctgtgccagacgctttgcttgtgccgaccaacgcgctgttccgcgatgccggtagtcggtatgtttatgaatttgtggacgggcagcgcgtacgccgcacggttgaaattggcgtatccaccgaatggctcacccagattaccgctggcctggaggaaggagctgtggtctatgttgcggattgattttcggaagcgcgcaatttgcttcgtgtgcgccatggccctggcgggaggaagcgccttggcggaaagcgaaagtctgatttccagcgatttgatccaggcggaaacggcgaactatgaaacggcgcaagttcgcaggggtacatatgaacgttcgtattccagtggcgcatcggagtattatccgtatacatatcagttgcgctatgaaggcaatggcgcgaaatttggggaatataccgtcagccggggagatatggtcaaggcgggcgatgtgctggccacattcacgctggaagaagacgaagtggccctctcttccctacaactctcgctcgtgcgcgcgcaggaggattttgccgccggactggaagaacaggaaaacggcatagctgccctcagtgagcaatacgcggcggcaaccagccagtatgagcgagaattgctctccctgcaaattgcgcgcgcagaaattgcgctggaacaatacacctatcagcaggaaagacaaatcgcttctttgcaagaggacattgccgatttggaagcggcgcgggaaaaccatgtgcttctcgccccgtacgatggggaaatctccgccattacgtataagcgtgaaggcgatatggtttccagcaacgaagtgttgatcaccttgagccgcatggatggcatgctcttgcgcgtcgacaattccagcggctattttcgctatggcatgcaagtgattgtagaagtggggcctgccaaggaacgcgtacagctcaccgggcaggttgtgggcgcagatacgctcttgcccgaaagccgtcgcttgggctatgcctttatcgcgctggatccatacgatgcggaggaaattcgctttatcaatcccacggcgcacgctcctacgtattatctagaaaatgtgcttctgctgcctcgccgagccgcaacgctggaaagcgggcaatattatgttacaaagctgacggatggcatggtgcaaaagcggttcgtcaacctgattatgaacaacaatacggatgcgtggattttgcaaggagtttccgaaggcgaaactgtcatccttgactagcgggaggacgcgcatgatcagatttgtgattcgaaaaatgctgaacaaaaagtggatggtgctcgcgcttttggtgggcaacatccttctcgtcagcattacggccggcaatcccatgtatacgcgggcggtactccagcgcacattgacccgcaatctggaaacttacctggtggaaaacaacgcctacccaggcttgattaccatccgaaccagcggggccagcaaagatggcgtgctgttgcgccaatacagccaaagcgcgcaaatcgccagtgagcggtttggtcttccggctgcggaacaggtcaatgtgctgaatatcaccgctgcgcagaacgaattgctcatcccgcgcgaagacgcggcggacaacgccatttccttgggcatgatgacggatctgccagaacatagcgaattggtggcgggcgaattctattccgaagccggaatcggagaagacggcgtgcttgacgcggtgttgagcgaacgagccttgatagaattgaatctgttattgggcgatgagatggtgtttcccgaggtgctggatccccagggaaatcccattcgcatccgcatcgccggtgtgttccgcaaccgcagcaacgaggatatttattgggtgcgcacccccagtagttatcaggacatttgcttcatcgcacccgcgctctttgaagagtacttcttgcaaggcgatgaatttgcgtatggcgtgaacgcctcgtattatgtaatgctggattacaccgccatgcgtggcgatgaggcgcggcagtatttggatgttgccgatgcttatcgcgcggaactcaatggccgaaccatccagaattatcgcgacaatttcacggccactttaacggattatctggaaatagcccaaaaggtcaatgtcaccctctgggtgctgcaaacgccgatttttgctctgcttgctgcgtttatctttatggtttcgcgccagatgctggaaatggagcaaaacgaaatcgccgtcatcaaaagtcgcggcgccggacgaggccaaatttttgccatctatctcatcgaaagcctgctgatttccctgttggcttttgcaatcggcattccgctcggggcgtatatttgccaggtgatcggctcggcaaacgcgtttttggaattcgttcgccgcagcgcacttcccgtggaagtccacgcggacgcattgctctttgctggcgccgcttcccttctttccatcgtggcgatggtgttgccagcagtgcggtatgccaaaaccagcattgtgaatcacaaacaacgcaaaaatcgccgttccggcacgccagtgtggcaaaaatttgggctggatatccttttgttagccgtttcgctatacggactgtatacattcaacaaccaaaaggacattcttgcgcagcgcgtgttggaaggcgctgcgctggatccgctcctgtttttgtccagcagtctgtttatgattggcgcgggccttttgatggtgcgcgtgctaccgctcgtggtatggctaattttctcgctgtttaagcgtctttggagtcccgcgttgtacgcttccttcctgcgcgtgttgcgcacgcgttctagccaagggatttatcatggtatttctgattatgaccatcgccttgggcgtgttcaacgcgcaagctgcccgaaccatcaaccagaacatggaggacaatctatattataccatcggcgcggatattgttctgcaggaatcttgggacaacaatagcgcgcaagtggccgatgatccttccctggaactgatctatgacgagccggattataaccgctataccgagctcaagggtcaaggcattgcggcactggcgcaggtgtatatcaatcgcagcgccaccatgagcgtacctggcggcaccctgcgggacatccaggtgatgggcatccacaccaaggattttggcgaaaccgcttggttcaaagatagtctctccgatatccactggtattactatctcaacgcgatttcgcaaaacagccgggctgtgcttctctcccgcaattttcaaaccgagtatggctatgcgctgggcgacgccatcaactatcgcaactccaatggagacagcgtgcgcggcatcatttatggctttgtggattacttccccggctacgttcccgtgagctatgctaggggaagtgatggcctctatcaagaaaagcaaaactacttgatcgtcgcccatctggcgcagattcaggcttcctggggcgtaacgccctatcaaatctggatcaaaaacgaagcaggcagcgcatatatctacgatttcgccgaagagaatgacatcgcctatgcccagttccgcgacagtgccgcggaactggtggagcaaaagaatgatcctgttttgcaaggcacgaatggcattctcaccgtgggcttcatcgtagtgctgctcttgtgcaccgtgggcttcctcatctattggattctttccatccaatcgcgcgcgctgcagtttggcatttttcgcgccatgggcatgagtatgcgcgaagtgatcagtatgctgcttaacgagcaactgttcatttccggcttgtccatcgcggtgggcgcgctggtgggccatctcaccgcgcggctgtatatgccgctcatccaactcgcctatgcagcgagcgacaatgccttgccgctggaagtcgtgcgctacgccgctgacgatatccggctgttctccgtcgtcggcggtatgatactcgtgtgcatgattatcctgggcgtgctgatttcgcgcatgaagattgcgcaggcgctgaagctgggagaggattaaggttatgacggatatattcattgaagcaagcggcatcaagcgcggttttcccacttcagagggggaattctgggctttgaagggaatcgacgctgcaattccacgcggcaagctgaccattctcaaaggccgttctggctcaggcaaaaccacgctcatgaacatcctgggcgcgctcgaccggcccagcgaaggtgatgtactctacgcgggaaaaagcatcgtacgcatgagcgaaaagcagcgcgcgcatcttaggcgcacgcagattggctttgtgtttcagtccgtggcgctgattcccatgatgaacgcgcaggaaaatgtggaatacgccctgcgcatggcgcgcatatccaagaaccgccagcagcgcgccctggagtgtttgaaaatggtggggctgagcgcacgcgccaagcatatgccgcaagagctttccggcggcgaacagcagcgcgtcgccattgcgcgcgcgctggcgcatagccctcaggtcatctttgccgatgagccgaccggcgagttggatacgatcacagggcttcaggtggtcaaaatttttaaggatctcacggagcaggaaggcgtcaccatcgtgatgaccacccacgatacaagcttaatggaagttggcgacgcggtatatgagctggaggatggtgaggtaatccatggaagcgtatgaagccacgcccccgatggtcgaatgtgaaaacttggtgaaaatctataagaccaaggatatcgaagtgctggcgctgcaggggctggaagtgcgcattgataaaggtgagctcatggccatcattggcaacagcggtagcggcaaatccactttcctcaacatgatcggcggattggatcgcccgtccgccgggcatttgattgtggatggcaaaaatctcttcaagctcagcgaccgggaattggtggactataagcgccgcaccgtgggctttgtgtggcaaaacaacgcgcgcaacctcgtcccctatctcaccgcatggcagaatgtgcagatgcccatgctgttcgataaaggcgctaagaaaaagcaacgtgcgctggaactgctcgaaatggtaggccttgcgcacaaaaagaatagccgcctagcacagctttccggcggcgagcaacagcgcatcgccgtggccattgccctgtccaaccggcccaaacttttgctggcggatgagccgaccggctcggtggacgctaagaccggcgcatacattctcgatatgctgcgcgccatcaatcgcgataccggcgtgaccattgtcatcgtcacgcacgatcccctcttggccaagaaagtcaatcgcgtggtggccattcgcgatggcaaaatcagcagcgagcgcattatgaaacagagctatcttgagcgcttgcacgacatcaacgcctttacggacgccaaggaagtgcaggatgaatatgcggtgctcgaccgtgccgggcgcttgcagattccccgcgatatgctcgataagctgcaaattacgggcaaccggatgaaaatggaactgcgcgaagacaaaatcatcctggaaaagccggaagaagtcgctgaaccatagctttgatccggataaaggctttgcgcatgcttccctatcaagagatataatatgctttcttgggaggtgcattccagtgacttatgaaaaagttgcagaccacaacagagaacgggttacggcgttcatccagcagcattggtatacaaccaccatggttgtgcgcggcaaagccgtggatatgacaaagatggagggctacctttgccaggaaaaccatgcaatcctgggtttggtgacattcctcgcgcggggcgccgcattggaaatcgtgtccctgaacagcatggtgggcaaccgaggaattggcggaaagcttgtctcgctcgtggtggaggaagcccgcgcaaggggctgtcacaaagtggttctcgtcgcgacgaacgacaatatcaacgccatacgcttttatcaaaagcaaggtttcgatatggcgcgtctccaccgcaatgcgctggatctttcccgcaaattgaagccggaaattccactgattggcgaaaatggcattcccatgcggcacgagatcgaatttgaaaaagtgctggactgagcgaatccaggcttcgaaagggggcgagaaccatgccggaactgccggaagtggaaaccattcggcgcgtagtggaaccgcaaatccgaggccgcgccattgaaaacgtgctgcttcagcggccggaaatcatcgcgcatcccgatgctgaaactttttgcaagcagttgcaggggcaagttttttccggcatggcgcgccggggcaaatatttgatattctctctcgagggtggcgcgcgcatccttctgcacttgcgcatgacgggctgcctactggtggcccaggcagagtgcccggcagaaaagcatacgcatattgtcttttgcctcaatggaggccggcagttgcgtttttccgatgtacgacgctttgggcggctatggctgctgcaaaaggaagagcgcgattgctatagcggaatggaaaaattgggactggaacccttcgatcccggtatttgcgcggaatatttgctcgcacgctgggggcagcgcaaaagggctatcaaagaatgtttgttggagcaaaatgttgtcgccggaattggcaacatctattctgatgagattcttttcgcggcaaagatccatccggcgcgccccgccagcgccttaacgcaggcggattgggagcgcctagctgccgccattcccgcctgcctgcgctattttatcgaaaagaaccgcatttctccggaagaatactggcaaaccaaaggccaggattaccgcaatacgccctttttgcgggtttatggccgcgccggacaggcttgcgccatttgtggcgcaagcctgcaacgcatcgcaatcggcggcagaagcagcgtattttgcccggtttgccagggaaaaacataaaaatccagcagggcgtgtcgccgctcagcgcgccgtcttatccaaaaatcgcgcgatgggctcggggttttccagcgaatggggatggtgatcgcaatgcggcttgagagcgataaagagcgtgccgcccgcttgtagaaatggctcggcaaaacgcgcgccgttttccgcgtaaggcaccacgctatcttccaatcctgccaccaacgccacttctatgccattttgcgccagttcgcccgcgcgcgcgatgggtgctggcacaaaagacgccatatccgcttcttgcagcccataacacgccaggcactgcgcccattctggtcgcgcactcccgtccttcagcctcctgcccggccaactgcggatgtccagcaccggcgcgtcaagatagagactttccacacaatctggatgcgcgagtgcgaaattcaccgcatagagcccgccgcggctaaaaccaaagagaattgccttttgcgcgaatccccgctcatgcaccatgtattcatgaaagcgcgccatatcccccacagcgctagggcaaccgtagcggtcggaaagcgaacaataggccacggcatatccgcggcgcaacatttcttcgtccacttgcgcgaacgcgccaaagaattccgcgcgccacacccatggcttgcctggagcaaacgcctgcggatacaccaaaatgcaactatgccccgaaaaaacaaaatccttgcgcgcaaaaccttgccatgtttccataccctgtatttcccccataaagtcttttaactgctgagccggtataccgcgttttcgccgttcccatcctttgtggcaattttccattgcagcagcgaatccagcaccgcttgagcgcgagaagcctgcacatccagcagcgccgcaatttctcccacgctggctgaagcgtgatccgtgagataggctatcacgatttccgcgcagtatcgtttcgccgcctcgccgcgcaattccaattctggcggcgcgccgtccgccgcgctgaacggcagcgtcaaaaccacgcgatccggcgcgaaagcctcccataactttggcgcacgccaacccaatcccttccagatttggtaaatgttggcgacgcctccaccactgcgcgcaccgatatccgcgcgcgccaaaatgcggctgatgacgtcgtttcggggatcggatcgctcgccgcgcgcggcagattccgctgctacgcgcaggctgcccggattggagaaggaaatcccttcacgcgtttttacgatttcgatgccctgccgcgcccaataatccgcgtgaatcaggcaattggccagcgcttcccgcagcgcggcataggccgaaatgccacccgaccaggcacgctttttccccgcgccagggggatggaggttccggccaatccgagcgcacacccgcgtgtaaaaatcaaagaggttcccgctccagtcacccgaagtggaatcgatggtttcctctcccccatccttttgttcccgataaaccaggcgatagccgggaaactggcgaacgatttcccgttcgcggccaaatagcaaaagcccagcggccgtgggatggttttgtccgtctgcgcccgcgcctacagcgcccaattgcgaaagaaatgccgcatccgcgccctgcagcgcaaacgcctgtccaaaaggccgcaagcgcatgcggtagcggcgaacggtggcaaaatcaaaggcatccatgccaaagtgttccagcaccgccatgtcttgcgtttgcagcgccgcatcgcgcagcatagcatccacttcttcccgcgtgcacttatagtcgccctcgccattgcgtcggtaagaacccgcgtaagggtcgccattgatataaaccgggcgatcgcagcgctgtgcccgggggatgacgatggaaatgattttgttgccctggatttcctgcacgcaaacgctttcctccgtcaaaatattggcgctgatctttttggggtcatttgcgatttgccaaaattcttcgatgagcgtttgcggatcgggaagatttacggtttgcaaggacttatcgggcaattccaccacgcccagcaaaagcacgccgcccagcgtgttggcaaaggccgaatacgtttcccaaatgctgtgcggcaacccgcccagcgatttcttggcctcaatccggttgttctcccggtatttttccagatgctgaaaatcgatcattccatcctcctcctccgaaactccctgcctttattgtatcaaatgctcgcgcttctgtccactcctccggttctccttttttctgcttcaaaagattaagtttctgtttaatacaataaattgcaggaattttacacgaatacatggaatcttatcataaaatattttcgtttttctataaattgagggagataaatgtacattctgcaaaggacagcgtgacttttccggcgtttgttgggacagttgctattcgcttcgctgctatgcgcggccgccgcgctgtttaaaacgctatacgcaatgcaactttccgcatttttggacgcattgattgcaaccagcgtcttttcgggtcacctgcttctcatgggcgcgggccttttggcgttgcatgtccttgtacacatatgcgcggaaaatcaatttgccagcctgcagctgcgcgccggatatctgctcaacgaacacaatgccggggccctttcgcgcctttcggtttgttcgggtctttcgcagggcgatatcctcgccagtgtgaatagcgatagcaaagattttttgaacgccatgaccagcctgctgcgcggaagcctcgtgacgttgctcacaacgtcggtggtattcgccatcttgtgtacaatctgctggcagctcgccgccgttgctctggtggtgcccgtgggctataacctctgtgtcctcaaattttccggtcgcaagcaagcggaacaggctcaggaacgcgaaaaaatgcacgagctatcctcttgcgccgaggatgcactcgtcaaccggctggaggcgcgggtctttcgcctatccgctcccctggatgccaggcacgcgcgcctattagcgggctgggacgcgacccgccggattcttagccgcttctggtcttgcgtgggcgcgtgcgatgcgctcctgtatctgggctaccggttgcttcttgtgatgctgggaaccgtttttgccagtcagggaaagatgacgctgggcgatatcctggtctttttgacgctggcgaatacctttatgaacttcatttgggattttcaggcggaatcgtatcgcaacgccattgcggccgcgcagaagctgctcgcgttttgggaagcgcctgccgagagaacgggcggcgaatggactgaatggaaccccgaagaaggactcttcctggcagatcatctttcttacgcctatccaggcgcggagcccgtgctgcaggaggtatcgtttgccgtgcggaagggagaatttctaggcatcctgggtgaaagcggctgtggcaaaaccacgctgttgcacctgctgtgcggatttctggacgcgtccggtggcaagcttctcgcgggcggcacggcgctttcgcagtggaacctcgaatcgctgcgcggccacctggcttacatggagcagcacacatccctgatccgcggcactctgtgggaaaacgtagccttgcgggaggaaagcaccctcaccgagcaggacaggcaaaaaattcgcgatattctgcgcgccgttggcctggactaccttttaaagccacagcagcaaacgcaggagcggctgagtcagctctcgcagggcgaattgcagcgcgtgggctttgtccgctgcctgttcaagggcgcgaaggtatggttgctggacgagccgaccagcgcgctggatgcggataccgaagccgcaatcttggagctcatgcgcaatatccacgcatccggaattgcaatggccgccgtcacgcaccgcaaggcgctcatgccggcgtttgaccgcgcgatttccctgcgggatggccgcgcagtcgagctgcctttgcgtacaaccccggcagaggagggctaaccttatgaaatatctctccacgttgcgcgacaccggcgcggtattctgcaaactgttggcgcggatccggggtttttatccgctctttgccctatcgcagcttctgtcgctttccatggattttgtctatacgctgatgcttgcccgggcgtttcaaagcgttatcgacgcggctatcagcggaaatggccttctcctgagcacccttttgcgctatgtgtgcgcggcgctggcggtggtaatcctctggggctttggcgacaattgcctctgcaaccgcctgcaggaccggctgcaaatccgattccggcgggaaatgctgcgaagcgcgctggctgcgccgctctctacgcccatcgacctgggcgatttcgggaagcgctacgcggcggacgcaaaggccgcggcgcagttcctgctgcggaaaatttctagcgctatcctcagtcccctggccggcgggatcggcgggctgattctgcttgcgctgatccatcccctgcttgcgttcacggctcttgtgattggccttttgacattcctgttgcaaaagcgccatgtgccgcaggcagacgcatatgccaccgagcaatcccagcgcgaaagcgacctatcggcaggtatgtacgatatggcccacaaccttcccgtgctacgcatgttcggcgcgatgggcatggtgctggagcgcattcgccgggacaatgccgccgcgatgcaggcgggcatcaagctgcgccgcgcaaccctgtggcagcagtcctgtctgctcctcgcgcaatttttgcaaacgttggccatggtggcagtaggcagcgcactcgcagggcagggagccatttccattggcgaaatcttcgcctgcatcgcctatggagaaacggtatgctttatgttcgacggcgtgtcgagcggactggcgggcgcgcaaagcggccgcgctgcgggcaagcgagtactctgcgcgcttgatttgccgcccgacattttgcacgcccatatcgacgcctctatccagcccaacgcgctcgttatgcgctgcgtgtcgctgcgctttggcgagcggatattgctcgaaaatgccagccttgccgtccggcaaggcgaaaaagtggccctgattgggccgtccggcagcggaaaaaccacgctcgctaaagtgctgtgcggattgcaggcggtggattccggagaatgctcgctggcctccgcgcgcttttgctacgtgccgtcgagctgccgcctgttcgaaggcagcattgccgaaaacatcaccggctttgcgccggaagcggacggcgtaaagctgcaaagcgtgatccgcctgctcggcttgaacgaatggatcgattctctacccgaaggctgcgaaacgcaaattgaggcgcatggggacaacctttccggtggacagcggcaaaggctggccctcgcgcgggccatgtatgcggaaaacgacctctatatcctcgatgaacctacggccgcgctggacgcagccagcgcgcagcgggtgatcgacggcctgttggaagggctgaaagataaaaccatcctcctgatcacgcacgattcggaaatggctgcccgcatggatgtgtgctataagatcgaaaatggcgctttgcaggaggagggcgtatgaagctcgttgagattcgcgacgccgttttcgcgtattcacattcagaaaacagccattcgccgctatgctaggcggcagacgcaacggctgactgcgcttgctgcactggataactctcacatcaaagtgcgggcatggcaagtaggtgtccttctttctcccggcgtccgggcataaaaagagcagggaacctggttcaagattccctgctcggtggtgctgctggtggacggctggtattcagttttgaaaggtcgtgtcaggttggctcgatgatttaacacattgatgcgccattcaaaaatgcgattgaaatcagtcatgtgcctcgtccacgtggcttgctcgttttgtatcatcagaatatcataattttaaaattgcaactatttcttcgccatccatttcgccattttctataaagccaaactttgaataaagtttttttgcacctatattttcgggttcataagataaaaaacaatattctgctttgccacatggaaatgttctaataaactctaaggctaaacgaagagcttctttaccgtatcccttacgctgatatttttcgtcaatcatcaatcgccagatgctatagttgccataagcaatctgtggcggattatcaaaggattcatctacatcatatccaatcattaagaagccaacaggaatttcatcttcaaaaataccaaatggaaaagcatatccatttcctgttattgcaatatacgcttctatgatactcaactcgttcgatgcaacaaacgattcctgttccttacttacatgtagttttaatatatcccatatatttttcgcattaattttttcgattctaatcaccatatcatctctcctcaattttcaatttgtcgttggctttattatacttcatcgtttcagaaaagtatagaggcctattgtaaaacttgctggacaggaacagcttgcagcgcaaggtctttccgggcggcaagtccacaaaggggtagctggcgacagccagcgcagggggaagtgtagctcccttctttctcccggcgtctaggcataaaaagagcagagaacctctttcaagattttctgcttggtgataccccccggtgagcggttgatattcagttttgaaatttcgggccaggctggcccgataaattaggatttattagttcaataaagctttatatccatttgtcttatcgccggtgatggtaacaaaatatgattcaccaaagcgcacttcctatgatataggctccatatattttgtgatgccgtccggatatatattttcatatttgccgctagctttattacattatcacatacttctttgaaaaaataaaaatttatagattaaatcgatagatcataatctgtctttttccttcagaatacagatcattgtccttagggatatctgcagtttctatataaactccccctgcaatctcacatgtcctcgaggatgcaatattggttggatcacaagtgataatcaagtaatccatattgtgcttttttgcttgtaaaaacaaaagtgcacacgcctttgccgcatagcgatgcccttgataatccttctcaattccgtagccgatattcccgaaaatatatgttttttcgttgtgaccgattctcagattacaataacctattttctttccatcgagaaggcaaatatcaaaatagtatgtcgggagccattgtttttccggttgcgcatcacatgtcttttccaagcgaagaaaaacctcttcgctttttaagtcgttcgtcgcataaaacacatctcacacctaccttcaaattctacgtactatttgatttattttataacaaatcacctttctttgcaactgatgaattgtaaacttttcccgtatgctactgggcgctgcctttgtggaacaacaggtacttagacataagttgattgattcctgccggatggcttctccacggagcttatttataccatggtagctaaaatgactgcatcgctacattcatccatccaaatccgcttttctaaatttggctagcccatatggacgataccaagaaacccgctcaccgcttcttgggtgaacgggttttcccatttttgcgttctagcgataaataatttgagaaatagcgtccatgatcttatcatggcaaccgccacatcccgtggagcaatgcgtgacttcctgcacctctttgaaagccgattcgagatccgggaaggattccgccttatgtacggcttcttccacatcaaagaacgaaacgtttttgcacttacaaatcagatagttttccatattgccctcctgcgccggatgcgcaatgcagcacgatttcagcgcgatccctatagcgataatgcaatctggggaggagtctgcgacccctccccgtatgccaaagattctacttaccgaagtagcggttcagcagaccttcgaaggcgcggccatggcgggcctcgtccttggccatctcatgcacggtgtcgtggatggcatccaggttcagctctttggccagcttggccagctcaaacttgccggcggtggcgccattttcggcttccacgcgcatttcgaggttcttcttggtggaggaagtcacgacctcgcccagcatctcggcgaacttcgcggcatgctccgcctcttcatacgcggccttttcccagtacaggccgatttccggatagccttcgcgatgcgccacgcgcgccatcgccagatacatgcctacttcagagcactcgccattgaaattggcgcgcaagccctcaatgatgcgctcgtccacgcccttggcgacgccgacttcgtgctcgcaagcccagccgcgctcggccgccatttccttgaatttctctttcggcgccttgcactgcgggcagaattccggcgcttccgggccttcatgaacataaccgcaaatcgagcaaacccactttttcattgtaaaaatcctccctcgtttttctgatctggtattgaaattattcggtgacttcttcgaactcatccgggccaacgccgcagatcgggcactcgtccggcgggttctcgccttcgtacacatagccacaaaccttgcaaacccacttcttcatgaccattctcccctcttatcttaaggttctatcgtgttacaaccgagcgcctcacgcgttcgtattatatataaacgcgtacacgccggttgaaacatcaaaaatccaaatccggatatttttttattgccgcgtcgatatgatagcgcacaaacgcgcgcaaaagctttgcggcctccggccattccgcgcggccatccagcaaaacatactgggaaaaacgcgtgcgcggcaatttcagcagaattctgcgcgcgccttccgtcaaaggcacgccgcctacgtgcttttggcaaatgagcccgccctgccccgcgtcgaaccgttcaccgcccgacagcggcgcgccgcacagcacgcactcttccacattgggcgacatacccaatagcgccaaatagtgcgcttcaaaggccagcgtcgtcatgctgagcggcacatggttctgcgaaagcgctgccaaggcgtccatcaaaagttgaaacaattctggattgggcacattttccaccgccgcccattctgccagcttcagccaatacgcggcgtgcaccaatttttcataatcctctcgaatgggcaaaaacgcttccacgatcgagcactgttctacgctataccgccccgaacgctcccgcaattgaaattcgctggcgcaaaagggttccgccgccgcggacaggcgcgatttgggcttttttacgccgcgcgcaatggcggaaaatttgcccaattctggcgagagcagcgtaagcatccggtcgtagtccccataatccgcgcggcgcagcacgatggctgccgttacaatggattcattcgccataacccagtgtctttagatcccctgtgcggttgcgccaatcctcgcgcactttcacccacaagcggagcatcactttgcaacccaaaagcctctcaatatccgcgcgcgcttccgagccaatctttttgagcatagctccctgcttgccgataatcacgcccttgtgtgaagccttctcgcaataaatcgtggcgtggatttccatacggccgttctcgattttttgcatgcccatcatttccacgccaatgccgtgcggcacttcatcgtacagattgcgcaaggccttttcacgaatgatttccgcgcagatcacacgctcgggctggtcggtgaccatatcgtccggaaaatacttgggccccactggcatagcggcgactaacgcagttttcagcgcatcgacattatcgccctggcgcgcggaaacggaaaacacgcgttcaaatccctcgacgttcaaagaggccaagcgcggcataagctgctccggggtgaccaagtcggtcttgttcacggcgaggaatttgggacacgccatttggcgcacgtcgtccagaatcgccgcgtctcgctcgcccaagtgtgcgccatccaccacggcgagcaccgcgtccacgtcttcgcgggcggcttccgcttcctgcatcatgaattctcccaggcgattgcgcggcttgtgcaagccaggcgtatccacaaacacaatttgccagccctccccagcggccacgcccagaatgcggttgcgggtggtctgcggccgttccgaaacaattgcgaccttttcccccacgaagcgattcatcaagctggattttcctacgttggggcggcctagaatcgccacaaatcccgaatgaaactcacccattttggttttctccttgttgttccaaatcctgcggcccaaaagagtgcggcaaaagctcgccaaggggaaccacgtcgaacgcgccgcccttttgccctacgatcacgcgcatatccacggaaaattcgttgagcacctggcggcaaatgccgcacggccaggaatcgcccttttcccctacgatggcaatggccgtgaaacgccgcgccccctgcgatacggccacagagactgccgcgcgttccgcgcagattgtggccccgtaagaagcgttttcaatattgcagccgaggaattcgcgcccatcttcgcagcgcaagcaagcgcccaccttatagcccgaatagggtgcgtaagcattttccaacgcttcacaagcccggaggaacaggtgctcgtccagcggattgcgatctatgcccaattgttccatagcagcctcctccattgcgcgcattttttgacgctcttcttcctccatatggtcgtaccccaacaaatgcagcgacgcatgcgtcgcaagaaataccgcttcgcgcgtgatgctgtggccatactctttggcctgctgccgcacgcgctccagggaaagaaaaacgtcgcccaaattgggtttgccaaattccggatcataaacggcgttcagccgcttggggcaatcgcgcgcggtttttcccttggggtacgatacggcgggatagctcaaaacgtccgtcgcccgatcgatgccgcgcgtatcgcggttgagttcgcgcatttcctcatcggacactacgcgaaacaccgccgtgcaagggcgcacgccttccaaaccgcaacatgtttccaacgcgcggccaaaccatgtatcaagctttgtcatttgtctcctcgctgcgatgttcttcgcgatccaactgcggcacttcaatcgtggggtattctatgcgctcatggaatacgcccgccagcacggtttcgaatgcctcgcggattttgtccaaatcggcaaaggtcagttcacattcgtccaactgcccgtcttccatcttgccccgaatgatcttgcgcagcaaatcgcgcatctttgccgggttgggattttgcatggagcgttccgcggcttccaccgcgtcggccagcatcacaattgccgcctcccggctatgtggccgcggaccggaatagcggtaatccctgggatccagcttatcgccatacagcttaacagccttatcgtagaaatacacaaccgccgtatcgccatggtgcgaacggataatgtccaaaattggctctggtatgcgctcgcgctgggcaatttgcacgccatcgcgcgtgtgcgcaatcacgatcgaagccgacacgcgcggatccgtgcggtcgtgtggattgtcgcccatttggttttctttgaaatacagcggccgcttgagcttgcccacatcgtgataatacgcgcccacgcgcgccaacaggccattggcgccaatggcgctagccgcggcttcggcaaggttggccaccaccatcgaatggtgataggtgccaggcgcttccagcatcagccgccggagcaatggttgcgaaggattcgaaagttccagcagtttggccgaggtaaccaagttgaacatccactccatcagcggttgcaagccgatgcagaacatggcgctgagcaaaccgctccctgccgaccaaaggctgttgataaaaatgccattaagatccgtgttgttcacaaagcccatggcaatggcgatgagcatattggccacgccaatcaccaaacccgtcaagagcaccgttgtcctctgctggcgcttgcggaacacgatgaataccagcggggaagacagtatgggcgtgatcataatggagaacatcgccgccgtgaacagtccactcgaaccggaagccagcagcgccgccaccatggagagcatgatattcacgatgaaagccgtgctggggttcaccaaaatggccacgaggattacgcccgtggataccggcatcaaatacggcgtgattgtgcgcaccaggagcgagagaagcactgtgagcacacacacgatagaaagcatcaggagcaactt

SEQ ID NO: 58 - DNA, 32410 bp, Unknown
  16S sequences of unknown bacteria
ggggccggggtgtgccgggatgcgcggaaggtgcgcggcacgcgggaaccgggatgcgtggcacgcaggggcgggggtgcgccggggtgcgcggtgcccggagggtgcgcggccccgtcagggctgctccacgggcaggtgcatgagggcgtcggcctcgtcccaggggacgaagtagcccgcgccgtgcgagcagaacacgctgcccgcggggttgtccgtgtccgcgccgggatcgtaggcggcggacgcgacggcgggcgcggggtcgcggcaggggtcatagccgtcgggcaggagggagatctccccctcgccgtgggtgagcgcgcgcagggccgcggggtagtccatcagcgccgccaccgggccgcggcccgaaagccgcgcgcatgcgccctgcgtttcgggcgcgccgcagtccgcgcccatggcggcaaggtcggtcatcacgcggcccacatgctccgccggtacggtgagggaaaagcggtagtacggttccagcagcacacagcccgccttcatcagcgcctgccggatggcgcggtacaccgcctgccggaagtcgccgccctcggtgtgcttgaggtgcgcgcggccggagagcagcgtcacccgcacgtcgctgagcggcgcgcccgtcagcacgccgcggtgctcgcgctccagaacgtgcgtgcggatgaggctctggtagggcgcgggcaggtcgtccacatggcagcgggagtcgaaggtgacgccgctgccccgcgggccgggggaaaggagcaggtgcgcctcggcatagtgccgaagcggctcgtagtggccgcagcccacggcgggcgcggcgatggtctcgcggtagagcacgtggggcggcaaaaggcgcgcgtcaaggccgaagcggtccatcagcagccgcgcgagcacctcgatctgcaccgggcccattacccgcacggtggcgctggcgtgctccgcgtcccatgccacgcacagggcggggtcctcgtcctcaagaacgcgcaggcattccatcagccgcgtgggcggcgtgccctccggcggctccacgcgcacggccagcacgggctgggccggcgcgggcgagggcgcgaggccgtccggacgcaggatatcgccgcagcggggagcggtcaggcccgtcgcgcccaccacgtcgcccgcgtgggcctcgttggcgggggtgaaggccgcgccacggtagaggcgcagctggtgaatcttctctgtgccgccgggcaggtcaaaggcgtcgcgcgggcgcagcgtgcccgcaagcaccttgagaaagcacacgcgctcgcccgacgggtcgcggcgcacctgatagacgagcgcctcgggcgcgccgtccgcgggcggctccggcagggcgtcgctcaggcgcgcgaccgcgtccagcagctcgctcacgccctgcccgcgcagcgccgcgcccgaaagcaccgggaacgctccgcgccgggcaaagagcgccgcgagcgtgtcccacgcgtcgtccgtggagggggtcccttccagacagcgctcgagaaagccgtcgtccaggagggaaagcgcgtcgatgtccggcgcgccgtccgatacgggcacgagctgcggggcgaggcgctcccgcaggcgccggagcgcgtccggcaaggaaaagcccggcaggtccgttttgttgagaaacaggagcgtgggcaggccccgctccgccgcgagggcgaagagcgccgcggtgtgcgcgtccacgcgggcggtcccgtccaccaccagcacgcacaggtccgccgccgtcagcgcccgcgccgtctcggaggcgaaatcgacgtggccgggcgtgtcgatgagggtgaggcggcggccctgccacgcaagccacgcctgccccgaaaacaccgtgatgccccgctcgcgctcaatggggtccacgtccagcgcggtgtcgccgtgatcgacgcggcccgcccggcgcagcgccccggaggcaagcagcagctgctcgcacagggtggtcttgcccgcgtccacgtgggccatcaccgcaaaggtgcgcgccgcgctcatttgaacacctgaaaaatgccgcacttgaggtactgcgtctccggcgaggcgagcagaatgggatggtcgcgcccctgcgtgcgccattcgatctgccgaagctgcacatgcgcgtccttctgcgcctccagcagcatcccccggaacaggtcgggcgtcacgtgctggctgcacgagcaggtgacgaagaagcccccgtcccgcgtgagcttcatgccccgcaggttgatttccttgtagccgcgcagcgcgccctccaccgccgagcgcgtcttggtgaaggccggcgggtcgaggatgaccacgtcatactgctccttcgcggtctggtgcgcgcggagaaagtcgaaggcattggcgcactcgaagcgcacacggtcctccacgccgttgaggcgcgcgttttccagcgcgcaggcgcaggcgtgctcgctgatgtccacgcccgtgacctccgccgcgccgtagtgcgccgcgtgcagggcaaagctgcccgtgtgcgtgaagcagtccagcacccgcatgcccgacacaaacggcgcgatagcggcgcggttttccttctggtcaaggaaaaagccagtcttttggccctccttgacatccaccagaaagcgcacgccgttttcctgcatttccacgcgatccggcacctcgccaaagagcaggcccgtctgctggctcaggccctccagctcgcgcacgggcacgtcgtttcgctcgtagatgccgcgcggcgaaagttcctgcgccaacgcgtccacgatatcccccttgaaccgctccatgccaaggcagagaatctgcagcacgatcacgtcgccgaacttgtccgcgatcacagcgggcaggccgtcgctctcggcgaagatcagccggcagctgttcaggtccgcaaagcggcggcggtagtccagcgcgcgcctgacccgcccgcggatgaacgccgcgtcgatgggctcgtcccggcgggagaggatgcgcaggctgatctgcgagcgcggattgtacaccgccatggccagaaaccggcccgccgaggtgagcacccggacgggcaggccgtccgccgcgccgtcctcgcgctcgatatcgcttctgaatacccagggatgcccgccgagcacgcgctgctcgcggcccctgcgcaggtaaatattcatggaaaaaagcctcctcatgaaacggatatgggggcgccgcttccattataacacagaccggcggcttgaaaagatgcaaagtcgggggcgggacgtttccggcgcgcggcatgtgcgtgtggcgttttttgccggaccgtggtacaatggtgagccgaaagggggacggacgcatgcgcaatgtgattctgatcggcatgcccggatgcggcaagagcacggtgggcgtgctggcggccaaggccctgacgatggattttgtggacacggacctgctgcttcagcgaaaggccgggcggcctctgcagcggatggtggacgaactgggcgcggagggctttgcgcacgtggaggaggcgtgcgtgtgcgggctggaggcgcgcggcgcggtgatcgccacgggcggatcggtggccatggaggacgcggccatggagcacctgaaggaagacggcctggtgattttcctcaggctgccgctggagacgctctcgcgccgcctcaagaacatgaaaacgcgcggcatcgccatggagaaggggcagacgctgcgcgacctctacgagcgccgtcagccggcctatctgaaatgggcggacgcggtggtggacgccgaggggctgggcgtggaggagaccgtggcgcgcgtggtggccgccgtgcgcgagcgcgagggccagacgcaggagacggaagcggaaaagacagggaaacagaattaattatagaaagaaagcgggccgcgccgggagaggaggttgcttctccggagcggcccgcttgggggatgaatctgttttttggggggtggagggacgcaggccctccaatatgaaatccgaatcctgcgacatgtgcgacggattcggaagccttgcgcagcaaggtttcagaccgttgacaaatcttttttgggaggtttggagggcccgcaggcccgcaacctcaatcatcgcagcgggcgctggccgcgcccaccgctcgtttcggttgactccttcgggtcgctttgcgcttcgcgcaacagcccactgggctgacgcttccctccgtcccctccaaagtggattcgtatcgcccggcttttcccggtcgctcaatcttcgcggagggcgctgaacgcgcccaccgctcgtttcgctccccaccttcgggtcgctttgcgcttcgcgcaagtgcccacagggcacacgcttccctacggtgccgggcgggcggggagtttgcgcccccggcgcaaacatttcttaagcccttggcggaaaagatcgccaaaggcgagctttttcgacacgccgcgggcccgccgcgcgtcagcggtagcggaccttgccggtgagcaggcggatgcgcgccgcctcggcggggtattgcgcaatcagcgcttccggatcggaggcgtgctcgtagtcggagtcctcgtagccggggctcatggtggtgcccatgaggccgtagcgtccgccggggcagaggcggctgccctgccacgcgccggcggggaccacatgctgcacctcctgcccggcgcagaggtcgctccccagcaccgtcacccggctggtgccgtcgggcagcagctccaaaagctccaccgggtcgccgctgtagaaatggtacacctcgtcggtgcacagccggtgcaggtgggagtacccctgcccggtgagcatgaagtagatggccgagcccatgtcccgtccgtccaccttgccgggggagcggtagctggagcggaagagccccccttcctgcgaaagcggggtcaggcccagaatatcaatgatcttctgaatgtcgtccatgccctctcctccttacacgtccgcccagaccccgttttcccgggcgctgcgctccaccgcccggcacagatacgcaagccgcgccccgtcctcaaaggtggggaaatccccctgctgcgccgggaacgtccagcccagcgcggcatagtagcgcgcggccagcgtgataaaggtatcggtgaagccgttgaagccgaaggggtagagggcggtctgcaccccgctgcccttggaggcttcgtgcagggcggtgctggcctcgctgtcccaccacaggctgcggtttttgccggtgatttccaggctcaggcggttggtgcggccatgggacacctcggagaggaccgccgaaccgatggccccgcccgccatgcggaagtggaggagggcgctgtcctccgagcgcaccgtgacggggacgccctccgccgcttcgggcggctccatcatgccgtccttcaacatcctctgcggctgaaagcagccgaagagggcctgcacagacgtgatcctctcgccggtgaggtactccgccagatccagccagtgggtgccgatctcggtgacggcccgcatggtcccgcccacggcctcgtcataccgccagccatcgggggcggggagggcgtggaactcctgcagataggcgccgtggaccagaaacaccggcccgaaggccgggtcggccacccgcgccttcgcttcctgacaggccgggtgaaagcgcacgttcaggttcaccgcgcacgcaagccctttctcccgcgccagatgggccagctcgccggcctgctccgggtctaggcacaggggcttttcgcacagcacatgccggccgtgttccaggaggaatttgaccatttcataatgaagccccggcggggtgcagacgtggaccgagccgacggacgcgtccagcagcgccgctgggtccgtggaccactcgggaatcccccactgctccgcgaagtctctggcccctgcctcgctgtggctcacgaccgtgcggatggggatgccgacggcccgcagggccatggcgtgggtctgcgcgatgcctccggcgccccagatggctgcctgatgctgattcatggtgtgcgcctcctttgtacgccttcggtgtgtcgaaaaagtccgcctgcggcggactcaggttgttggcaaactttttttccgggaggtttggagggccgaagccctccaaagtggattcgtatcgcccggctttgccgggcgggcgggagtttgcgcccctggcgcaaacatttcttaagcacccgccggaaaagatcgccgcaggcgagcttttccggcgcgcatcagcgtttagatttccataatgatcggcaaaatcatggggttgcgcttgatcttgtcgaagatgtagcggtgcagttcgtccttgatgcggttcttcatgttctgccactcgctgccgtccacctggccgtagctgaggacgatgttgcgcgccagctcgcggctgcattcgatgatgtcctcgttctcgcgcacgtagacgaagccgcggctgatgatatccgggccggacaccagcgcgccgctgtcgcggtcgatggccatgacgacgataatcaggccgtcctggctgaggtgcttgcggtcgcgcaggaccacgttgcccacgtcgccgatgccaaggccatccaccagcacgccgcccgtgggcacctcgcccacgatggccaggctgtcctggctcatctcgatgacctgaccgatctccgggatgacgatgttttccgaccgggtacccagcgcctcggccagctccgcgtgctgccacagcttcgaatactcgccgtggatgggcaggaaatacttgggcttgaccagcgcgtgcaggagcttgatctcctcctggcaggcgtggccggagacgtgcacctcgcccagctggccgtagatgacgttggccccgcagcggtagagctggttgatgacccgcgccacgggcttttcattgccggggatggggtgggccgagagaatgaccatatccgtggggcggatctggagcttgcggtgctcgccgtaggccatgcgggtcaggcccgccatggcctcgccctggctgccggtggtgacgacgagaatctcctcgtcggcatagttttccagatcatcgacgtcgatgaggttttcctcggggatggacagttccccgatggacatggccacgcgcgtgacgttgaccatgctgcgccccacaaagcacacccggcggccgaacatcgccgccgaatccaccaccatctgcacgcggtggatgttggaggcgaacatcgccacgatcacccggcccttggcctgctggaacatgtcgatgaacgtctggccgatcttggtttcgctcatggtgtagcccttgcgctcgatattggtcgattcgcacaggaacgcaagcacgcccttcgagcccagctccgcaaagccggccaggtccgtcacctgcccgtcgatgggcgtatagtccaccttgaagtcgccgctgaacaccaccgtgcccgccgggcaggtgatcgccagcgccaccgcccccgcgatggagtggttgacgtgaaggaagcgcacctgaaaacagcccaggcggatcacgtcgcccggacgcaccacgttgagcggcacgcccgcgatgcggtgctccttgagcttgaggtccaccagcgcaagcgtcagcttggtgccgtagagggccatgggcacctgccgcagcacatagggcgtggccccgatgtggtcctcgtgcccgtgggtgagcagcatgccccggatgcgctcgcggtttttgatgaggtaggtcacatccgggatgaccaggtctacgcccagcatgtcttccttggggaagatggagccgcagtccaccaccagcatgtcttctccgtattcgacaacggtgatgtttttgccgaattcatccacaccgcccagcgggatgatgcggattttgtgttcgctctctgccattggagcctccttttgcgcgtcgtacagcgcctgtgatggggtccctatctggaggcggacgcgccatccggccgccgaccgcccgatcatttccggggcaagggctccgcacgcacgcaaaaaacacgcttcggaccgcgccattgcagcccgcgccggaaccggtgtatgaagggggcgcgaggtccccgccaaagcccacgaacccttatatcgttgttagtatatcacagaaaaggcattttgaacagcaaaaatgcaaaggatttcttcacagagtttgcgaagcctttttcgggcgggtttaccgaaaaaacggcgcgaaacggggtttctggccatctttcggccaaaaacgcccgtccgcgccgcgccgggacaaaaaaagggggcggcggggatgatttgccgccgccgacactcgcaaaaggctcaatggggaggtttggaggacccgcaggtccgccaaagtgaattcgtatcgcccggctttgccgggcgggcggggagtttgcgcccctgggcgcaaacatttcttaagcatccggcgaaaaagatcggcgtcagccgagcttttccgacgcatgacagccgatgtcgtcgatgtcgggcttgtcggggtagacggcgcagacgcggggggtccattcggggcgctggcgcaggcgaagctcgaaaaggcgcagcgcgacggccgacaggctaagcccgatggcgctgcccagaagcgcccacagctccatcccgcccgacaggctgtagcccaggaacaggcccagcagaaagcaggcgagcggcagcgcgtaggcgagggccgtggcccccaggaaccgcccgtcgggcagctccaccttgacccagtcgcccacggcgcagtcggccttcaggcggatggagcggctcttgccgccgccgccgcacgcgccgcacttggcgcacgcgtcgggccgcatgtaaacgatggtggcttctccggtcgttttgtcgtatgcctgtacctggccgaatttgatcatctctggcacgcctcctgacggccgcggggccgcatgaataagtaaaaaacggaacgaattttgcccatgcgtattgacacatgggctaaaaggcgctataatttaaacttgcatcagtatcgttactgtgcgaagccgcgcccgtccgttgttgagtattgtacatgccccggcgcaaaaatgcaacaggaaattttttgaccgggaacaggggaaagggacgcggctttcgcagcggatacacatgcgaggaacataaggggtgatggcatttatggtgcatgaggttcaaatggggaagctgaggaagcggcagagcttctcgcacatcgacgagatcctggacatgcccgatctcattgaagtgcagaaaaactcctaccgccgctttctggaagtggacatgcgcgaggtgctcgacgacgtcagtcccatcgtggactacaccgagaacctctcgctggagtttgtggactattcgctggacgagcccaaaaacagcgtggagcgctgcaaggagcgcgacatgacctatgccgccccgctgaaggtgttcgtccgcctcaaaaaccgcgagaccggcgaaatcaaggaatccgacgtattcatgggcgacttccccctcatgaccgagcatggcacctttatcatcaacggcgcggagcgcgtcatcgtcagccagctggtgcgctcccccggcgtatactacgaagatcagatcgacaaggccggcaagcatctcttttccaccacggtcatccccaaccgcggcgcgtggctggagtacgagacggactccaacgacgttttgtgggtgcgcatcgaccgggcgcgcaagctgcccatcacgctgatcctgcgcgcgctgggctacggcaccgatcaggagatcgtcgatctgctcggcgaggacgagcgcctcatggccaccctccagcgcggcgacaacgcccacagccgcgacgagggcctcatcgagatctacaagcggcagaagcccggcgagccgcccacccgcgagagcgcccagagcctgtttaattccctcttctttgacgccaagcgctatgacctcatgcgcgtgggccgctacaagttcaacaagaagttgtccctggccacccgcattcagggccaggtggcggacgccgacatcgccgatcccgccaccggcgaggtgctcatccgcgccggcgagaccatcagccgcgaaaaggcccgcgagatccagaacgccggcgtcaacaccgttgacgtgcgcctggacggcggccgcgtgcaccgcgtggtgggcaaccacttcgtggacgccgcccagtacctgcccttcgatcccaaagaggccggcgtgcaggagaacgtgctctaccccgtgctcctggagatccttgacgcctgcggggaggacgaaaagctgctgcgcgaaaccgtgcacgcccgcgcgcacgatctggtgcccaagcacatcatcaccgaggacatcgtggcctccatcagctatctgctgggcctgccctggggcctcggatttaccgacgacatcgaccatctgggcaaccgccgcctgcgctcggtgggcgagcttctgcaaaaccagatccgcatcggcctgagccgtctggagcgcgtggtgcgcgagcgcatggccattcaggacgccgacgaggtgcggccgggcgaacttatcaacatccgcccggtgagcgcggccatcaaggagttcttcgggtcctcgcagctgtcgcagttcatggaccagcccaacccgctggcggagctgacccacaagcgccgtctgagcgccctgggccccggcggcctcaaccgcgaccgcgcctccttcgaggtgcgcgacgtgcactacagccactacgcccgcatctgccccatcgagacgcctgaaggccccaacatcggcctgatcggctcgctggccacctatgcgcgcatcaacgaatacggcttcatcgaagccccctaccgcaccgtcgatccccagacccactgcgtgaccgacaagatcgtctacatgaccgccgacgaggaggacttctacaaggtcgccgaggccaacgagcccctcaatgaggacggctccttcgtcaacgagtacgtcaccgtgcgcgacaaggccgagatcatccgcgtgccgcgcgagaacgtagacctcatcgacgtcagcccccggcagatcgtatccgtggccacggccatgattcccttcctggaaaacgacgacgccacccgcgccctgatgggctccaacatgcagcgccaggccgtgccgctgctcgtgcccgaagcccccatcgtgggcaccggcatggagtacaaggccgcgcacgactccggcgtggtggtgctctccaagcaggacggcgtggtggagaaggtggccggcgaccgcatcgtggtcaaggataccctcggcgagcgccacacctacaagctcagcaagttcgcccgctccaaccagggcacctgcatcaaccagcgcccccgcgtcaaggccgggcaggtcatcgaaaagggcgacctgctggccgacggaccctccaccgagatgggcgagatcggcctgggccgcaacgtcctcatcggcttcatgacctgggagggctacaactacgaggacgccgtgctcatcagcgaaaagctggtcaaggaggacgtgtacacctccatccacatcgaggagtttgagtccgaggcccgcgaaaccaagctgggaccggaggagatcacccgcgacatccccaacatcggcgacgacgcggtcaaggacctcgacgaggacggcatcatccgcatcggcgccgaggtgcgcgccggcgacattctggtgggcaaggtgacgcccaagggcgaaaccgacctcaccgccgaggagcgcctgctgcgcgccatcttcggcgaaaaggcccgcgaggtgcgcgacacctccctgcgcgtgccccacggcgagggcggcatcgtggtggacgtgaagatcttcacccgcgagaacaaggacgaactctcccccggcgtcaacgagatggtgcgcgtctacatcgcccagaagcgcaagatcagcgtgggcgacaagatggccggccgccacggcaacaagggcgtggtcagccgcatcctgcgcgaggaggatatgcccttcatgcccgacggcacccccttgcagatcgttttgaacccgctgggcgtgccttcccgtatgaacctgggccaggtgctggaagtgcacctgggcatggccgccaaggccctcggctggcacgtggccacccccgtctttgacggcgcgaccgaggaggacatcgaggagctgctcgtcaaggccggcaagcgccccgacggcaagaccatcctctacgacggccgcaccggcgaaccctttgaaaaccccgtcacggtcggctacatgtacttcctcaagctccaccatctggtggacgacaagatgcacgcgcgctccgtgggcccctactcgctggtgacgcagcagcccctgggcggcaaggcccagttcggcggccagcgcttcggcgagatggaggtctgggcgctggaggcctacggcgccgccaacactttgcaggagattctgaccgtgaagagcgacgacatcgtgggccgcgtcaagacctacgaggccatcgtcaagggtaccaacatccccgcccccggcgtgccggagagcttcaaggtgctcatcaaggagctcaagtccctcgcgctggacatcaaggtgctggaccgcgacaagaacgaaatcatcatccgcgagctggacgacgacgatctggatatggacagcacgccttccgcgcgcctggacgaggagggcggagagagcgatcagcccgccgccgcgcaggaggacgggaagcccgaagccgccgaggaggatgtggaggtcgatttcagcatggacgacgagctggatgacttcgacatggatctgggcgacgacgatctggccgccatcgacctggatgatgaagacgataagcccaaggacggcgagtgatccgttgccgcctgacagaccgaaagggagtgccgcgttttgtttgacctgacaaaccttgattccatccagatcggcatggcgtccaccgagcagattctggagtggagctatggcgaggtaaccaagcccgaaaccatcaactaccgcaccctcaagcccgagcgcgacggcctttactgcgagcgcatcttcgggcccaccaaggactgggagtgcaactgcggcaagtacaagcgcatcaagttcaaggacaagaacaagatctgcgacaagtgcggcgtgcaggtcacccgctccaaggtgcgccgcgagcgcatgggccacatcaggctggccgcgccggtgagccatatctggtatttcaagggcatccccagccgcatgggcatgctgcttgacatcagcccccgcacgctggaaaaggtgctctactttgccaacttcatcgtgcttgaccccggcgaccccaacgagacgggcctgaaaaagcacgagctcatcaccgacgccaagtaccgcgagatcgaggcgcgctgcggcgcggggagcttccgcgcgggcatgggcgccgaggcggtcaaggaaatgctgatggagctggatctggacgccatcagcgagaagctgaaaaaggaaatcgccgagctggccgagaaggagcgcgaccgcgacaccgagggccagaagcgcgcccgcgcggtcaagcggctggaggtggtggaggccttccgcctgagccacaacaagccggagtggatgatcctggacgtgatcccggtcatgccgccggacctgcgccctatggtgcagctggacggcggacggttcgccaccagcgacctaaacgacctctaccgccgcgtcatcaaccgcaacaaccgcctgaagcgcctgcttgagctgggcgcgccggacatcatcgtgcgcaacgaaaagcgcatgctgcaggaggccgtggacgcgctgatcgacaacggccgccgcggccgccccgtgaccggccccggcaaccgggcgctgaaatccctgtccgacttcctgcgcggcaagcagggccgcttccgtcagaacctgctgggcaagcgcgtggactactccggccgctcggttatcgtcgtgggcccggagctcaagctctatcagtgcggcctgcccaaggagatggccctcgaactgttcaagcccttcgtgatcgagcggctggtgacgctcaagaaggcgcaccacggcaagaacgccaagcgcatggtcgaaaagggccgtcccgaggtatgggacattctggaagaggtcatcaaggagcacccggtgctgctcaaccgcgcgcctacgctgcaccgcctgggcattcaggcctttgagccgatgctggtggagggcaaggcgctaaagctccacccgctggtgtgtaccgcctacaacgccgacttcgacggcgaccagatggccattcacgtgcccctttcgatggaggcgcaggccgaggcccgcttcctcatgctggcgcacaacaacattttgaagccccaggacggcaagcccgtcatgtcgccttcgcaggacatggtcatcggctgctactacctgaccatcgaccgcccggacggcaagggcgcggggcgcgtgttctccagccccgacgaggccatgatggcctaccagctgggacagctgagcctgcaggcgcccatcaaggtacggctggagcgcgaattcaacggcgagaagggccgcaagatcatcgactgcacgctgggcctgctgctgtttaacgaggtgatcccgcaggacatcggccgcaagccccgcacgtgtcttgatgagatgtttgcgctggagatcgacagcctggtgggcaagaaggagctgggcaagatcgtagacgaggtctacctcaagcacggcattcacgagacggcccaggtgctggacaacatcaagagcctcggtttcaagtactccacccgcggcgcggtcacggtgtcggtcagcgacatcatcgtgccgcccgaaaagggccagatcctcaaggaggccgacgatcaggtggccgagatcaacggcctgtaccgcatgggtatgctctccgaggacgagcggtactcgaaggtcgtcgatatctggaacgccaccaccgccaacctgcgcagccggattctgccgggcctggacaagttcaaccccatccgcatgatgaccgattccggcgcccgcggcagcgcggcgcaggtcagccagctggccggcatgcgcggcctgatggcctcccccagcggcaagacgcttgaattgcccatccgcgcgaacttccgcgagggcctcaaggtgctggagttcttcctaagctcccacggcagccgcaagtccctggccgacaccgccctgcgtaccgccgactcgggctacctgacccgccgtctggtggacgtgtcgcaggaggtgatcgtgcgcgagtccgactgcttcgccgcccgcggcgaaaaggtgcgcggcatcaccgtgcaggagatcaccatcggcaaccaggtgatcgagagcctggaggaccgcctgctcggccgcgtggccgccgaggacatcgtcgatcccaccacgggcgagatcatcgtcgccctgaacgaaaccatcaccaacgatcaggccaaggccatcgcccgcgcgggcatcaagaaggcccaggtgcgcagcgtcctcacctgccgcaacgaaaccggcgtgtgcgcccgctgctacggcgccaacctcgctaccggcggcgccgtggatgtgggcgaggccgtcggcatcatcgccgcgcaggccatcggcgagcccggcacgcagctgaccatgcgtaccttccacaccggcggcatcgccagcggcgaggacatcacgcagggtcttccccgcgtggaggagctcttcgaggcccgcaagcccaagcgcgacgccatcctcaccgagatcagcggccgcgtgagccttggcgaaaacaagaagaagcgcgaggtcaccgtcaccagcgaggacgatccctccgagaccaaggtctaccagatcaactacggcagccgcctcaaggtgcaggacggccagcacgtcgaggccggcgcggagctgatcgaaggctccatcaacccccacgacctgctgcgcatcctgggcgtgaaggccgtgcaggattacctgctgcgcgaggtcttgagcgtgtaccgtcagcagggcgtgaacatctccgacaagcacatcgagatcatcgtcaagcagatgctgcgcaaggtgcgcatcgaggacagcggcgatacgctgctgctgcccggctccctcgtggacatctaccgctttgaggaggccaaccgccagaccatcgaaaacggcggccgccccgccatcgccaagcgcgtgctgctgggcatcaccaaggccagcctcgccaccgagagcttcctctccgccgcttccttccaggagaccacccgcgtgctcaccgacgccgccatcaagggcaaggtggacccgctgctgggcctgaaggaaaacgtcatcatcggcaagctgattcctgccggtaccggcatgaggcggtacaaggatatcgagctggtggagaatttctaaggaatatgcagatatacccccgccccttccatatggaggggacggggtttttgcgtgaaaggagaaagagagacagtaaatttatattcttgacgaaaatgttaaataaacgttataatggtagcatcatccatggaaggagtccaaatgatgaagttcttttggagaatgatgtattttgtactagttggactgatattttcaatgggtggaatttccgctgctatggcgcaaagtgaagcaccacaggtgacattgtcattcaataaagaatcggtaaatgtaggcgaagaagtgacggccagctatgaggtggttggtgggagtggaaactataggaattttcatttcaatatttcagcaataacgaggggagaacaggactacgcgctgtcgcataccatagcgtatgcagattttgagacacggagcggaaagctgacggcggtgccgaaatttggtcacacggtgatggcgagcctcagttttgaggatgaaaacgggcaaaatttctactacgaatctgaaaagatttcagtgcttggagatacgactgtttttccaacagcaaccataacttttgataagtacaacgtaaatgtaggcgaagaagtgacggccagctatgaggtggttggcgggagtggaaactataggaattttcattttgatatttcagcaatatcgagcggagaacaggactatgcgctgtcgcataccatagcgtatgcagattttgagacacggagcggaaagctgacggcggtgccgaaatttggtcacacggtgatggcgagcctcagttttgaggatgaaaacgggcaaaatttctactacgaatctgaaaagatttcagtgcttggagatacgactgtttttccaacagcaaccataacttttgataagtacaacgtaaatgtaggcgaagaagtgacggccagctatgaggtggttggcgggagtggaaactataggaattttcattttgatatttcagcaatatcgagcggagaacaggactatgcgctgtcgcataccatagcgtatgcagattttgagacacggagcggaaagctgacggcggtgccgaaatttggtcacacggtgatggcgagcctcggttttgaagatgaaaacgggcaaaatttttactacgaatctgaaaagctcccaatctccggaacgaccggaaccgtcactgattatgaagtgatcgagggcggcggcaatcctgcgtatacgggaagcggagctctgacgttccgcatcaatgcggattttgaaaaattccgcactttgcttgtggacgaccggccagtgccggaatcaagttatacggcatgggcagggagcacatatgtttccttgaaggaaagttatttggccaccctttccgaagggacgcatacgctttcagcgctattttcggatggatatgccgaaacaaccttcactattggaatccccgccgcagctactcctcccagaacaggagacgctgcaatgccctggctgtggctgacagtctgcctgctcgctggtgcaggatttttctggagcctgcgtcgaaccaaacagtatccataattctcatcttgcaagggcgtccgccccgtggttctctctccgtcagggttcgaggtccacggggctcctttttcttgtgcaaaaacggggtttcgtgctataataaagtgttgcgttgcatgcctttttgcgtgcgcgcgccaatccgccaaggggtgaaatgcattgaccaaccattacgacgcgcgaaacattcaggtgctggaagggctggacgcggtgcgcatgcggcccggcatgtacatcggctccacggggtcgcgcgggctgcaccacatgctgtgggagatcgtggacaacggcatcgacgaggccatggccggctttgccacgcgcgtggacgtgacgctgggccgcgacgggtcggtgaccgtgcaggacaacggacggggcatgcccgtcgatatccacccgaccatgggcgtgtccggcgtggaggtgatctacaccaagctgcacgccggcggcaagtttaacagcgagaactacgcctattccggcggcctgcacggcgtgggcgcgagcgtggtcaacgccctgagccggtgggtggaggtggacgtgtgccgcgacttccagcactggcacatccgctttgaaagcgcgtgggacgagaaggaaaagaaggtcgtggccgggcgcgcgaccgggccgctcacgctggtgggcaacaccaaggagcgcggctcgcgggtgcggtttctgccggacgaccgcgtgtttgagacggtcgcgttcaacgccgagaccgtcgcgcgccgcctgcgcgagctggcgtacctgaaccgggggctgacgatcacgttcctcgacgagcgcgagcccggcgacgacgaaaacggggaggcgaaggccccggagcgcgaggtataccgctttgacggcgggctggtggattacgtgcgctacctgaacgcggacaagaccccgctgcacgaggagccgatctatctggccgggcagcgggaggacgtgatcttccgggtggcgattcagtacaccgacagctacaccgaaaacgtgttttcctatgtgaacaacatccccacgggcgagggcggcacgcacgagacgggcttcaaggccgcctacaccaaggtgatgaacgacttcgcgcgcaggctgggcgtgctcagggacaaggacgcgaacctcagcggcgacgacttccgcgagggcatgaccgccgtgatgctggcgatggtgaaaaacccgcagttcgaggggcagaccaaggggaagctgggcaataccgaggtgcgcccgctggtggaggcgatcctcacgcagcagctgacggcgtatttcgaggacctgaagcatcaggagctggcccagcagatcatcgaaaaggcggtgcgggcggcgaaggtgcgcgaggccgcgcgcaaggcccgcgacgtggcgcgcaccaagagcgcgctggaggccgcgccgctggtgggaaagctgtccagctgcacggggcgaaagccggaacagaacgaattgttcatcgtggagggcgacagcgcgggcggcagcgccaagcaggggcgcgaccggcggtttcaggcgattctgccgctgcgcggaaagccgctcaacgccgagaaaaagcgcctcgatcaggtgctgggcaacgaggagttccgctccatcatcacggcgctgggaacgaacatcgacgagaatttctcgctggcggggctcaagtacaacaaggtcatcatcctctcggacgccgatcaggacggggcgcacatccgcgccattctgctgaccttcttctaccgctacatgaaggagctcatcaccgaggggcatgtgtacatcggcatgccgccgctctacaaggtgcaaaggggcaacaaggtgcaatacgcctacgacgacgcggagcttcgaaagctcacccgcgggcagaccaagggctacaccctccagcgctacaagggcctgggcgagatgaacccggagcagctgtggcagaccaccatggaccccgaacagcgaaagctgatgcgggtgagcatcgaggacgcggcgcaggccgagcggctggtcaccatcctcatgggggacaaggtggagccgcgcaggcagtacatcagccaacacgccaactttaaccgcgaggaccgtttcgaggccctcggcggcggcgcgggcgaagggagggaaagccggtgagccgcaggcaggacgaccgtccgcccatcggggtggaccacaacatcatcgtatcgccgatggaggaggtcatgcacaacagcatgatcccctacgccgagcacgtcatcatggagcgcgccgtcccccgcgtggaggacggcctcaagcccgtgcagcggcgcatcctctttaccatgaacgagctggccatcggccccgacacaccccaccgcaagtgcgcgcgcatcgtgggcgactgtctgggtaaatatcacccgcacggcgacagctcggtctacgaggcgctggtgcgcatggcgcaggatttcagcatgcgcgcgccgctggtggacggccacggcaacttcggcagcgtggacggcgacggcgcggccgccatgcgctacaccgaggcgcgcatgaccccgctggcggtggagatgctgcgcgacatcgacaaggacaccgtgcccttccggctcaacttcgacgacacgctcaaggagccggacatgctgcccgcgagcttcccgaacctgttggtcaacggggcgagcggcatcgccgtgggccttgcgaccaacatcccgccgcacaacctgcgcgagatcatcgaggccacggcggcgcagatcgacaacccggacatttcgctggacgagttgatgaagctggtgccggggccggactttcccaccggaggcgtgctcatcgacacgccggagctgcgcgccgcctacgagacggggcgcggaaagctcacgcttcgcgcgcgcacgcacatcgaggacgggcccgccgggcgaaagctgatcgtcatcaccgagattccctatcaggtgaacaaggcggcgatgctggagaagatcctcaagctcagcgaggagaaaaaggccgcgctgggctgcatctacgatatccgcgacgaaagcgaccgcaccggcatgcgcgcggtgatcgagctgaaaaaggaaaccgacgcggaaaaggtgctgtcctacctgctcaaatacagcgatttgcagatcaccttcggcgtgaacctcgtggccatcgccgacggcaagccgcgccagctctcgctccggcgcgccatcggctactacatccgccaccgcaaaaacgtcgtgaccgcgcgcacccgctacgagctggaccgcgcgctcgcccgcgcccacatcctcgaagggctgatggtcgcggtggacaacctcgacgaggtgatcgccctcatccgaaagagcgagaaccccaaggccgccaaggccgcgctgatggagcgcttcgcgctgtcggacgcgcaggcgcaggcgattctggacatgcgattgcagcggctgaccaacctcgaaatcctggcgctgcgcaaggagtacgaggacctcaagaagcgcatcgccgagctggaggccatcctcgccagcgaaaagaagctgatgaacgtgatcaagaaggagctgcgcgccgtggctgagcgctacggcgacgagcgccgcaccgagatcgtgcgcgcgggcgaggtggtggaggccgccgcgaaggaggagatcatcgccgaggacgcgctggtgacgtattcgcgcgcggggctgcttcggcgcgtgtatccgccgcgggcgcggcggcaggcggcggaggagggcgcggaggatgcgccgctgtaccgcttcgacacgcagaccgatcacacgctctacttcttcaccgaccggggcaactgctacccgctgagcgtggcggccctgccggagatgaagcccagggaccgcggcgcgctgctaaacggcgttttggccggccttgaggagaacgaaaccccggtgaacatcctgtgcatgaagccctcggagctggcctccgcgccggacctgctgttcgtgacgcgaaaggggcaggtcaagcgcacggcggcggcggagtacgacgtgcggcgcgcgaagttcgcggcgctgacgctgcgcgagggcgacgcggtcatgggcgtgttgccgctggacgcggcggcggatgtgctcatcatcagccgcagcggcatgagcgtgcgcttccatgccgacggcgtgcccacacagggccgcacggcgggcggcgtgaagggcatgaccctcgaacccggcgacgcggtgctctggtgcggccagccgcaggccgcggatcaggtatttttgatgacggaacgcggatttgccaagcgcgtgctgtacatggactttgagccgcaggcgcgcgggggcaagggcgtgaaggccttctatttcaacaagagcggctccaacgggacctgtgtggcgggcgcggcgctccttgccggcgacggcgcgggcgcgcaggtgcgcgtggagcagcgcatgagcccgccgacggtgctcatggcgcaggaagcgcccttgcagggtaagcaggacaagggcctgccgctggtgatggcgctgatggacgacgtggtgacggcggtggaaggcgcggcggagagcacgggggaggaaggctgagagaaagtgcggggtgcaggggcctcaggcctctgccggggtttggggcagcgccccaagccctgtgccgcagcacaaaatgcaagcgttgcgagcgcctgtaggcgcaagaaacgcggcgatgccggcggagagcggaccggaggccggggcgggcgcgtgaggctttgaggcattgaggccggggtgcggttgtgcgtggccggagcgcgggcgcgcaggccggggcggcgcgtgaggcgttgaggccgggcgcgggtgtgcgtggctggaacgcgggcgcgcgtccgggcggcgcgtgaggccggagcgcgggtgcgcaggccggggcagcgcgtgaggttgttgaggtcggcgcgcggatgcgggcacggttgccggagcggcgcgtgaggcgttgaggccggggcgcgggtgtgcgtggccggggcgcgggcacggttgccgggcggcgcgtgaggcgttgggccggagcggcgtgcgcgtggcgggtgaccggagcgcgggccggacgcgcggcccggagaaaggacggaatgcgatgatacgcagggcgcgggcggaggacgtggacgcggcggcgcgcatctatgaggcgctgatggaccgggaggaagccgggcagggcgcgacgaactggaagcggggcgtataccccacgcgggagacggcgcggcgcgcgcaggaggcgggctggctgtatgtgaaggaggacggcgcgggcggcatctgcgcgagcatgatcctcaaccacgagcagccgccctgctaccgggacgcggactggcaggtggccgccgcgccggaaaacgtgctggtgctgcacacgctgtgcgtggacccggcgtgcgccgggcggggcatcggccgggagatggtgcggtttgcgctttcgcacgcgcgggagacgggcatgcgcgccgtgcggctggacacctacgagggcaacgccccggcgcgggcgctgtacgcggggctggggttccgcctcgcggggcgcgccgacgtgctgcacgagggcgtgatcccggagacgctggtgctgtttgaaaaagaggtataaataaaaggaatggaaaaaaggcgcgggagcggcatggctcccgcgccttttgggtgctgggaaaagggctgggtgggggaagatgcgaacggatgccgcagagggcgagcggttcgagcggccggaggcgggaagggaagcgcgaaggattgagcaaccggcggcggttttcgccgcgcgctagcggtattccccgatgatccggtggctcagccacaggtccgggtcgtcctgcgcgagggcccacatcagcttgcacacggcggcttcggtggtcatgtccgcgcccccgcgcacgcgcgagggcgcaaggccgctggcgacctcgtagatgcccaggtcagccttttcgtagaggcactggctcaccaccagcacgcgcacgccgcttttggccagcgcgtccagcgcgcgcacgaggtttcggcggatgtagtgcaggccgcccagaccgaacgcctcgatcaccagcccgcgatagtccgcttcccgcacaaagcgcagcacgtccggcgaggtgccgggcacgagcttgagcagaaacacgcgcgggtcgatgccatcccgaaggggcaggtcctccgcgccgggcggcggggtgtagcgctggggatggccgaagtgcacgccctccacgtcgaaatggcccgcctgcggcgcgttgacgctggagaaggcgtccatggaggtggtgtgcgtcttgacgcagcgcacgcccgaaatcagccggtcgccaaagcacacgtacacgcccggcacgcccgcctgcgccgccgcgaaggcgcgcagaaggttgagccgcgcgtcggtgaggggatggttcatgggcagctgcgagccggtgaggatgacgggcttgcgctcgcccgccagcatgaacgacagcgccgccgccgtgtaagccatggtgtccgtgccgtgggtgatgaccacgccgtcgcaggttttgagcgcctcgtgcgccgcacgggccagcgcgcgccattcctccggctgcacgttgctggaatcgagggtgaacacgtcccgcgcgcgcacggactccggcgccgcggggccgagcatgcgcagcaggtccgccgcgcccagcgtgggctcaaggccgttcttgccgggcgtgcacgcgatggtgccgcccgtggccagcaaagtcagcatggcggattcctccaaaatgcgccgcggagaactcgcggcgcgggatggatagacagggggatgaggcaggaaggggggatgcgcacgggtgcgcgaggggcgcgcggggtgcgcgaggggcgcgaggggcgcgggtgcgcgaggggcgcgaggtgcgcgaggtgcgcgagggtgcgcgaggtgcgcgggtgcgcgagggacgcgaggggcgcgagggtgcgcgagggtgcgcgagggtgcacggggtacgcgggaggataggcgaggcgcgggccgtcgggcgctgcgggaaggggcgccggaagtccgcgcggttcgcctaccactccggcggggtgtagagcacgatttcacccgcggcgcgggtgcgattgaggtcgatcaggcgctggttgcggctgccgcggaagtccagctccagcgagcgctcggaaaggacgaacgggccgtccaccagcacgtcggtggcgtcaagcagcgcggccacgtcggggtccgaggcggccatgtcaaggagcttttcataggtatagccggtgtaggtccacacgttcaggccccgcgcgtgcgcacggcgcgccagctccgcgcacgccgccgcctgacagaacggctcgcccccggtgagggtcacgccgtccagcaggggatttttggaaaacttcgcttccacgtcggacagagaatagaccgtgcccgcctcaaagtcgtggctgccgggattgtggcagccggggcagtgatgcgggcatccctgcgtgaagatggacgtgcggaagcccggcccgtccacgatggaatcggtcacaaggccgtagaggcggatggtatcagtcatgcgaatcgtctccccgttgggttttgcaggagcccgcataggggcacccggcacagccgccgcagccgcggcggcggcgcaggcgcacaagcgcccagatggcccacgccagcagcgcggccagaatcaccagatccagcacaaggcccatcagcgcgcctcctcagccaaggcccagaagccgccccacctggaacaccagcgtggccgcgcaccaggccagcaccgtctgccccgccacggcgaaggtggccagacggccgctctccatctcgcggcgcatggcggcgtaggccgccacgcagggcatgtagagcagcacgaaggtcaggaacgaaaccgcctgcaacaccgtggggaacaccgcgtgcagggcggtgaccatctgcgcgctgtcggggtccacgccggcgagcacgctcagggtgctgaccacgctctccttggccatgacgccggtgagcaccgcggtggacgcctccaccgtgccgaagcccgccggggcgaacaccggcgcgatggcgccggcgatgacgccgagcatgctgtgcgccatatcgggcgcgggcgagagggtgaaggtgaagtactgcaaaaaccacaccaccatggtggccagaaagatgacggtgaaggcgcgctttaagaaatcgctggccttatcccacagctgccgggccacgttgcgcggggcgggcaggcggtaggcgggcaattccatgatgaagggcgcggcgtcgccgtggaaggcggtgcgcttgagcaccaggcccacgatgatggaaaccgcgacgcccgtgagatagaatgcgctcatcaccagcacctgatggccgccgaagaacgcgcgggtgaagagcgcgtagatgggcaccttggccccgcagctcatgaagggggtcaggaggatggtgaagcgccggtcgcgctggttgttcatgctgcgggcgctcatcacggcgggcaccgtgcagccaaagcccatcatcatggggatgaaagcgcgtccgttgaggccgagcttgcgaagcggcttatccatgaggaacgccgcgcgggccatatagccgctgtcctccagaatggacaggagcaagaacagaagcagaatcgtcggcaggaacgaaagcacgctgcccacgcccgtgagcgcgccatccaccagcaggcttcgcacccagccggccacgccccagcccgccagcgccgcgcccagcgcgtccacgccctgctgcaccagcgcggcaaagccgtccgccagccacgtgccgatcggcccgaaggtgatgtagaacaccagcagcatcatcaaaaggaacaccggaatcgcaagcagcggatgcgtgagcacccggtcgagccggtcggtgagcgagccgccctcctccgtggcgcgcgtgtagcaggtggagagcagcttttcgatgaagcggtagcgcgtatcggccatcaccgccgcgcgctccatgcccacctcccgctccatggcggtgaggatctcctcgatgatgtggcgcgtgtcctcgctcaggtccagctcctccatcatgggcgcgtcgccctcgaagagcttggtcgccgcgtagcgcgaggtcatgccgtgcgcctgcgccggctgctccaccagatgctggatcgcgtgcagcgccttgtgcgccgccccggtgcagatatccagcttcggcggggtgcgccggttctccgccgcgtccatcgcgcggcgcaccagctcgtccaggccctcgcccttgcgcgcgcagatcgccaccaccggcacgcccagccccttctccatggccgccaggtcgatgacgtcgccgtggctgcgcacctcgtccatcatgttgagggctaccaccacgggccgccccagctggagcagctgaagggtcaggtagaggttgcgttcaaggttggtggcgtccacgatgttgatgaccacgtcgggcttctcctggacgatgaagttgcggctgacgatttcctccatcgaataggggctgagggaatagatgcccggcaaatccacgatggtcacgtccgaatacttatccggcaccgcctgcccgttttcgtgcgcgcgccggaagcgccgcggcaggcccaggtgggtctgctggccgtgatgatggtgcagcatcgcgccggtctttttttcgaccgtcacgccgggccagttgcccacgtgctggctgctgccggtgagctggttgaagagggtggttttgccgctgttctggttaccggccaaggcaaaggtgtattgcatgaaaaagtcgctcttttctataaaagctgtcgttcggggggaaagaccggcgggggacgggctttgccggcggggtagggaagccttgcgaagcagggcttccgaatccaccgcgcgagtgcgggtacgtgagagacggggtatgtgcctcggttgctggcttgtggcgggagtgcggctcggcgcgggggattgacgaacaaccacggatgttggcagcgctttcaccggaaaaacgtcccgctcccaacggcgcgagcgtttcgagcgccattctggcgcaagaaacgcggcaggttgcatgcggcagctgtttccgccggaccaaccgctcgcaccagccgtcgggaggttcggagggctcacaggccctccgaatgcattcgtatcgcccggctttgccgggcgggcggggagtttgcgcccttgggcgcaaacattccttacgccgcttcccgcccgggagccctcagaaggagggcgagagggaagcggcgcaacccgtcggaaaagaccgccgcaggcgggcttttccgacgctcaccggagggtgatttttctggcgtcgtccaagcgcagagtcagggcgtagccgcgcaggtggatttccaccgggtcgcccatgggggcggttttttgcaggagcacggtcacgccgggcgtgatgcccatgtccagcaggtggcggtgaagtgcgtcctcgccgccgacggcggctaccacgccgctctcgccgggtttgaggtcggccagggttcgggtctccatgaaaaggaccacctttcaggcaggatgttggggccgtcagtccggcggcccggcgggcgcgggcggctcggcgtggttgtgctccagcaccgggtcgggggcccggtcctcctcgcgcagccatttgcgcagctcgtgctcgatgatgttggccgcgatgaactcgccctgctccaggcgcaggcgctcgcccagctcgcgcgcggccacgcggtacttcggcgtctcggtgaggtcgacgagggcgcgcgccaggcgcggcgcggtcagccggtcgcgcgggatggcatgcgggccgaggcccagcgcctgcacgcgcgtcgcccagaagggctggtcgccgccgaagggtaccaccagcgtgggccgccccgccgtgatgcccgccgccgtggtgcccgcgccgccgtgatgcaccacggcgctcacccggtcaaacagccagtcatgcggcacgaagcccgccacgtacaggttttccgccgggggcacgtccacgccgccccagccggtggacataaccgcgcgcaccccgctgagaagcacggcctcgcgcgcgatgtccagcgtctcggccatgtcgccggcggtcatcgagccaaagccgatatagacgggtttttcacccgcggcgagaaaatccgcgagcgccgggtccggctggtaggtgctctcgcgccggtccagccagaagcccgtcatgtggatgttctccccccagcgcgcgggccggggcataatcagcgggctgatggcatagagcaccggaatcaggtgcccgcacagctcatagcacggcgccgcctccagctttcgggggctcatgccgcgcgactgccgccagtcggagaggtagtatttctcaagcgtgctgatgagcaggtggcccagctgataggtcgccaggttccacgccttgcccacccgctggcccggcgccgacgcgatgggcgcctgcgggttggggtcgatggggaaatactgcgtctgcacatagggcacatgccgcatctccgccagggactggaacacctgcccgaaataggtgcccacgatggcctgcgcgtcctccgtggcggcctccagatcggcaaggaacggctcgataaactcccgcagggtgtcgcgcacctgcttgagaaacgccacgccattggctccgttcatcagattggccatgaaggttttcacatcgccgctgacgggcttgaagcccagcccctcggccttcacggcggaagcaaaattggcaaaggcgcagatggacacctcatgcccccggcgcctgagctcgcgccccaacaccaggtaggggcgcacgtcgccggtggagcctatgcagatcatggtgatgcgcatgccggatggggacctcctttcgggaaaaaaaggcgttttcgcctacacagtataccgcagttgcccgagaaaagcaatgcggagcgcggggcggcggacgggttcgggctcctttcggggagggggaggggatgcccgcgccggggcgcaaattttgccgggcattgaaatttgacgcacgtcattgtataataaatgtcgaatccggacaggcatatggagggaaacgagtgtacagactgctgatcgtcaccacgaaccaggctacaaaagacatgctggcctccatggcggggtgggaagcgctgggcgtcaagcccccgcgcgtgcgcgagacggtggaggacgccgtggagtgcatgaagaagcatcccatcgacgcgatcgccgtggaggatgcgcccgtctttgcgccgctggcggactatctggaccgacaggcgcccgccatgccggtattcgccatcgaggccgacgcaaaaacgcagctggaaacggtgcgccagacggtgaacctgctcacccgcctgcgtgccgacgactccaacgacgagtacgaccccgcctacatgatggaaaagcagcgcgcacgctggctgcgccgggtgatcggcgggctggagcccaccgcggaggacatcgtgcgcgggctgaagctgtaccgctgcgccatgcgccccggtgtgccctgcgtgcttgcccgcctgggcgtgcccgaggacgacggcttcatgaccgagcgctggcactacggcggcgagcgcctggaaatcgccctgcgcaacttcttcggccgcgagcacgggcatatgctgctgcgggtggcggtcgtctccccgcaggaggtgcgcgtgctgtgctatccccgcgacgaggccgaggggctgagcgaaaacgccgcctttgaatacgtgcaggagaccatcgagcagatcgcccggtacctgggccttgcgctgaaggtgctggaggtgcggcgcatcgccgggctgtgcgacttcgccgccgaaaacgacgcgatctgagccgccgcacgatttttggatgaaggagaggattcgccgatgggactgtttgacatggttcgcggccagctgattgacgtcatcgaatggaccgatgattcgagcgacacgctggtgcacaaatacgacatgaacggcaaggatatcatgatgggcgcgcagctcaccgtgcgcgagagccaggccgccgtctttgtggacgagggccggctggccgacgtgttcggccccggacgctacgagctgaccacccgcaacctgccggtgatgacggcgctgcgcgcgtggaagttcggctttaactcgcccttcaaaagcgacgtgtacttcgtttccacccggcagttcatggaccgcaagtggggcaccgccaaccccgtgatgatgcgcgacagcgaattcggcatgatccgcgtgcgcgcgttcgggtccttctccttccgggtcaaggaccccgccgccttcatgcgcgaggtgttcggcaccagctccctctttaccgccgagggcgtagagggccagattcgcagcctcgccgtgagcgcgctgagcgacgccatcgccgagagcggcatccccgcgctggacctggcgagcaagtacgacgagctttcccgccgcgcgctggaaaccctcgccccccgtgtggaggggctgggccttgagctgtgcggcttcgtgattgaaaacatcagcctgcccgaagaggtcgaaaaggccatcgaccgccgcacctcgatgggcgtggcgggcgatctgaaccgctacgcgcagttccaggccgccgaagccatgcgcgaggccgcggccaatcccggcggcatggccggcatgggcgtgggcatgggcgcgggcgcggccatggggcagatgttcgcgcagagcctgggcggcggcgcgggtgctgcgggcggcgctgctggcgtggccggggctggtgccgctgcgggtgccgctggtggcgctgcgggcgcggctgctgcgggcggcgcgggtgctgcgggcgtggctggtgcgggtgctgc

SEQ ID NO: 59 - DNA, 3958 bp, Unknown
  16S sequences of unknown bacteria
ggcactggatcatcacgccgctggattcttataccatggccagacccggccgcgccgagactgccttccgcagactctggaaaacgttttacgatgccattgccatccgagagcgcactaatctccgctgccagcgcagcaacctgcctctgtgctaccgcagtgacatgacggaatttcaggatgaatcctatttccaggtggaggacgaactgccgcctgtcccaaacgccccgtcactcccccgcaccgactaaggtgcgcagctgtttgagcgcccgtttttccagccgggaaacctgcacctgtgatatatgcaccactgcggcacactcctgctgcgtataggctctgaaatagcgaagcgcaatgatcgtgcgttctttttccggaagcgcttccaccgcctgacgcagcgccaacgtgcgcagcatagtttcttccccgtcctcagcgcgcaggatactctccaaggtcaacccctccgccgtctcctgctgcaatgattccggcgcagcggcggacagctccgcagcagcgatttcctctgcgctcagacctgtctccgccgccagctccgacagagcaggctcccgcccgaaggcaccgcgcagccgttcccgcacgactgcaatttgagcagcacgctgtttgagcgtgcgtcccaccttgatcgttccgtcgtcccgcagaaaacggcggatctcgccgctgattttgggaacggcatatgtagaaaactcggttccgaaggcttcatcaaaaccgcgcaccgctttcaaaaagccgaggcaccccaactgatacagatcctctgcctccactccgcgtccgcagtagcggcgcacaatgctccaaataagtccgctgttttcctcaatcagcttttcgcaggcgtcgttgtcgccctttccagcgcgccgcagcaggacgcgcatctccttcgtcattgcgcttcgccaccgcgcagcgcgattttgcgcttcatggtcaccacagttcctttgcccggtgccgagcgcacacgcagggagtccataaagctctccatgatggtaaagcccataccgctgcgctcctcccctccggtggtgaacatgggacggcgcgcctcatccacatcggctatacccacaccccagtcccgcaccaccaattccagtattccgcccgcatacagccgtgcctgaatgcggatacgaccgatggaatcggggtaagcatggacaatagcgtttgtcaccgcttcactgacggccgttttgatatctccgatttcttccagcgtaggatccagctgggccgcaaagcctgccacagccagccgagcaaacccttcattgctgcttttgctcaaaaaatcgatttgcattttgttttctgctctcacagcttttctgcctccttttcaatggtcacaacgctgccgatgctggcggcccgcagtacccgcatagcctggggctgtacatgagtcacgcgcatgcttccgcccagattctgcatccgtttatacaaccgcaggatcacggcaatgccggaagagtccataaaggatacaccagaaaaatccagcgtcgtccgcagcggcagagccacatccaaatgccggtcgatttccagcatgacttctttggctccgtgatggtccaactcgccgtgcagctgcagcgtcaggtcccggtcgattcgttttgcagtcactttcatcgttccactcccttttccttcgcggatcaaattcatgttttagtatgccgtgcataccgtccttgcgcggccgcgttttctcttccttccgatcgccggacagggccgctgcggtgtttctgcattccggagcgctcctccggaaagaaaaaaacgaggatactgcgtttttcacgcagtatcctcattttatcgcttattgagaacggagtttgtcgaagcagcgtgcagctgcggccttttttgccgtcaggaacgcatttgcgcggcgctttcttccagcttggcaatcagcgcacggtatttttccgcttgctggcgctgaccctccaccacattggccggggctttggacacaaagttttcattgctcagctttgcttcgatgcgtctaagtccttcctccgccttctccttttccttggcaatgcgcgccagttcctgctccacatccaccagatccgccagcggcagatagagcgaagcgtccgccgtggccagcgtcaccattccagccgcgtcagagggggcggcgtccgtcaccgtcaactccgacacacaggccagacgcttgataaaatgcgcgccctgagtatagatcgccggcgtatcggtgaccaggatcaacgccgccttgcgggatggcggcacattcatttcgctgcggcggctgcgcacggcattgatcgccgccatcaccgcctccatggcctcctcctcggcagaaaaatcaaattccgtctttgcctcgggccagggagaggtcatcaggaagtcgccgctgtggggcagcgcctgccagatctcctcggtgataaagggcatgaacggatgcagcatggccagcacctgctcccacacataacacagcacccgctgggcattctctttgctccgggcatcttcgccggtcagacgagtcttggtcagttcgatgtaccaatcgcagtaggtatcccagataaaatcgtacacattggctgatgccacgcccaattcataactgtcaagattcgccgtcacatcgcgaatcagcttgttcaggcggctgagtacccatttgtcctccagttccaactcgtctacgggcggcagggcgcaatcctctacggtcagattcatcatcaaaaaacgggatgcgttccaaatcttgttggcaaaattgcgcatggcttcgcacttctccacataaaaacgcatatcgtttccaggactgttgccagtgaccagattgaagcgcagagcgtctgcgccgtactgctccgccatttccagcgggtcgatgccgttgcccagggatttggacattttgcggcctttatcgtcgcgcaccagaccgtggatcagcaccgtgtcaaagggatattttttcatatgctcacaaccggagaagatcatacgggccacccagaagaaaatgatatcatatcccgtaaccagcacggaggtggggtaataatactccaactccggcgttttttccggccagcccagcgtactgaaaggccacagcgcactggaaaaccaagtgtccagtacatcctcgtcccgaatgagctgggtgctgccacaggcttcgcactgagtgggatcctcgcggctgacgttaatatggccgcagtcggcacagtaccaggcgggaatttgatggccccaccacagctgacgggaaatgcaccagtcgtgtacgttttccatccagttggtgtaggttttggagaaacggtcgggaacaaatctcacctcaccgtcattcaccacccgcagcgcctcttttgccagcggctccatgcgcacaaaccactgggcagagatcaggggttccacatcgttgtggcagcggtaacacgtgcctacgttgtgactataattctcaattttctcaatgaagcccgccgcctgcagatcctccaccacttttttgcggcattcatagcgatccatgccctcataggggccgccattggcgttgatttttccgttgtcgtcgatcacgcggatcgtctccagattgtgccgcagccccacttcgaagtcattgggatcgtgggcgggggtcatcttcacgcagccggtaccaaagcccatttccacatagtcgtcggccacgatgggaatttcacggttcataatgggcaggatgcaggtctttccgatcagatcctgataacgttcatcattgggattgacggccacgccagtgtcgcccatcatggtttccggacgggtggtggccaccaccaaatac

SEQ ID NO: 60 - DNA, 32759 bp, Unknown
  16S sequences of unknown bacteria
tctgtatgaactcttttatttccctaaagtgttgcacttaatagtataattcacccctgtcaaaaaagccccttcctgcctaaagcaggaaggggctccgcgccgccggttatttgactgtcagccgtccgttttccacgtccaccgtcagggtggcgccgggaagtacgtcgtcggcgatgattttccgccctatgagggtttccacctggctttgcaggaaccggcgcagcggccgggcgccgaactggggatcgtacccgttgtccaccacaaaggccttggccgccggggtgagcatacaggtcaactccttgtcggccagccgtttgttcaggccggccaccagcagatcgataatggaggtgatatccgccttggtcagcggcttgtagaagacgatttcgtccagccggttgagaaattccggccggaaggaacgccgcagcagcgcctccacctcttgcttggcctcctcggcgatggtgccgtcctcccgcataccgtccagcagactggccgaccccaggttggaggtcaggatgatgatggtgttcttaaagtctaccgtccgtccctgggaatcggtaatccggccgtcgtccagcacctggagcagcacgttgaacacgtcgggatgggccttttccacctcgtcgaacagcaccaccgcgtaaggcttgcggcgcaccgcctcggtcaactggcccccctcctcgtagcccacgtagccgggaggcgccccgatgagccgggaaacggagtatttctccatgtattccgacatgtcgatgcgcaccagattgcgctcgtcgtcgaacaggcattccgccagggtcttggccagctcggttttgcccacgccggtggggcctaggaagaggaaggagccgatgggccggttgggatcctggatgccggcgcgggagcggatgatggcttccgtcacccgggcgaccgcctcgtcctggccgatgacccgcttgtggagaatatcctccagatgcagcagcttatccctctccccttccatcagcttggataccgggatgccggtccagcgctcgatgatccgggcgatttcctcgtccgtcaccttgtcccgcagcaggctgtcggaatgggaggcggtctccgccagccgttcctcctcctccagctccttctgcagggcgggcagccggccgtatttcagctcggccgctttgttcaggtcgtagctttcctccgcccgctcgatgtcggcgttcagggcctcgatttgctcgcgcagcttctgcaccttaccgatggcggccttctcgttgtcccatttggccttcatggcgttaaactgctcccgcatctcggccagctcccgctggatttcggccagatgctcctgggacaggcggtcgctttcttttttcagggcggcctcctcgatttcatgctggataattttccgctggatgacgtccagctcggtgggcatggaatcaatttcggtgcggatcatggcgcaggcctcgtcgatgaggtcgatggccttgtccggcaggaaccgatcggtgatataccggtgggacagggtggcggcggcgatgatggccggatcggtgattttcacgccgtgatagacctcgtaccgctccttcaggccccggaggatggcgatggtgtcctccaccgtcggctcgcccaccgtcaccggctggaaccgacgttccagggccggatccttttcgatatactggcggtattcgtccagggtggtggccccgatgcagtgcagctcgccccgggccagcatgggcttgagcaggttgcccgcgtccatggcgccgtcggttttgcccgcgcccacgatggtgtgcagctcgtcgatgaacaggatgatccggccctcgctcttgcttacctcgctcagcacggccttgagccgctcctcaaactcgccccggtacttggcgcccgccaccagggagcccatgtccagggaaaagatggtcttgtcccggaggttcaggggcacgtcccccttgacaatccgctgggccagcccttccgcgatggcggttttgcccacgccgggctcgccgatgaggacggggttgtttttggttttgcgggacagaatccggatgacgttgcggatttcatcgtcccgtccgataatgggatccagctttttgctccgggcctgctccaccagatcggtcccgtattttttcagtgcgtcataggtggattccgggctgtcccccgtgacccgggtgttgccccgcacggtggccagcaccttcaaaaaggcgtttttctcgatgtggaattccttgaaaatatcccgcaccgtgccgtcgggatgctcaagcatggacaaaaacaggtgctccaccgagacgaattcgtccttcatgtgctcggcggtcttttccgcttcggtaagcatcacgtccatgggggcggaaatgtagattttgcctgcctcccggccggggccggagaccttggacaggctgcccagcacccggcgggcgcgggcggcaatatcctgcgcgggcagctccattttcagcagcagctggggaatcaggccctgatcctgttccagaagggcgatcagcagatgaacctcctccatctgcatgttctggttctctatcgtgagatcctgcgccgcctggatggcttccagggatttttgggtgaatttttgggcattcataaaacagccctcctcattcagatacataggattcagcaggccacggggcacttgcctaaaccttactatatccgatagatgtgtgcaaggttttgctaaattgtgacgaaattatgaattttagcactcgtttaattagagtgctaaaagttgtataggctctatcggagcttagcgaagggatgcggggtagtaccccgtattcctattgtgcctgtgagccgcccgcaccccttctttctttttcgtgcgtgaaaaagaaagacgggggagaaagaaaaagccttataaaaccatccggcggggggagacccactctctgcctcgcggcaacccctgtgtcgctgcgggcttcgatctcccgcaagggaaatacaaacttttagcgctcgtgtcgccataggtacgcccgctagttgccgcggtagcccgttctgctttctaccagccccgcctcgcgcctgcgtcaccacacgcaccgaaaagtcgggcgaccaactccccaggggctccgctgcacaaggagaacaaagagacaaagggggacgctctgcccttgccggtctcgccggcttaggccgccgagcccatacggagatccgtaaactagcggctaccttgtaggggcgagcatcgctcgcccgcagtgcggcgatgacgctcgattgatagggctcgccgtcctaagacagggagaccacacttgattgtacaacttgggtgatcgctcaagtatactacgcgcgtcagcgcgctcgtagcgcgggaaaaggacacgcttcccggcagataggcgctgttgcgaactatagcgccgaatatttttcaggatgtatttcctacatggggggtgaagaacggggcgcagcctcgttcttccagtgggggtctcccccacggcgcgatcgcaatctcaagcagataggacggaaaagattcgacgtgttcttttcctgcgcgtctgttggataaggctttttctttcttccccctctttcttttttcacgcacgaaaaagaaagagggggtgcgggagcggcacaggcacaataggagtacaaattcctaccccgcatacctacacaaaacccaatagagccatatatccacatagaaaaaagagcgccccgtaaggcgctctatttcttctcgtgtttgggaaagcgatccatcagctcctggaacagccgccggtcttccggctgcagctttcgaaagccctgaacaaagcggcgttcctccgggtgaatgagatgggtgtcttctcctggataaggatcggggttatcggtaaagccgatgagatagtccacggaaacttgaaaataggaggcaaaagtcttaagagtctccagatttggcaaacgcttcccgttttcataaccgcttaaagtggaaatagaaatagataactccctggcaaagcgttgtctggatatatttttttcacagcgtaattcccgcaaacgcagcatgcaatcacctattcaaaacgtgttatattcacactaacataacgcatattgaattattttcagaaacgagctattatattcgttaatgggttcaaaatgaaacgattgttaggaggcttataaatgatgacctatcaagaaatcctggactacgccgcgtctcacggctttgatataccggcggattgccgccgcctcatccgccaactgtccgccctttttctggtggacgagggtgagcgcctgcgcctgtatggggccaagcgggagggcgcgtccacctggggggcgcaatatggctttactttttatcgagataaccccccggtgtgctggtcggacctcctgcccgccgccgatacggtttgcccgcccgccgtttgcatcttttgcggaaaggcggccgatggcgtgctgcatcgcggcaaatggatatgcctggagtgtcaaaaagccatttccgaagagattttatagactatgctgccaaaatgcgctatactgtgcctataacggccggtatggcgcgttttttctggaggtgatccgggtggagcccatcggcctgtatatccatgtgcccttctgcctgtccaagtgcccctactgcgatttttattcctacgcggcctccgacgaggccatggacgcctatacggcggcggtggagcgggccctggcggattgggccgcccggatcggcgtcccggcggacaccctgtatatcggcggcggcaccccctccctgctgggcggcgcccggctggcccgcctggtggaggccgctcgccggggcttcggcctgcgggacgcggagatcaccttggaggccaaccccgctgacgatttggacgaaactctgcgggcctttgccgccgccggcggcagccgcctttccctggggatgcagtccgccgatccggacgagctgcggctccttggccgccggcataccaccgccgacgtggagcgcgccgtccgggacgccgtgcgggccgggctcgataatctgtccctcgacatgatgctgggcctgcccggccagcggccggaaaccgtcgagcgttcggccgccgtctgccgggagctgggggcgtcccacgtctcggcctatctgctgaagatcgagccgggcaccccctttgccgcccgggagctgtgtctgccggacgaggacggcgcggccgatttgtatctggccgccgccggggcgctggaagcccggggctacgcccagtatgagatctccaatttttcccgccccggccgggagagccggcataatttgaaatactgggatttgcagccctatctgggaataggcccggccgcccattcgctgctatctggccgccgctttgcctatccccgggatacggccgcctttctccggggggagcccccggtttccgagcagccggcgggccgggaagccgccatcagggagaacagcccggaggaatacctgatgctgcgcctgcggctgaccgccggcctgcgggcggacggctttgccgcccgtttcgggttcccccttcccgcccgctggcgtcagcgggcggcccgcctgcccgccgcgctggtgacggcggacgcggagggtatccgcctgacccgggagggcttcctggtttccaacgccgtcatcgctcgactgctggacgacgaataacgcaaaaggaggcgggcggcttctcccgggccgaaatcgcggaggggctggcggatgtccaccgcctctatgacgcctggcgcgcaaacacaaaaggctaaaaaattttttaaagactgttcatacaaatttgccaagaacttggtacactgtaattcatagggaaaccaaaggaggataccatcatggccggtggactgaaaatcatggtcgtcgacgacgacagcaacatctgtgagctgctcaggctgtatctcgaaaaggaaggcttcgaggcgatcatcgcccccaacggcgccaaggcgctggagatgtttgacacggaaaagccggatctcatgctcctggacgtgatgatgccccagctggacggctggcaggtgtgccgcgaaatccgcaagaagtccgcctgccccatcattatgctcaccgccaagggcgaggtgttcgacaaggtgctgggcctggagctgggggccgatgactatgtggtcaagcccttcgagaccaaggaggtcatcgcccgcatcaaggccgtcctgcgccgcagcggcgcggcggatcagaaaaagaccaaggaagtcagttacgacgggctgtacatcaacatggaaaattacgagctgcgggtgcgcggcaagcaaatcgataccccgcccaaggagatggagctcatctatcatctcgccagcaaccccaaccgggtctacacccgggatcagctgcttgatgaggtgtggggcttcgaatactatggcgacagccggacggtggacgtccacgtcaagcggctgcgcgagaagctggacggcgtgtccgatcaatggacgctgaaaaccgtctggggcgtgggatataagttcgaggtcaaggacggcgccgcaggctgaccgcttcctcccggcaggccggataaagaaaggacatgattcggagcatgttcaaaagcattttttccaaatattttaccgtcatgtccctggtgattgttgtcagcttcctggccatgggcggcatgcagctgttgttctccacccagtattggatggacgaaaagcgtaccctgctcatcgacaacgccgacgacatcgccaagcacacggcggtcaacacctttcaggtgagcaccgacgccaacgggaaaaagcagtacgccatccaggacgacaccctggccccggtgctcaatctgctgtccaccgctatccagtcccaggtgctgattacggataacggcggcaaggtgctcatctgctcggagggcagctcctgctcccatgtcagcggcacggtgcccctggcggatgtgcagggcaagacggacgatcagggccatttcttcaccgtcgggacgctgggcgacctgtacggcgcgcggatgtataccgccggcgcccccatccgggccaccgacaccggcgtggtcatcggctatgtcttcgcctccacgcccgccgacggcatgggcgcgtatattctcaacaacctgcaggtgtttctcctctccgccctgggcgtgctgaccctgaccttcatcgtgctgtatgccatgacctaccggatggtgcgccccctgcgccagatggcggccgccacccgcagcttcggtaacggggatttcagctaccgcattccggtgcacggcaaggacgaggtggccgagctggctaccgccctgaacgccatggcggtgtccctctcctcggtggaggggatgcgccgcagcttcgtggccaacgtgtctcatgagctgaaaacccccatgaccaccatcgccgggttcatagacggcattctggacggcaccattccggatgaaaaacggaattattatctgaaaatcgtgtccaacgaggtcaagcgtctttcccgcctggtacggtccatgctggatttgtcccgcatcgacagcggggagctgaaaattaatcccgtgcgcttcgatatgaccgaggtggtgtgtaccgccctgctctccttcgagcggcgcatcgacgaaaagcgcatcgatatcgtgggcctggaggattgcccccgcatggaggtgcagggcgatttcgacctgctgggccaggtgttgtacaacctgctggacaacgccgtgaagttcaccaatgagggcggcaccatcgccatccatctggagaaaaaggacggccgcgtctactgcgccgtgcgcaacagcggcgagggcgtgccctcccatgagatgccccgcctgttcgaacggttttataagagcgataaatcccgcagcttggataaaaacggtgtgggcttgggattatatatcgtgaagaccgtcatcaatctccaccagggagagattatggtgcggtcggtggaaggggaatacacggaattcgccttctggctccccgatcccgacggggcggagctgccaaaaaagcccgccgacaacgtgaaaaaaggcggaagtttataatttccgtacgctttcttcaacaaatcgacacaatctcccggtacaatagacccgtacaaaacggcccaccatcctgaaaggtatgtgatgcatatgtccaactggttcgacgacgataaaaaacaggagcagcagcccctgattacgccgcctcccgcgggctttgcgcccgacgagacggccgcgcccgccgacgtctcctcgccggaggaacccgccgccccggcggagccgaccccgcaggagccagccggcgaaaccccggccgccggctggcagcgcggcgattccgccgcctataccggtgcgcccgttactccgcccgcccagccggcggcccccacgtattcctggggcgcctcctacacccctccggcgcagagcgagccgaacaacggcccgatcccgcccgcgggcaattccactcccggctatcagccgcagagcggttataacccctacggctggaacgcggcgcagaccccgcctccgggcaaaccgcccaagaaaaagcggaacaaatccaacatcgtcatcgcggccttggccgtgatttgcggggcgaccatcatcactctgtcggtgctgctcgcgctgtccatggacaagaaaggcggcctgcccaccacatcgggcggcggaggcggcaccacctccaccacggagaatcccaacgcccccactctcaacttctctgacgccgacgtcaaggacggcggcctgaccagcaaggaaatcatcgataagaacctgaattccaccgtggtcatcagcatgtatgagaacgtgacctccggcggcttctacggcggcaccaccagcgaacagcaggcgggcggcgccaccggcatcatcatgaccagcgacggatatatcatcaccaactggcactgcgtcatcaacgaaaaaaccaaccgccagttcgcccgcatccaggtcaccacctacgacggcaccaaatatgaccaggccacggtgatcggcgccgataaagataccgacctggccgtcatcaaaatcaacgctgccaatctgaaagccgccgaattcggcgactcctcccagctgtccatgggcgaccgggtggtcgcgctgggcaacgccggcggcttggaatggtccgcgagccagggcatcgtctccggtaccgctcgggacgtgtatgacgacaccggctactccattaaatgcctgcagaccgacgccgccatcaaccccggcaactccggcggccccctgctcaacaaccagggccaggtcatcggcgttaactccgccaaaattgtggccgaaggctacgagggtctcggcttctccatcccgattaaggaagccaaggttatcatcgacgatttgctcaaatacggctatgtcaagggccgcgtgatgcttggcatcatgggcaacgaggtcgccacccccggctacgaaggcttcatgatcaactccatcaacgagggatccgtcctccagggcaccaaggctcaggcgggggacatcatcacccacgtcaacaaggtgcgggtcaccacctacaccgccatgcgcaccgagctgaccaagtacaacgtgggcgacaccatcaccctgaccctcctgcgggtggatagccgcaccggcaaaaccgtctccttcgacgtgcaatgcgtcttgggcgagagcaccgggaaataataactacaaaccaaaacgagcggccgtccgaagggcggctgctcgttttttgatccctgtatttattctacgccccgcttgtataggccccgtgtgatgccgtccatggccgcgccgccccggtggtaagcccgcgtcaggttttccacttcctctgggctttcggtggaaaagtgcagcagccagaagtccagccgcggcacctcctccagcctgtccgcccagtacagcgggacggaattgagcagctcggcgcagcctcccgcgcaggccagcgggaacgtcacaccccggcggtctgtcaggccgcaggcggcgttcggcgcaccctcgcagtgctggccggccgagcggcgggggcagttgcgggtcagcatcagcggctgccgtccgtacaccagcagcccgacgggcaggggcctgtccgccgcgaaggccgtctggcggaaggtcagctccatggacagggtggccgccgccagcccccgatcggcgaaaaaggccagcgcctccccgttagtgatattcagcccgaagccgcccacgggcagcagccccgcctcccgggccaaatcgatggtccccacgttgccgcacagggcgtaccgcgccccggcctgtgccgcccgcgccagcgcccgccgcgccgcctcctcggccccgaacagcccccgggggatctccacccccagcctgccgtcctccgcgtgccgacgcagcagatcctccggcacggacagcggcaggaacacccgatccgcctcccccgcaccggccagctgatccggacgggccagccgggcgataagcagcggccgcgccggcttatccgccagcgccggccgtctttccggcaccgcctcccggttgaaggggaccggccgcggccgccctcgttcctccagcagctgttccagcgcctgccgccgcatggcgttgagctgggacagcggcaggctcagcccctcgtccatccggcagtgcacggcggcgcgaaagggggtgccccccgtcttgcccagctgggcggccgcccgttccgcgtccagcgggcggttcaccgctggctggggcggatcgcccgccaccgtgacggttcgtccctcgccgtccgccgccgtcagcgtggcttcgtcggctgtcatggcgaacgtcagcgtcaccggcacccggcccgtctccttgtcgtacagccgttccagcctggacagcaccggggcagcggcctgcacgtcctcccgcctccgagtgccgaacatcccgccgccacgctgatcagcgtaatacccatcagtaaaaccggagcgggaaaatactgcctgtaaatctcctgaaagccccggggccggcgcttccccccgcaccgccgctcggtataccgagactgccgccgccacgtattccggccgcttgagccgcccctcgattttcagcgagtccacacccagcgccgccagatccgcgccgtatgcctgcagggacagatcccttaggctgagggccgcctctccctcccgggcgcgtcgcccgctgtccgccgggacgaagggcagccgacagggctgggcgcagagtccccggttgccgctccgcccgcccagcatggcggacagatagcattgccccgacacgcacatgcacagcgcaccgtggacgaacacctccagctcgcagccctgccccgcacaggcggcgatttcgtcccgggacatctcccgcgccagcaccacccgggagaatccgctgtcccgcagaaaccgcaccccagaaggggtgtgacaggacagctgggtggacgcatgcagcgccatgcccggcgccgccgcccggattcgccgggccagccccacgtcctggacgatcagcgcgtccactcccagcacacaggcctcctccgccaccttcagggcggcgtgcagctcatcctgccgcaccagggtgttgagagtcagatgcaccgccaccccccgggcatgacaataagacaccgcctcccgtaaggcggcggtgtcaaagttgtgagcgccctgccgggcattgaaggccgatgcgccgagatagaccgcgtccgcgccgcagcgcaccgccgcccgcagcgcctcgggcgagccggccggcgccaggatttctggcagccggttcactggccgcctccgacggccagcttcttctgcagctcctgtatctcccggcgcagccgctcaatctcccggtgagagctgtcggccgcctggcggtaccgggcgttgtcgtccagatagtccttcatctgcgcccgcaggttgtcggcggtctcctccgctttattggccgcgtccgccttgaccagcgcggtcatcaccgccgccatcaccagggtgatgcggtcgtcgctgttcatcagattgcgcatttcggcgtccagctgcgcgcccagctcttgtatgtagccctccggctcgtcggtggtaaaggtatactccgacccacagatattcagccgtactttattggtcattcccattaaacttgtcctgcctttcccgcgcgccatgcgtcgtttttttcattataccacaaggcggcgcggagcgtcgccctccttagtccgaaacggctttgaccgtttcggagtggttcaatgttctctcaggcgtccaaaggcttgcgctgcaaggctttggagaacgccgtgaggttattataccacaaagcggtgcgcaaggcgcagcgccttccttggtccgaaacggctttgaccgtttcggagtggttcaatgttctctcaggcgtccaaaggcttgcgctgcaaggctttggagaacgccgtgaggttattataccgcattcggccgcgagaaggaagggcgccgcgccattttttcgctattttttgtccggcgccaccaggatggcctgccgcccctgctcccgccagcgggcgaaaaacaccgcgcggccataggttttccttcccgccagcggatcgttgaccgtcacggtgtccgcaccgtatcccgtcagcaccaggcagtgctcgttgcccagccattcgattttttcgtcggtgtacgccccgtcctccagcaggtaccaggaggaactgcctttctgcgtgggcgccatgttcatggtcgcccagatgcacacggggtatcccgcgtcgacggcggccagtaccgctccctcgtcctcagcctccagcagataaacggacgcgccgccgcccagccggtcgatctcccgctgcattgccgcggccaccgggtcggcgtataccccgtacccctccgccgaaaagggatcccccgcgtacatgtcgcggggatcggggccgtatacccgtccgtcccgcttttcgaaaggggcccgggggatggcccgcgccatctcctccttggaaacggcatagccgtaggcgccgagcagcatggccgccgctgtggcctcgcacccggcgggaagctccggcttctgaagtagtacgggcaccgccggcatgtcccgccgatccaaaccggcggggtcgtcgagaatccccggccccggggaaaacagccgccctaaagcgggcagactgtccctgttcagcgtcagcatcgccagcgccgcggccgccagcaccgccagcagccccagcccaatcgtccgtccctttttcggcatggccttctcccccgtctgttggaataccgtcagtataccacagccgccggcggatttccgccctttttgtcggactactcgtgtctatgggccgttctaaccaggcgatcggccgccagcacggccaatacgttgagaagcaaggtcagaaatatttttccggcaaacggtatgtatttcataaaaatctccatatcctttatgtatgagcatagggtctctgtcctcaccataccggatttttcgggcgaagtccatgggagattgctggaaaccccatggtgacaaaattgttatggagaattttgccgcagccgttgcaaattctgtaaaaaaccggtactatattgaacagagaacgtgtaaggaaaaggagcgaacagcatggccgactgcatggaaaaggactggtcgttcaccgggtcggacggcgtccataccctctacgccaccatctgggagccatcggagggcgagccccgggcggtgatccagatctgccacggcatgatggagcacatccgccggtacgaccggtttgccagggccctgtgcgatcgcggcttcgtggtgtgcggggacgatcacctgggccacggccgcaccgcggagcagccggaggatctgggctatttcggcgaaaccgacggctggaagcatatggccgaggacgagctgcttctccggcgggagatgcagcgccggtatccggacaagccctattttctgctggggcacagcatgggctccttcatcacccgccgggtcgtcgccctggacggcgaggggctggcgggctatatctgctgcggcaccgcgggacgcaacccgttgaccaagctgggcatcggcctggccggtatcgtcacggccctgcggggccccaagcgcaccggccggtttctcaacgccatggcgtttcagaattataaccgccgcttccccgaggacgacaacgagctggcctggctctcccgggataaggacggataccccgacgcgtcggaggatcccaagtgtcatttcgtgtttaccaacgcgggcttccgggatctcttccgcctgctcgacagcgtcaccggccccaagtggagcgaccgggtgcccaaggatctgcccatcgtcctgttttccggagagatggatccggtgggcagctacggcaagggcccgcggcaggtgtacggctggctgaaagcctccggcgtgcgggacctctccctcaagctctaccctgacgcccggcacgagctgcataacgagctgaaccgggatgagttcctggaggatgtggtcgcctggtgcgatcggcatatggagggcggcaggcaaccgctgccgcggaaaggacaagacctatgacggtatatattcaaaagttggatccccgcgcccaggcgcccgagcgggccaccgccggcagcgccggggcggatttgcacgccctgctggacgaagcgctgaccattccgcccggcggccgtgccgccgtgcccaccggcatcgccatcggcctgccctcccccgagacggtgggcctggtctttgcccgcagcggcctggctgtcaagcacggcctcgccctgtccaacggcgtgggcgtcatcgacagcgactataccggggaaatccgggtgggcctggtcaacctgtcggacgaagcctataccatccagcccggcgagcggattgcccagctggtgattatgcccgtctgcctgccgcacatggagcttgccgactccctgaaggaaaccgagcggggcggcggcgggttcggctccaccggccggcaataaggagaggggccctccccttaagacggccacccccatcaacaaggcccggcagcgcgatagcgccgtccctggcccggaaaggataggaaggttccattgaaagcgaaaaacagcctgattctgatatttctcgtcctggccgccctggtcatcgccgccctggtcggccagctgaccgccggggtcagcttcctcaaatggctcacctggggcgaatccgtcggcttcgatacggtgaacctgaatctgattatcgtgcagataagctttgcctttaaaatgcaggtcaacgtgctgcaggtaatcctggtaagcgctgccctgctgctgtataagaaggtgagataaggcgtatggctatgcctctgctgctggcgtcggcctccccccggcgcaaggaaattctcaccctgctggatatccccttcgaggtgtgccccgctgtgcgggaaagcgcccctgccggcctgcctcccgccgaacgggtgcaggccctggcccggtgcaaggccgaggaggtggccgccgcccatcccaatcgcctggtggtgggggccgacaccatggtcgtcctggacggccacgccctgggcaagccccgggatgaggccgaggccgtggagatgctgctgtccctgcaggggaaaacccatgtggtgatgaccggggtgtgggtctgctcgccaggtaaatgcggcggatttgtggacgccgccgaggtgacgttctatcccatgacccgggaggaggcggccgcctacgccgccaccggggagccgctggacaaggccggcgcctacgccatccaaggccggggcatgcggttcatccggggcatccgcggggatttctataccgtgatgggcctgcccggcgcccgtctcgcccgcttcctggccggtaaggagtagccgacttttccccccgcggacaggcccgcagggaccgaacggcccctatcctctttccattgtcaataaaaaccaaagtttttgtaaaaattttggtttacccagttgagaaatttttttcagcagtatataatatatgggttaatagccaaatatataaaatagcggtacgagccgggaaccctttcacatacagtagtccggtcgggacttcgccctgccgcggcccatcggggaacgcgcggcggcaggttggttggagacggggaacgcgccccgccggggttggacccgcaaggaaaggaagaggaaaagatgtttttcagtcgggatatcggtatcgatttgggcacagccaatacgcttgtgtatatgcggggcaagggcatcgtcatgcgcgagccctccgtggtcgctgtggatgtgaagaaggaggaggtcatggccgtcggcagcgaggccaaggagatgatcgggcgcacgcccggatccatttccgctgttcgtcctctgaaggacggcgtcatcgccgattttgaggtcacctccgccatgctgcggcactttatcaaggccgccctgcacagcaccctgttcaaccgtccccgcctcatcgtctgcatcccctccggcgtcaccgaggtggagcgccgcgccgtggacgaggccgcccgtcaggcgggcgccaaggacgtggagttgatcgccgagcccatggccgccgctatcggcgccggcctccaggtggaggaagccgccggctgcatggtggtggatatcggcggcggtacctccgaggtggccgtcatttccctaggagatatcgtcacctcctgctcggtgcgtaccgccggcgacgatttcgacgaggccattatttcctacatcaagaagaagtataacctcctcatcggcgaacgcacggccgaggacatcaagatccgcctgggctccgccttcccctatgacgaggaggagagcatggacgtcaagggccgcaacctggtggacggcctgcccaagaatatcaccgtcacctccgaggaaatccgcgagtccctggccgatccggtcagcgccatcgtggacgccatccgctccaccctggagcggacgccgccggagctttccgccgacatcatcaacaacggcatcatgctcaccggcggcggcgcgctgctgcgcggtctggacgtgctgatcaaccgggaaaccggcatgccggtgcacgtggccgaggatccgctggactgtgtggttatggggaccggcaaatgcctggatctcggtatggtcagcaacttccgttccaaccgcagcaaataaggaaccggagccttccgtaaagcggaggctgaaacggataccaggcctccgaaaccgacgttttcggaggctggtttgttaaggtgagggggagcgaacaacctccgatttttgggggagcgagcgcccacagcggcgttggcctctcttgccatgcgacagcatggcgcgatcggccgccttgctgtgaacccccgctccgtcccaaaaattctttgacctcaaccggctgaggcggggtgggttcgctcccctcaccttaagaggggatgagtttgctccccctcgccttatggcgggaaaccgccgggattatccaaacacagggaggctgccgtgaaggattttctgaaaagcttcgcctttaaggtgctgggcgttatcgccctgatactggtgggcgtgatgatttacggagcgtcgactggggggctggccaccataccagccaccatcgccggcgccatcatcaccccgctccagtccgccgtgaccagcgtttcggacgggatcagcggctttttcggccagtttggcagctccaaagaaacccgggaggagctggaacaagcccaaaaggagctgcgggagctgcgcgagcaggtggtggactacgacaaaatgaaggaagaaaacgagtggtacgccaagattctcggcctgcatgagcagcattccgactatacctttgcctccggcaaggtcatcgcggtggatcccctcagccccttcggtaacttcaccatcaacgccggcaccaaaagcggcatcgccgtgggcgatccggtcattaccgccgagggcctggtgggcctggtcagcgaggtcagctttacctcctgcaaggtgcgcaccatcctcgatgtcaacaccaaggccagcgccatgatcagccgcaacggcaacaccgccatcaccggcggggctccgcctctggcggaaaagggtctcttacggctgaacacgctggagaaatcgtccggcgccgccatcggggacatcgtggtgacctctgggcggggcggcgttttccccgaggggctgctcatcgggaaaatcaccgaggtgaacccggagtcggacggcttgtccctgtatgcgatcatcgagccgtatgtcgatgtccgctccctgaaaaacgtcatggtcatcacctccttcgacggacagggcgaggggagctgaaccatggacaatcaacccaagctgaatgaaaagaaccccctgcaccggctgagcggccggtatctgaaatggacggcctacgggctgctgatcctgggcgccgggcttttgcagatggcgccccgcgtttttcccgccgtgttcggggcccggcccctgctgctgattcccatcgtggtgagcatcgccatgttcgaggggccggtgggcggggcagcggccggcatcgccggcggcctgctgtgggatttgtacgccgaccgcctttttggcttcagcgccctgttcctgatggctatctgctgcgcctgcggcctgctggtgcggctgctgatccgcaacaacctgctctccgccatgctgctgttcagcggcgccttgctgacgcaggggctgatggactggttcttcaattacgtcttgtggatgaaggaggacccgctgtacatgctcgggcggatgctgctgccggatatggcctatactctggtggtgtcgcccctgctgtacgggctgaccctcttaatcgccaaaaccctgcgcaagcgggactgacgccggccctttggccggagaaaggagccaccctctatgatggcggacaacaagggcaaccgtatgagcaaacgccgttcgttctttatagccctgctggtcatgacggtcttcggcatctacgcgctgcgtctttttcaaattcagatcgtggagggggaagcctacaacgagctggccacccgcaaaatggagacaaaaatcagcatcgccgcctcccggggcgaaatcctggatcggtatctgcggcccatcgcggtcaatgccaccagcaacgcggtgctgttcgattacaactattttccccggggcaccgacgacgggcagcagaagctgcagaacgacatcattctgcgcctcgtcaccctgctgggggaggcggaggagacctggaacgacaccctgcccatcacccggaaggcgccctatgcctttgaggaggagcgggatgccagcatcgccgccctgaagaaaaacctgaacatggccgactacgccacggcggaacactgtatgaaggccctggtggaggcctaccacctcgccggttacaccgccgaggagcagcgggctatcgcgggcgtgcggtatgagatgagtatccgggacttcaccgcccagaacgcctatgttttctcctccggcgtctcccgggagaccatgtataaaatcatggaaaacaacacggaatatcccggtgtggacgtgcaggccacgccggtgcgcaaatacgtgcagggggacgtggccgcccatctgatcggccaggtcggccccatttacgccgaggaatacgaggaactcaaggaaaagggctacgcccttaacgacaaggtcggcaagggcggcatcgaggccgccatggaggacagcctgcggggcaccaccggcacccgcaccctggtcaaggacgccaagggcaacgtcctggaggaaaaggaaaccaaggcgcccgtccccggcaaatcggtggtgctcaccatcgataccgacctgcaggccaaggtgcagcagattctcaaggccaagttcgaggagctgcgggccaagcccgccaccaagggcgggaagtttgccgacaacggccacgatgtcaagagcggctcggtggtcatgctggacgtgtccgacggcggcgtcctggtctgcgccagctggcccagcttcgacctggccacctatggcgagaactacgccgagctggtcaaggatcccgacaagcccctgttcaaccgggccctgaacggcgcgttccccttcggctccaccgccaagcccgcggtggccctggcggctttctccaaaaatgagttgaccccctctacccacattacctgcgatcgccggtaccggtactatgaggattatcagcctacctgtatgggaaggcatggatccatagacgtggccacggcgctttccaaatcctgcaatgtttttttctatgataccggccgacgcaccggtattgacacgattaacaagtttttcaacctgtttggcctgtgccaaaagaccggtgtggaaattggggagtctccgggctatctggacagcccggaggccaaaaagaaccgaggtgacatctggaccggcggcgataccctccgggccgccatcggccagaccagtaacgtgacgcccatccagctggctacctacgccatgaccctggccaacgacggcgtgcgatataagacccacctggtgcacagcgtgcgcagctacgacggcctgaccgacaccgtggtgcagcccgaggtggtgtcccgggccgacttgtctaaggaagccatcgacaccgtgcgcaagggcatggtggaggtggtcaagtcgggcaccgcttcccggttcttcaacaagggcaatctcccgtataccctggcggccaaaaccggcaccgcccagattgtggaggggaaaacggataacggcatcttcatcgcttacggcccggtggaaaagccagaggtggccgtggccgtggtgatggagcagggcacctccgccgcctccagcgaggtggcccgccaggtgctggacgcctattttgccggcaagacggccggcctggcgcccaccccgcccgcccagctcctgccctgagcgcccggcctgtaactttgcacaagaagccctgccggaattttttcgttccggcggggccaaaatggtttacttgacggtaaaactgtgctatactggctacaagagcggctaatttttacacggttttggctgtatggttatgcagttatatcaagcgccgaacgggcttgcgaacaggtgcgtccacgggccgcccggaaaggattcggttgacctatggggctggtaagcgttgtcacatcgggaaaaggcggcgctggcaagtccaccgtgacggctgggctgggctgcgccctggccaagctgggccatcgggtgctggtggtggacaccgacgcgggcctgcgcagcctggatttgatgctgggcgtgggcggcagcacggtgtacgacatggcggatatttttgcgggaaactgcgaacctatacgggccatttatccctcccccgtctgccccaacgttttcgtggtgcccgcgccggtcagctttgaaaagctgtgtacgccgcaggatatgaagcgtctgtgccgcggcttcgcccggtactacgaccatgtaatcatcgactgccccgccggcctgggccgggggtttgaaaccgccgtcgcggcggcggagcgggccctggtggtcaccacgccggatatggtctgcgcccgggacgcccaggtggtggggcatctgctctttgcccgggatctgcccgcccggctgatcatcaaccggctgcggccctccctggtgatgcggggggccatgcccgacgtggacgaaatcatcgacaccgcgggactgcagctgatgggcgttctgccggaggacgagcaggtggcggtagccaacgccaacggccggcccctgcccgacgcctgtaacgcctcctcctgcttttccaacatcgcccgccgctatctgggcgaggacgtgcccctggcgcggctggaaaagatgtagaggctgttcggaaaagcaaacggggcgcatcccgcccctctgccatatgaaagaaggagtgactgtatgaatatcgcgttgattgcacacgacgccaaaaaggaactgatggtccagttttgcattgcgtactgcggcattctcagccgacataatatctgcgctaccggcaccaccggcaagatggtggcggaggcgaccggcctcaatattgtgcggtatttgagcggctctcagggcggcgatcagcagatttctgcccgcatcgcctgcgatgaaatcgacctgctgctgtttttccgcgatcccatgacggtgaaatcccatgagccgaacgagaacgacatgttccgtctgtgcgacatgcggaatatcccggtggcgaccaacatcgccacggcggaggtgctgattcacggcctggagcgcggggatttggattggcggaacattgtcaatccggccaaccggtaatttgtaccgggggaacggggcggctccctgaaaaagacgcacgaaagtgcgtcttttttcgatacaaagagcattttaccgcacgccccctcgcacaaatccgcatagtagtgcccattttcaaaccaaaagaaacggagttttcattatggaactgatcaccagagccatccgcggcacccaggacgtgctgccggcggacagctacaagtggcagcacgtcgaacagaccgccctgtccatcgcccgggatttcggtttccgggaaatccgcaccccggtgttcgagcacaccgagctgttccagcggtcggtgggagagaccaccgacgtggtgcagaaggagatgtacaccttctctgacaagggggggcgttccatatccctgcggccggaggggacggcgggcgcggcacgcgccctgctggaaaacgggctgcacaacggagctctgccggtcaaggtgagctatctgacctcctgctaccggtacgagaacccgcaggcggggcggctgcgggaattccaccagttcggcgtggaatgtttcggcgcggcggcgccccaggcggacgccgaggtgatttccctggcgcatatggtgctgtccaccctgggggtgccgggagtcaagctgtatctcaattccatcggctgcccgacctgccgggccaagtatcacgcggcgctgaaggcctattttgagagccggaagggcgagctgtgtgagacctgcctcgggcggctggaaaagaaccccatgcggattctcgactgcaagtcgccggtctgctccgccgtggcggcgggggcgccggtgatcctcgactatctgtgtgaggagtgcgcggagcatttcgaaggggtgaaggcctgcctggacgcggcggagatcgcctacgacatcaacccccgcattgtgcgggggctggattactacacccgcacggtgtttgaattcgagtccgacgcgctgggcgcgcaggcggtggtctgcggcggcgggcggtacgacgggctggtggaggagctgggcgggccgcacctgccgtccctgggcttcggcatggggctggagcggctgctgctcatcatgaaggccaaggagtgcgccttccctcagccgccggtgtgcgagctgtatctcgcccccatgggcgcggaggcggccagacgctgcttcgccgtcgccacccgcctgcgggaagggggcgtgtcggtggaatgcgacattgccggccgggggctcaaagcccagatgaaatacgccgacaagctgggcgcccggtactccatggtggtgggcgacaacgagcttgccgccggcaaggcccggctcaaggacatgaaaaccggggagcagaccgaggtggcgctggacgacagcctgtacaccaccctgtacaaccggtcgctcgaccgccagctggcggacatgacggacttgttctccgaactggcggaaaccggcgaataacgggacgggcggcgctccggccctggaaaaaaggaatggtcaaccatggcagaaagcatcaagggactcaaacgcaccgcgtactgcggggacttccgggcggaacacgagggccgggaggtcacggtgttcggctgggtacagcggcagcgggatttgggacagctgatattcatcgatctgcgggatcgcaccggcatcatccagctggcctttgacgagggcaccccccgggaggcatttgacaaggccttcgccgcgcgcagcgagtacgtgctggcggcgaagggcgtggtgcgcattcgcaccgcgaagaacccggacatccccaccggcgacgtggaaatcgccgtgagcgagctgcgggtgctgggcaaggcggaaacgccccccttcgaaatcgtggagaactgcgccaccgccgaggccacccggctgaaataccggtacctcgacctgcggcggccggatttgcagcgcaacctgctgctgcgccaccggatcgccaaggcggcccgggattatttcgacgcgcaggggttcatcgagctggagacccccatgctcatccgctccacccctgagggggcgcgggacttcctggtgcccagccgtctgcatcctggcaccttctacgccctgccccagtcgccccagttatacaagcagctgtccatggtggcgggcttcgaccggtacatgcagctggcccggtgcttccgggacgaggatctgcgggccgaccggcagccggaattcacccagattgacctggaaatgtccttcgtggacgttcaggacgtgctggacatcggcgaaggcttcatgaaatatgtatatgacacggtgctgcatgtggacgtgcctctgcctctcccccgcctgacctacaacgaggccatggagcggtacggctccgacaagccggacatccggtacggcatggagattgtggatttgtccgaggcggtaaggggctgcggcttcggggtgttcgcctccgccctcgaggggggcggcacggtgcgggccctgacggccaagaacgccgtgagcgtgctgacccgcaaggaagtggataaactcaccgaatttgtccgcggcatcggggccaaggggttggcctgggtgcgctggaccgaggaaaacatcgcctcctccttcggcaaattcctcaccgaggaggagatgacccggctgctgaccgccgcgggggcggaaaagggcgacgtggtgctcatcgtggcggacacggtgaaaaagcacgtgctcaccaccctgggcgcgctgcgggtggagctggccaacaagctgtccatcgagaaaaagggactgggcctgctgtggattacggccttccccttcttcgagtgggccgaggagagccagcagtacgtcgccatgcaccatcccttcaccgcgccgctggacgagtgcatcccctatctcgacagcgagccggacaaggtatatgccaaggcctacgatttggtgctggcgggggtcgagctggcctccggctccattcggatcaccgatccggagctgcaggggcgcatgttccgggcgttgggcctgtccgacgaggaggctcacgagaaattcgggttcctgaccgacgcgttccagtacggcgcgccgccccacggcggcatgggcatcgggctggatcggctggtgatgcagatgctgggggccgcgaccctgcgggacgtggtggccttccccaaggtgcagaacatgaccgagcccatgacggcctgcccctccccggtggacgcggagcagctgacggagctggggcttcaggcttgcgccaaagaggaataaaggcggggtgatgcggcgcgggcgcggcatcacccccctggtgtatcggcgggaaatttcggcgggccgggacgtgcgttccccgcgtccgccggggttccgcttaaaaaacggcccggaaaggaaggattttatgcaggttcgatttgtaccggcggcgacgccggagcggattgccgctgtcgcggtgctggccgataaggtgtggaacgagcattacacggggctgctggcccccgcgcagatagcctatatggtggacaagttccagtcggcgggggccatcgcccgccagatcgcgcaggagggctaccggtatttcctgctggagctggacggccgggcggtgggctataccgccgtgcaggccgcggaaggccggctgttcctcagcaagctgtacatagaaagggaagcccggggacagggcgcggcctctcaggcgctggcgttcctcgaggggctgtgccgccgggagaggctgcgcgccatctggctgacggtcaacaagggcaacgcctcgtccatcgcggtgtacaagcactggggctttgagacggtggacacccaggtggccgacatcggcggcgggttcgtcatggacgattacatcatggaaaggccggtggagggcgtagacaaggacgccgcccggctgccgctgcggccctttggacgcaccggggccatggtgtctccgctgggcttcggcgccatgcggatgccgacgacggcggacggggccatcgacgagccggcggccatcgggcttattcggcaggccatcgacgggggcgtcaattatgtggacaccgcttacttttatcacgacggcaagagcgaggggctggtgggcaaggcgctgcgggacggataccgcgaaaaaacctatgtggccaccaaatcgccgctgagcctactgcatacggcgggggatttcgatcggattctggacgagcagctggagaggctcggcctcccctatgtggatttttacatgtttcacgccatcaacaggcaggcctggcgggaaaaggtgctgggattcgggctgatcccccggatagaggcggcccgggcggcgggaaaaatccggtacatcggcttttccttccacgacgacaacgacgcgttccacgaaatcgtggacggatacgattgggatttctgccaaatccagtacaactatgtggacgtgaacaatcaggccggtaccgaggggctggagtacgccgcaggcaaggggctggccgtcattgtcatggagccgctgctgggcggcaagctggcgctgccgcccgaaggggtgcgccgggtgctgccggaggagaaaacgccggtggaatgggcgctggatttcatctgggatcggcccgaggtcagcctactgctcagcggcatgggaagcgcgcagcaggtgcgggacaacctcgtttacgcctcccgcagcgggaagggaatgctgaccggggaagagcgggctctgttcgcgggagccaaggaagcctacgacaccatggccaaggtgccctgcaccaaatgcgcctactgtatgccctgccccttcggggtggatattcccggggtgttcgacgcctacaaccgctccgccttttcgcaggaggagggggaagcgcggtacgcggccctcgagggaaaggcggagctgtgccgggcctgccggaaatgtgaaaaggtctgtccgcagcacattgtcatcagtgagcggctgctcgaggcgcgacaggcgctagatagggttgataaccaccagtgagattggaaagaaccgctcgccggccacaaggggggccggcgccccgcctacggggacgcgcttcttcccaggtgatccgaggcgcttgggggcgacggagtgggctgggtagataaccaccggtgagattggaaagaaccgctcgccggccacaaggggggccggcgccccgcctacggggacgcgcttcttcccagttgatccgagaagcttggggggcgacggagcgggctgggttgataaccaccagtgagattgggaagaaccgctcgctggccggcttttatgtttccagaaagaacggggttgacatgacgaaacgggatcggtttcccatggcggaaaccaaaaaaatggcggtaggaggtctgctgatcgcggtgggcattctgctgccccaggtgttccatctggcgggaggcagcgccatgggcaccctgttcctgcccatgcacctgccggtgctgctgggcgggtttctgctcgggccgctgttcggcgggacggtggggctgctgacgccccttgtcagctgcctgctgaccggcatgcccgcggcggcggtgctgcccaccatggcggtggaactgctggtatacggtctggcgggcggggcattttataagcaatgccggctgccggcgctggtcagcctggtgctggcccaggcggcgggccggctggtcaaggcgctgctgctgttcgtaatggcgggggtgttcggcgtgaaagcgccgccggcattgtcggtgttcaccgccgccttggaggggctgccggggctggccgttcagtgggcggtcattcccctgttgctgacggcgctgcgcaaatcccatctgctggaaagcccggcgaagcgaaaaagggaggcggccatgagcgattgggagttggccagaagccggtgggaggcggaaaacgccacctgcgcggtctgccgaaacgggcaggtgcgggtatcccatctgaccgggatacggccgctgctcgcctggctgggcgaggatggggacgccctgcgggacggggcggcagcggataaaatcgtgggaagggcggcggccctgctgttcttgtacggcggcgtgcgggcggtatacgcggccgtcatcagcgagggcgccctggccctgctggaggaaaacggcgtgcaggtggcgtacggccgctgcgtgccgtacatcatcaaccgggagaacaccggcctgtgccccatggagcagcgggtgcgggacatccgggatcccgcggacgcctacgaggctttagcggcccaggcgggcgggcaaaccgccccatgagactgacgacacagacaaccgaaggaaagacaggagatttatgacgtttcaggatttgcaattgatcgcgccgctgcttaaggcggtggcggaggagggctataccacgccctcccccatccagcaaaaggcgattccgcccgtgctggccggccgggatctggtgggctgcgcccagacggggacgggaaagacggcggccttcgccctgccgatactgcagcggctctgcgcccagccgctgggactgggcaagcggcccatccgggcgctggtgctcacccccacccgggagctggccatccagattctggagagcttccaggcgtacggccggcacacccgactgcgctgcagcgtgctgttcggcggtgtgtcccagaacccgcaggtggaggcgctggcccgcggagtggacatcctcatcgccacgccggggcggctcaacgatttgatcggccagggctatgtccacctggacgatgtgcagacctttgtgctggacgaggccgaccggatgctggacatggggtttgtccacgacgtcaagcgggtgatcgccaagctgccgatcaaaaagcagaccctgctcttttccgccaccatgccgccggaaatccggcagctggtggattccctgctggtggatccggtgaaggtggcggtgacgccggtgtcttccaccgtggacgccatccggcagtcggtgtattttgtggacaaggccaacaaacggcggctgctgacatatctgctgcgggacgggggaatctcctccgccctggtgttcacccgcaccaagcacggggcggatcgggtggtcaaggatttggagcgggacggcattcacgccatggccatccatggcaacaagtctcagaacgcccggcaggcggcgctgcgcggcctgaaggacgggagcctgaaaatcctggtggccaccgacatcgcggcgcgggggatcgacgtggacgagctgtcccacgtgatcaattacgatttgcccaacataccggagacctatgtgcaccgtatcgggcgcacggggcgggcgggcgcgtcgggcgacgccatatccttctgcgatttcgatgaaaaagcctatttaaaggacattgagaagctgaccaggaaggccataccggtggtggaggatcatcccttccccatgcaggtgttcgagccggcgcccaagccccagccgcgaccgccccgccgagacaaggcggtcacgccggaaagggacgggcagcggggcggcgtccatcccgcccgccgcgggccgggcaagccgccggtttcccgccggggctaacccaaaaacgacggatgggaaaaagacacgtttttaacacaaattaccgttcatatttatggcgtccgggacgatactaggattgcaaacgcaaatatcatcaacgcggccttaccgccgccattatttgaggagtgtaaaaaacgatgtctaacaacaaatctctcgttcccgaagctcgcgaaggtctcgaccggttcaagatggaagctgccagcgaggttggcgtgaccctgaagcagggctacaatggcgacctgaccagcaaacaggctggttccgtgggcggccagatggtcaaaaagatgatccaggcttacgagcagaacaacctgaagtaagaactgccgaacaaggcacagccgcccggaaggcaatcgccttccgggcggtttcttgcccggcgatacgggtagtatgcccgatggtgaagaaaaaatcggcggcgacgcgaataaacccgcccggcgcggggtaaactccttccggagcggaaaaacgcaggcgatttttataagaaaaacgcttgtacctcttgacaaacgggaaaaatccggtataataaataacgctctaagatattgcggaattgtgtaatggtagcacggcagtctctgactctgcttgtctgggttcaaatcctagttccgcagccataaaaagaacacgcacggcgttagccgtgcgtgttctttttataaccggccagtctaggatttgaacctgttcaacatccggttccgcagccatgaaaagaacacgtacggcgttcagccgtgcgtgttctttttataaccggccagtctaggatttgaagcctgtttggtgtcgatgcaccccacaggcatccgcatagcttcttattttatggaatacggttccggaagttcgggggtgctggagaataaaaacggcggttacaataagatcataggtagacaggacgacataaggtgagggggagcaaacctaccccgcctcagccggtgtatttagccattccgccgcgttatcgtcctaggtgggcgccagcccaccgtcgtcctctgccttgccgaatgacaaaatacgcaggctgaggtcaaagaatttttgggatggagcgggggttcacagcaaggcggccgagcgcgccatgctgtcgcatggcaagtgaggccaacgccgctgtgggcgctcgctcattcccaaaaatcggaggttgttcgctccccctcaccttaagcaaagggcggccccgccggctacggcggggccgtcctttatcgattctctgcgacttcgcgggcggacaagaaaaatcgcgggttacgcatcctgtgccagttccacgatgcgggcccaggtcagggggccgaccgcgccgttggcttccaggccggcctgctgctgcacggcccgcacggcgttttcggtggcgtcgtcaaaatcgccggtgacggtcacggcggggataaaatcgtgaagggcggcggcctgggcgagcaggcgctgcagatcttccacatcgtccccggtcatgcccagggtcaggaagcgaccgggatacacgaacgcggaatcgggaaccacatccggcgggatgttggcgatagtgtcggcgtaagcagtgttcatccggttccaggtgtcccggtcgacgatgccggtggccgggagaccgtactggcgctggaaagccagcaccgcgtccttggtgttctgatcgaacacaccgtctatgataggaacggggatttgattgtcgaagtaggcgataacggccaggatgtactgcacgacccgtacgcccatgccggtgtctccctcttcaagctgccgggagtacagccgctccacctcttcgggggacaggccctcggaatacagctcgttgagacccttgatgccgttgtagatggatttgattttgtaccaggtggccttgcctacgatgccgtccaccgtcaggttgaaaatccgctgaaattcccgcacggccgcctcggtttccacaccaaaaaaaccgtcgatgaccgacagacgggggatggccgggtagttatcggcgatgcggttgagctgccgctggatgatgcgcacatcctcccccgcgctgcccaggcgaagaggcgcgccggg

SEQ ID NO: 61 - DNA, 32759 bp, Unknown
  16S sequences of unknown bacteria
gtatcccacaactccattgatcttctttggacaatgtttccacatcattctgcccacaattatcataatcgttgggataaaacaatcacatatcaaaatgaaccaccaaaaccacatactgtttcctcctcaaatctcgatatcgagcggcttatcgatatcctccgatacatatttcccgttctttctccgctgtctcacgcattcggtgagaaggtactctatctgcccgttgacagagcggaagtcgtcctccgcccacgcggctatctcagagtacagcttctcagacaggcgcagcggtatctgtttcttctccgccatccctgatcaatacaggcttccggaattgaccaccggctgagcgtcatggttgccacagagcacgacgagcaggttcgagaccatagccgccttgcgctcctcatcgagctcgaccgtattcttctcgctgagcctctcgagagccatctctaccattccgaccgcgccgtcgactatcatctttctggcgtcgattatcgcggacgcctgctgacgctggagcatcacggcggcgatctcgggcgcgtaggcgagataggttatccttgcctcgattatctcgagtcccgcgctcacgaccttctgctggatctcgtcgcgtatcctcgaggcgacgacatcgctcgagccgcggagacttccctcatcggcaataccgtctccggtcgtgtcgacgttcggcgcgacgtcatacggatagatccgcacgatattcctgagagccgagtcgcactggagcgacagatactccttgaagttgtcgacgtcaaacaccgctttcgccgtgtcgacgaccctccagatgaccgcgatgccgatctcgaccggattgccgaggcagtcgttgatcttctggcggttgttgttgagcgtcatcatcttgagcgatatcttgttgttgatctgtacctctccggtggaaaccgacgctccgcttacgttgattatgctcggcgcggacgtaccgacgtcgccgctctggttgagcttcgtcttagccgccggattgaccgatgtgcagaacgggttcacgaagaagaatcccggctccctgagcgttccgacatactttccgaacagcgtcagcacgagcgcctcctgcggcttcagcaccttgagcccgaggcagaatatccacccgagcagcatccagagcacagctatgactatcagcagaatcccgccgaccgggctgaccgcgctcacggctacaccatcgtaatagtacccgctgttctccaccatcacaattccgacgataagcagcgcgatcgacagtatgtacgccagtaccgtcagcagcagcaccggcattccccggcgcgccttctcaattcttatctctttcaaaacaaatccctcccgtgatttatgttggtatcattatgatatcatattgagccggatttgtcaagtgctttttgaaaaattccatgtaaaacatacgcaattcacggaacacacaaacaaatccttgacttttcccatataataagctataattatatatacagcagccgcgggggaggatcatatgaaaacaataaactggaacggagaaacattttacgggtctaccccgaaaaaccagaacaccttcttcgaggtgcatatgtgcggtcacaccccgcccaatccggactatgagatgttcaggtatgacaacattgtacacgtctttgaatatgtcgtgtccggaaaaggtattatcgagaccaaggaatcgcgcgcgagcgttgaggcgggagacttctacctgctgaaaaagggcttcaccggacactaccgcgccgacccggacgacccgtatgacaagatatgggtgaacgtcagaggtgagctcgtcgaccgcctctgcgagatatacaggatataccagccagtcactgtgatacactgcgcggacgacacgataagccgctgtataacggaaatacatggattaatggaagagtgcggccccgacgatcaggaggaggttatgcgcgtctgctccgtccggatcatggaaatcctgtctgtcgtcagaaacagtgaaatataccgcgacagcttcaaggcggcgtcaacggctgagatggtgaaggactgcctcgacgcgcacatatacgatgacatctcgctctccgacatcgcgaagctgcacttcatgcacgagtcgaccataatccgcaaattcagccatgaatacggcatgacgccaatgaaatatctgaactccataaggataaacgccgctaaaaaaatgctccacgactcgataccgataaagcagatcgcgtcgatactgaggttttcggacacatcgtacttctcgctctgcttcaagaaggaaaccgggatatctccgacggaatattacaaatcggtattcggatggcgcaaataaattacaagctcttgcaaattttttatattgacaagctggagccttagtagtataattatttataaatatcaaggagattgaggtaatttatatgagaaaaacagcatcacgcatagcggcgcttcttctcgccgcaatgacactccagcttttcgcctgcggaaacgacgccggcacgacaaataccgggaacgacacatcttcgggcgacaccgagacaacagcgcccgagaccgagaaaccgttcgcggacaaccttggtgagtacgacttcggcggagcggatttcacaatgctcgtgcgcgagtcgagaaacgaccttatctgccccgagagtgagaccggcgacgttgtcaacgactcgatctataagcgcaatgagaagatctccgaccgcttcaacgtgaacatcaagtcagtcactctcccggacgaatccaataagtggaaccagcagctcgagggagaggtcatgtcgggaagcggcgactacgacgtcgtcatgccggactattggtggggctgcgagacccgcggtctgttcctcaacctgctcgactatgacgtgctcgacttctcggctccgtactggtgcgccggatggaacgacagcgcgacaatctatggtcagctttacagcgcggtcggctcaatgtcgctcgacctcatcagaatgctcgaggtcatatacttcaacccgacgctcatcagctcgctcgcgctcgagaacccatacgacctcgtgaacaaccacaaatggacgctcgacaagatgaccgagatggcaaccgcggcgctctcagacctcgacggcaactcggaatacaacatctcgaacgaccgtctcggatacgcctgcgaccttcaggcaggccgcgccctgctcgcctccgcgggaatgaagatcgcgacacctaccactgacggcgcgtatgagtacaacttcatgaacgaccgcttcgtcacgatgtacgacaaggtctatgatatcatcaacaacaataaagcgtgctactacctgaaaaacgggtcggtggacctcgcgaccggtgatatcgacctcaacgcggtgttcaagaacgacaatcttctcttcctcggcgcgttcatcggagacaccgacaatctgcgcgatatgaagaccgattacggtatcatcccgacgccgatgctcgacgagagccaggaaaactacgtgacctacaacctcggcacctactatatggcgatactcaagaccgcaaaggatccgcagatgagcgccgtcatgctcgaggctctcaacgccgaaagctacaagagcgtcgtcggcacctacttcgacaccgcgctgaaaggcaagtacagccgtgacgaggagaccgcgaagatgctcgacctcatcctgtcaaacgcgttcttcgacttcaccttcgtcaacgagaccgcgacagaccacatcgtcatgtggttcttcgaccagatcgtaagcaagaaggaaggcatcatgtccgcttacgacaagcgcaagacctcgttcgagaagaagctcaccactctgctcgagacatacaagaacaactgaaatcctctccgggagtgccgcggcaaaaaaacgcggcactctttttgtcggctgtcgtttcctgtcgaacgaaatattcaggtaaaatatggaaatatacttgattatttccataaaatggtgtataatagtatcacaacataaaaacaggtgatcggaagcgggaagcatccgatcaaccggaatataaggagaaacatgatcatggcattacaggagaccgtcgatggcatcgaaataaactattcggagcgacgtccccgcgcgagtgcgtggtgcgcgaaaggttccggaagaacgacatacgcggcgacaagagctgacgtcgtcgcgatacacaaaaagaagctcgagcttgaccgcgagtgcgaggaaatgatccggcactgcaacgaggtcatcttcaagcttcagaacagataatgagacagaccggaccaccgtaaatttcaagcggcagtccggtctgtttttttgtctgttatcagagcgttatctcattgactccggcgtggagcggatatgttccgccgcactcgagtctcgcgctcacgccttccggtatctctatacggaaatgcacctgaccgtcgcgcttgacgaatctcacggcgacctttccgttcggggttgttatatgaccctcggcggaatcgagaccgtccgcgagacgcggctttatgacgatgtccttccagcccgcgccctcttcggagataccgagcagatagatgaacagatatctcacgaccgcgccgaacatcggatggttctgcgagcgcttgtaggtccactcctccgggaaggtcgtgcatccggtgctgcgccaatgaccgaaggaatacggtccctccgcggcgagaagattatacgcgagggtcgcgtatccgtgctcgaacagcacgcggataagaatatccgtcccgaaaataccggtatcgaaccatgtattcttcgtgtagtgctcgacaagatgcctgagcgcgcgctcgtcacccattccgaggtcgaccgcgaagcagttcgcgccctgcacgttcttcgcgaagtcgccggtctcaggatcgtagtactttctcaccatcgccgccttctttatctccgccctcttctcgagcatcgggacaaggtcatcgcggccgaggacgcggcagaactcaaggagcctgtttatcgtcttgacgtagaaatagttgttgacaaacggctcgggtatctcaatcttttcaggcgtacaccagtcgccaaggcaccattcacccttctggtcgcttacaacaaggtcgtcctcactgtgcgcctcaaggtaatcgaaataacgcagcgtgcgcggcaggaaatcctcaagcaccgacttatcgccatacatcctgtagtatgtatacggaacctccgctatggcgcatccccatccgccgggtcctccgccgcagcgtgtgtacggagccgtgtactgtacatgtccgcttactctgtcctggcagtccgcgatgtctccgagccactttctgtagaacttctcggagtcggtcatcatcatgacgcactcgcacacaagctcgccgtcgcctgtatagccgcgcttctcaagatgcgggcagtctgacgggatgccgcagtgcatattgtcaagctgagtgcgcagataagtcgaatacatccagtcaagcagactgttcgatgaactgaacgccgacgtcaccgcgacgtcgcagtgctcgaccgcacaggagacaatctccgcgttcctggataccgccgcgtacctgaacccgaaccagcagaacttcagcccgcactcacgctcgtcgtcgccgacaatgaaggaagccttctgtccgtgattcgtgtattcctcgatgtgtccgtaattgtcaaggcgctccgagacgcggagagtcagctttccgccgtcactgttacgtgccttcactatcggcgtgccggtgatgttctcgcccatgtcgtagatgaactcgtcctttgtctcgccgatgagcttcgggacgatatagcgtatcaccctgtccggcgggcagtctgagaacatatactcggtctcgggaccgtcgataacctcgggagccttccagtcggagtcgtcgaaaccgaccttgttccagccgtcaagagtatattttgtgtagtcgtggtgctcgccgcagaacatattccatgagattatctcgctctcatgccatctcatccactctccggagagtatcttaccggtcgtgccatcctcatatgtcaggtctatgacaaagcagagctttacgtcgccgtaatcgttgacctttccccacggattgccgcagttataccatccgggcgcgagagacacgccgacgcagttattctctccggtcagacgggttatatcgatcttcttcgtgtaaacgcggtgcgcgggcttttcgccgaaggctttcacgcacggctctccgtcccactcgtggaaatccgacgcgagagtgccgaacaggtcgtcgtccgccgacctgccgtttatgtaaagacggaacattccgagaccgcagatcgtgatctcagcgtttgtcactttcttctccgccgcgaactcgccgcggaagtacggagtctcgttcttttcggacggagtgagccacttcgcctctccgaacatttccttcaggttcataagtatcaccgatatgccgatccatgaccggcatttcctttcgttatcatgattcgattatacactaaaaactgctctttgtcaataaggtgtcgaaattaataacggaatctgtcaaaaacgtccggaaaacggtcaagaaaacagaccgccggatcggcggtctgtaccatataaaacgaagctcagtcttcttcgtaatagtccttcttcaggcaggtcagccgctcaaagctctccggagcgtctccgaaatccgggacgtccatcagcattccgtccctcagcgccgactcatgcgctataagacccggaagcatatacctcgcggcgtcccacgcgttgttcggcgggagcttctcctcaaccaccgcgcggcagaaatcgtcgacgagaaacgcgtgcgtgttgtaatgcggtcccggagcgagcgtgcgcatggctttcggcagtctcgaacgatcctgtatcggcgagaagccctcaatgtatctgacgccgttcgccggagcctcgagccctccgagagccatctcattgttatagcggcaggtgttgacaagctttccgacattctcgagagtggactcgcccgacgctgctccgcgctggaacgtgtgctgcgtcacggagcactcatacgagccgaggtcgccgtagaacgcggttatgtaggacgacggcttgtttatgccgactctgcggaactcgttcagacggacgacaccgccgccgctcatgcgcaggagcgccgtctcgttcgagaacgggttgtcccagtcgttctttccctcgccgtagatattgtcggtgtggaaatcgtccctgagaccgaagcaggacaccttcgtcgcgtgctcatgtattgccgacagaaccattgacgccgaatgcgtcggatagaacatcggcggtatccccgccacgcgccgccacgcgtcccctccgctccggctgaagtccccgtacatctcggtgatatcgtggtaatactggctctccgcgtagacaaagtgaccgaaatcgcccttctcgtacctctggcggcagaatatcgcgcaggggtagtagtaacaggtctcacccatcatatagacgagatgactgctcttcaccttgtcgattatcttcccgatgtcctcgaccgtgcaggcgatcgggaccgcgctgtagacgttctttccggcgtcgagagccttctccaccatctccgcgtgaaggtggcgctgcgtgaatatcgcgatactgtcgagatccttgcatttcagcatctcgtcaaacgatgtgaagccgcgctttataccgtgctccttccgcgatttcgcgacgcgctccgggagaaggtcacagaccgcgacctcctcaacgtccgggtgcattccgaagagctttatgaagtcgctcgagaaagcgccgagaccgaccacgcctatatgtatttttctgttcattgataataccattcctttcagtttgaccgatacgaccgcggatcgttaccgttatacctatattatacagcatttgccggaatttgcaatggacaaaacgattttttatttgtataatataatcaggacccaaagaaaggagtacagaaatgctcaatctcaaaatgctgtcggacggcgtcggtataaaaatgctcggcgtccatgaaggaagacctgtaccgcccgtatatacgacctgccgccgcgggatgaaacgctttgacaggttcttctacgtgaagagcggcgtcataaacttcgatcttccggacggcggcgggctctcggcgggcgccggggacatcgtctatctcccatgcgactgcgaatatatctcgcactgggacataatggaaggcggattcatctcgatgaatttcatcgtcgggggaaaccccgcgtcaaaacctctcggcgaccggatagaaatcgcggcgcacgaccgctcgggaaagtatctcgcgtggttcgagcgcgcggaggagatcttcatgcgcagcgacttcggctacatatacgactgcaccgccatctttttcggtataatcaagcaggtagccgccgacagcgccgccgacaccctgaagcaggagtgcgaccgcgtctggaacgccgtcacctatctcaggaacaactatcagaccgacgtctcggcggaagagctcgcgaagctctgcggcatgagcgtgtccgccttccgccgtgaattcaggctccgctgcggggtctcgccggtcagatacaagaacaccctgcgcatgacgaaagcgcgcgagctcctgcgcggcggcgactgttcggtttccgaagccagcaggctcgtcgggtgcccggatatttattatttctcgagactttacaagagggaattcggggttccgccgtcgagagatatgataagcatataaaaatcaggaggatgtcacgccaatgccgcggcatcctcctgaactttgattattccccgaaaactctcttcacggcgtcaagatatccgtacccgtaaagatcatccggctcgagatagctcgtctcggtccactcgttccagctgttcagcgtcacgagcttcggctgctccggatgacggtcgagatagtccttcgccattctcagcgccttctcgaagttctccggcgtgttgtttctcgcgaagtactccctgtaatttttgaagcgcgggttgttgtcccaacctatcgacgcgtgcgggaagtagatcgtcttcgtgtaattcttttcgatcgtctcatactgccgcttcacgtcctcgaggatctcgagatagtcgcggttcatgttcgtgaagtgcgcgaactgataatgcgtcgtgctgtcgaagcccatgcgctcaaactccgccttcgtgatgcctccgttcgagtcgacgccggacaggttcgtgccgttcatgccccacgccgccgcctgaagatgcagacccgggaaccccgctttcacgacctcgtttctgaaccagtcgagcgccttcgcggcttcgtcgggtccgccgagacccttcgcgaggttcacgaggtcatagatcatgaagaccggcttgccgtcgatcttataatacgacgggtgcgagaagtacatatcgatcacgcggtgtacgaccctctcgaactcggggcgcggctgtgagccctcccatatcaccgtattcgggaaggtgtccgagaggtttatgttccagacattgttcgcgtcgtggtttgcccacatgatgtagaacttcacgagatcgttgttcttcgccttaagatagccgttgtcgaggcactgctcgaggaaaggtctgcggtcgtaccagtaccagtcgtagatgaagacgttgacgccgtgatcgtgcgcgcaggagatctggctctccatgacgtaagggtcagcctcgttcacgtatccccagagcggcttgcggttccagaagtactccggagtcttcctcgccgagttcttcactgactgccattctcccatgccctcgccccagaacatcctcgagcgcggctcgtcgcctgtgtaggacggccagatgtatgccgccacatcgtatttctgcattttgtttttcctcgcatttcataaaatgacgctgaaagcatcgttatctgattatatcatatcagaagcccagtgtccatatcaaagtcacagattatatgtcatctccatattctgtaaagaacataagattcaagcgtatcgatataatacaacccgtagctgagcaggtcaagcgcgccttcaaggtcatacccgccgttcaccttatgtgccgaaagccgctcctcgtatctgccgaatcgctcctgaccgacgagatcgcgcaggtttcgctccgtcacgacgaaagctccgttcttctcctcggcgaaatcctcgacgagcttgccgttcatgatgaattgcccgcggcatcttccgtcaatgacatctgacaacctgtagccctcagcgcgcgtgttcggctcaccgaaagtcgcgtacggttcgaaataccactccccggacgtctcgtcacgcgccgctgtcgaatagttcccgctctgcggcagagtgagtgaatcgactgtatttccgagccggtcgacaattctcaatgtgtcgcccgaccttattccgaacgacgcgtgataatcggtctgacctttccgcgtaccgagcttatcgcaggcgattgtcatgtatccgccggacgggatcgttatcgccgggaaatcccagctcttttccttcgtcttgccgtcttcgtccacacgcgtgcgcaccagtctgtagcctttcagatacagcgcgccgccggagttcagaagctcgatcatatcgctgtcctcgctcaggcgcggctgttcataccacgcctcgttgaacacgagaccatattccggttctgaatattccgggtcaggttcgaaaacagccctaagcgtcatgctgcgccgcgtcatcatgaactcaccgtcgatattcttcccgtcaacagtcagctctctcagacgccagccgcgcgccggagacgccgcaaccggtatgcgaagacctataagatactgcaaagattcctcgctgtccgcgtcgagcgtcagtgtgctgatattcactttgccctcgccatcgatcagcacttcgagatctacgtacggtgaatcgtatttttttgaaactttatcctttacgatatcatatctcgaggcgaagaacgtcgcgggggtcgacaggttctcatgccagttcgcgttgctcccgccgctcgcgccccacgacggcgcgtaatagcgcatctcgatgagagcgctcgcttctgcctcgccgagctttgccataacattatcgacctgcatggtcgtcgaaagaagatcacagagaaagcaatagacacggttcctgaaatccgcgttcctgaacaggctctggaagacggcgttcagcctgagcccgccgtcgtcgctgtcaagccgcatgaatatgctctcctcgacactatcgccatatcccgccgcgaggtcgaggtccttcagcagaaatctccagcgtccgtccgcgccgtactgttccgcgtccgggtcatagccgttcggatagtatctccatacacgtacattgttctgcggccagtcgctgttcgctatatagccctgaaagcacatatacctgatgaaggaatcaaggtcgagcatctcggacgccttctcgtagaacctctcctcacgcatatcgagagttgttatatagcttatcatcttccggaactcgcggagctcgctttctggaccgttgtcgagttcccagtcgcgcggactcccgtccacctttccggcgccgtttatgcaggttatgccgtccgccgggaggttgtagttcgtctcgaaataagtcgggctgtaatcctcaaagagcgccatgaagccgtagtatttgccgttcaggtatacacagaccggccggtactccatcgtgtcaatgcctatctcctttccgagactcatcaggaacggcgtctgaatcgtcgtgttccagaaattgttgctccctgtgcggaggataagcgacttgaagctcccgaccggaacgcctgtaaggctctcaagccccggatacgcgtcgaaggtcatgacgttcgtgtcgtcgtaatcatatctcgcgaaaagcctcagcgacttatgcgagttgttccggttccatccgccggagacgcgtactccgacattctgaccgagcaggagctcgccgtccttcgtgtagaactcgacgtgcgccgggcgctcccagtcgcgtcccttctgaaaatagttcgcgtcctgaagcgagtcgtttgtccatgtcgccgggcggtgtctcaggaagtcgtcgcgtatctttcccggcacaagtatgccgcgctcatagccgtacaggtcgtccggttcgcagactatcgacacaatcatcgtcgaatacctgacttcaggaagatcggcaatgatatatgtcccggtaaggacatctccgacctgctcttcgtcgacaaaagccgcgcagcgtatgatattcacgctcgaagggtctctcgccccgcctccgcggtaggttatcgcgatgccctcctctgggtcataaagctttgagtcgatcgtcggcaccgacgaatcagtcgtatatcgtatctcaagctttttgagaagccttttctccgcgcctgactcaacatgaagagagaagcgctccttgtatattcccggcggctcagtgaaggacagtctcgccgtatcctcaggtcgttccgcgggctggttctccatattctcttccgacacgacggtcccggcggtatctgtcgtctcaaggtcaaccgtctcgtcgttccctgtctcaccggagcaggatgagagcattgcaaaaagcagaaggagcgccgggagacgcctcaatatcccgcgtctcatcgctcgtcgtccgcgtcgtacatcagaacgacattgaagttggaattcttctcgcgtatatcggaaagcagcgcggaaacaccggagagatccttcagattgacggtataagcgagctccatgaccgtgccggagcttatcaggcgtacgcgcttcaggtcatagctcagcgtgtgctttctgagcacctcgtcaaactgcccgtcaaagctcatcgactcgggaacgcatatcttcacgagccgtgtctccggcttcaccctgccggcaaggaacacataaaggttgagcagcacccccgtcaggacaacaaacgcgagcgccggcagcagaagcccgagtccggcagtcagtcccgccgccatcgcgacgaaaagaaacgctatgtccgacgtcttctgctgaagcgagcggaatctcacgattgacattatgcccgccaggctgaaagcactcgcgatattcgtcccgatgacggcgataatcatcgcgatgacagagcttatcgcaatgatcgtaaccgaaaactcgagcgtgaagccttttttccggttcatataagcgtaaaacaaagtgatgagcacgccgagcgccatgctcgcgagtgttgtcagtattatgtcaaaaagcaccgccccggtgttcacctgtccgagacttccgaaaactcctgcgatatcgtccatgtcattatatcctttctgctattaaagacggtttgcccgtattttgaatatgaaacgtttttcagaccgtatttcccgataagccgtgtcaccgccagcggcaggtttcttccgctcttgatctcaagcaccgtcatgccatccggcatcgcgcgctccccaccgctcccgcgcgtcagatcgaggtcgtcagtccgtatgcgcagcgccgagtcgaacgtcaccctgagacgctcctcgccagtgcccgcgaacgccaggcgctcatagctgacgaccgccgacggactcaggtcgtcacgacgtatgagcctgataatatcaccggcgagcttcctttcctccgccggcagatcatcgggaatggttccatcgagccacagacgttcgttcgcgccaagggaaaggcagagccggcgcttttgcgagcggccgaggtacttcgattttatctcgaaaaacgaggcggaatcccgtttcgcgtccccgtataccctgaggcggagcttatagcgatacggctcccggtcaagcgtctggtaatacagccgcctttgcgggtcgtcgaaataaacgcttgagattgtatactcctttccgccgctgtagacgtcgggcgggagtatggcgcggacttcatcctcgagagcggcgcgcgtttccgggtcgagtatgtacttgtactcgcatctctccaaaaatgtcgcatctccttccatattgagaaagcgctgaacagagcgggttccggcaataaaaaagcagggtgccgctgcttttttcgcgaaaacaaccttgaatcagcgttgccttaactattatactacatttttccctccgcgtcaatgagtcgggccaaatagttgtcatctcagcgcggacaaaatacgcgtatatttttgtgcagtttgccacttcgcgtctgaacggcaatcaaatccggtttttcagatataaatacaatgtaactatttttataaattttcgcaaaagcccttgtatctgagggaaaaatgcggtaaaatataaaaggatgaacaggcgcgtgtgttaaattattaacgggcacttcggagtccggcggtggttgaggccgcggtggttcatcggttatttttgcaaataaaaaaattttttctggaggataaaatcatgtctgtaaaagttgcaatcaatggtttcggtcgtatcggccgtctggcattccgtcagatgttcggcgctgagggctacgaggtagtcgctatcaacgaccttaccagcccggctatgctcgctcaccttctcaagtacgataccgctcagggcggctactgcggcaagatcggcgagaacaagcacaccatctcttctaaggaagctaccgagaccgagcccggttccatcaccgtcgacggcaaggaaatcaagatctacgctatcaaggacgctaacgagtgcccgtggggcaagctcgacgtcgatgtcgttctcgagtgcaccggcttctactgctccaaggagaagtctcaggctcacatcaacgccggcgctaagaaggtcgttatttccgcaccggcaggcaaggatctgaagaccatcgtctactcggtcaacgagaagaccctcaccgctgatgacaagatcatctccgctgcatcctgcaccaccaactgcctcgctcctatggctaaggctctcaatgattacgctcctatcgtcagcggcatcatgagcaccattcacgcttacaccggcgaccagatgatcctcgacggcccgcaccgtaagggcgacctccgccgtgcgcgcgctggcgctgccaacatcgttccgaactccaccggcgccgctaaggctatcggccttgtcattccggaactgaacggcaagctcatcggctccgctcagcgtgttccggttccgaccggctccaccaccatcctcaccgctgttgtcaagggcaaggacgttaccgttgacggcatcaacgcggctatgaaggcagcggcttccgagtccttcggctacaacgaggatccgatcgtttcttccgacgttatcggtatgagatacggttctctgttcgattccactcagaccatggtctccaagatcgacgacgacacctatcaggttcaggtcgtttcgtggtacgacaacgagaactcctacacgagccagatggttcgcaccatcaagtacttcgctgaactcgcgtaagttcttggttctttgatgaacatattcccgtccggggtttcccgggcggggatttttatatatttttgcgcttttgctattgctttttatctacatatgtgatataataagaccagagggaggcgatatatagatgaaactcttcagatcccgcgcggagaaggagcttgacgggataatccgcgagctcagacaatacctcgagaacaactacaaggatcaggcgcacatgatgcgcgagaagctccatgagcgctcagtcgagctgcacgactcgggaaagctctcagacgacgcctttgccaactatgagcgtatatacacgacatatacggagcagatgaagaattacaatcacaggacgttttatcattcctgaagagaatttatggagggatcaccatgaaaaagtgcttatccgtctttctgatgctttcgctcgttttcctgataatcctctccgccgcctgcgacagcgaaaacggcgatgcgcagggcaatacgcgaaacggcgggataagtatcgttaatactccggatggagctatgatgtacaaattcgaatacatcgacttactcacggatgacgactatctcatagaatataacagaaacaactcgtcgttggaagccggaaagtcatggaataactccctgtattttctttcaggacatatgggaaaagccgctgacggttataatcatgctcaacggattctcacagtatatgatgaacaggcaaatatgctcgtgaataccggcataacgaacatgattgagataaccgacaacctccagtatggcttctatttcatagctccgatctcagataccgagtatgtcgcactgtgcaaaaagcagacggcacgaataccgcgggacgccgacagttcgtttgaagaacgaatcttccctatcagccttgtgaaattcaacattgatggaagcttcgaaaatatcgctgaattcagctcaataacttcacatgaagtatatgacatcaagaatatgctcgccgataaagacggtaatatatatatctacctttctcacggtctatcgaccgacaaggaaaaaaacgaagaacccgccgaatgggtgatcatggtaaattcagacggaaaaaatcctacagttctcggcgcccccgacaacgcaatgccatatggaagcaattttatcatgcgtcacaccgacggatatgtctacctgtcctactgggtaaattatgacacgtcaaaacacagatatgatttcagaaaaattgacttcgacgagaaaaattacgtcgtcacagacaagataccgtcaattgagataaaaggtataccatacggcagcaaagaagccacaagaattccccttctcggtgagggctacgacgcatatttctatgatcatatcggtctgcacggtcagaacggcgaaaccgagacccttctgttcaaatggattgacatggggctgtcggtcgacattatcaatgacgttgtcgtaagctctgacaagctgattttcttaaggatacaggacccgatagacggagagacaaaatacgccaagatctccctcgtccccgtctcctcagtctacggcgaggacgttgagaccccgccgaccctccgcctcgcgattgatcaggagaacaactcgtattcggcaagaatgctgaaatacgcctcctccttcgtccgcagtgagaagggctgtcaggtcgagatagtctcctactccgacacggaaggcggtctctcagcgaaccagaagctcgcgcgggatatctctgccggtgatcagcccgacctcgtcgtctttggcggcggtctgtcatacgagacgctcgcgaagcaggatatcttcgcggacatctacagtttcatagacgccgacccggattatgaccgctcggacttcctcggctgcgtcctatccccgtttgaaagctccaacgggacgctgaaacggctcgtctccgagttcgcgatacagacgatgatctcagggaaaaacacagtcggagagcttgagtcgatgacgctcgacgatttcgcggggttcggctcgtcgctgtccgacgggcagtatcttgtgagcgctatctcctttgacggaaagggtctgccggaaaggcttcttaataacactcttccggtgatgcttgacgagttcgtcgactttgagaacggcaagtgcgatttcgacggtataagaacgcttcttgacatatgcacaaactcgaagatactcgcggttccgggcttcaccgacccgaaatcgctcgcggagaaaaagctcctgttcgctccggtgtattacttcgatctgggatacttcatgctcgaccgctacatgagcttcccggacggagacatccagtacacaggctacccgacaacgaccgggaatcaaaagaacagcgcggtttacccggtaatctccacctcgatcatgaagacgtcagcctcgcagaacacatcttgggaactgataaaatacttcatcggaatgaaggagcgcgaagcggaaaaggtaacggaagcgcgcgacgtcgccgacctgatgaacttcccgtgcacaaagaaaggcatcgagggaatgataacggtcgcccgctcctaccgcttcgcgatgagcgccggtgaaatcgagaacgacgacggaagtataagctcagtcatctcggtcagcgcctacgaccttccggaggaagaaagcgaaagagtcaaaaagaactccaacctcggacttgaagtatacttcaccgatgaggacgagaaggcactctggtcgctccttgacagcaccggaagaatctacacgaaaggctcctccgttctgccgatcatcaccgaggaggcgtcctcttgcttcgccggggtgaagagtatagacgacgttgtcggacttatccagaacagagtcaatatactcataaacgaataaaaatgtttggatctgacgcgcgatcgcgcgtcaggtccttttcagtgttccgcgagcttatcgcccgctctgactatttcggatgtatccttgaaattatggtggtagacctcgatgatatacttcccggcgtaaccggtagactcaatacggtcgatgacccggtcgacgtcgagctcaccggcgtaaggcagacggcactcgccgtccttccagtcgtttatgtgtacgtggacaacgtcgtcccccatcgcgtcgagcatcgcaaacgggtcatacccgccgcgcaccgtctgcttcaggtcaaagacgaactttatgtttcccgcgccgatacgatcccggacctctttcatgaataccgggttgcccgcgcgggcggtcgatacattctcgtgcgcgagcgtcacgccctcgctcttcgcgaccgagatgagattcgacaccacctcgcagtaattatccatcccgaagaacggagccctcgtcgcgtcgccgtgaaagacgacgaacttcgcgccgagatacgctgcggcgtgaaaatacttccggtacagctccgccgcctcccccgcgcgcttcttatacgcggagaagaaaaacatatattcatacccggatgtgaacggatgaatcgatgtcactgtcgtcccggtgtcctcacaatgccgccgtatcagtctgagatacggctcctccagctcagaaaagctgttcatgaatatctcgacgttccggaaaccgagagacgtgcagcgcttcaccgagtcgagcgtctcctccgggtagaaacaggcgctcgacagacctatacgtgatctttccgtaatatatcctccttgccggtcaatttccgccggtttttatcgtcagactgtcgagggaaccctctcccatcaggctgaccgtgtttccttccatcttcgcgccgtatgagccgaagaccctgccgtccggctcgaaaatctcgaaaccggtcgtgtcggcgattatcctgagcccgaacctgccgtccgacgcgcagacaggctgtcctttcctgccgttcacgctgagcgtcccggcgccgtctatctcgacgaagtttccgaagagcttcaacattatagtctcctccggctccgagaaccggaacgaaaggtcacacgggagcggcgcgctcatgacaacgccgtgcgaagggagggaggtattctcctcggtttcagggaaacaagcgtcgacctcgcgcgcgggtttcactctcagatgaccatttttcagcgtcatctcgcacgggactccgagctcacaggtgaaatacttcgagccggtcttaccgaaacgattccacgagagccgcacccttcgtccgtccgtaccctcgaacgtctgcgccgcgtagacgtccccgaagccgaaatgctccggtgaggtgaccggcgtgaaaccgcgcgtgatgtcgaaatctccgacaacggcacagtcatgcgccccggtgaatacccatctcgtcttcccgccgtcgtcaagcgggtagaaatccgggcactcattgtcaccgggaaggttcagtctctgaagctcgctccagtgcagaaggtcaccgcttgtcagcagcgcgtactcgtcgccgtcgagatagagcgccatcacgtacattccggacgcgggatcgcggatgaccttcgggtcgcggttgtcgcccttgatgtgcgggacgaccgggtttccggcgtatttgtggaatgtcttcattccgtcggtgctgtatgccatgcactgagtgaatttcttcccgcggttcagctcccggctgtttcccgccgccgtgtagaagagtatcaccggatcatgctccgaattcttaagcccgagcagattgtcatggtcaatgaccgcgctcccggaaaacatatcgcccgtctcatccggatacagcgcgtcgccgagctgttcccaatgaataagatcgtcgctcacggcgtgtccccagtgcatatttccccagtcgagcccgaccggattgtgctggaagaacgcgtgccagcgcccctcataatacacaagcccgttcgggtcattcagccatcccgtctccgccgtcaggtggatcgccggtctcaccggatcctccggcagagcgggctttctctcgctgaaaccgaagctctttcccgattcatggataacctcgacgtcaagtccctcgaagcgtgagatatcatagtagaatacggtctcgggattcgcaaaatcgaccctcgcgtcgagatctgtcagcagcttttctccgcttttcagataaacctttgtcttttccgccgacgctgaggtcggaacgacaagatatctgcttttttcactggtaatcataataatcccctttcagagctttttgatcataagatattcgtttttcagcgtgccgtccggcatcaggaatgcgtccggatgtacaccggcaagcctgaaaccacacctttcataaagggcgcgcgcccgcgaattcccctcggcgaactcaagctcaatttgcagcgctctcttttcccgcgcggcgcggtcggcttcttccatcagtgccgtgcctatcccgagcgaccagaattccctcaggaccgatatcccgagactcacgcggtgacgaatcttcttcctcgccccgaagctcagaccgcaggaaccggcaagacgatatgtaccgttgtcatcaatgaaacagcagatcatcaggccattctcagacccgcggttcttttcgagatacttcttctcgtcctcgatcggcatcaacgggtcgtcggcgccgcgcagaaggaaatccgtctcgttcgatacttttttcaggaatccaagcatttcctcggcatcgtcagccgacggggagcggagaagcgcgtctctgccgtccctcagctttatatgtttttcctcgattatcattccgttcctgcctttccggaaattcatcaatgaaatttccgcggttttatggtataattaaggaaacactgatttaaggttgttttcgcagaaaaaagcccataaatccaagccctttttctgcgaaaacccgatttattcagtgtatcctaagttaaaactgatatggaggtaagatcaaatgaaaaaattatctgttcgtctcccggagcgcttctccgaaaaaggattcatgatcctccgcgccgggctcccggtcgtctcaaccgagctcatcgccgtcaccgcgaaatactcgtcgctcacgcagttcgagcgcgccgtcggcgtcggagctctgcgtgaaatgctgatacatatcgcgatgtcggtgacacttctcgtcggcggagcgcttctctttgacatagcggagcgcgacatgaacaagtgactgttcattcctgatactcccgcagtatctgcggaagtctcttctctatctcgtcggtgcgcagcttgtccgcctcatactgccgtctgagcagcgacgcagggatgaaatcgtcatacttctcgaagaccggcatctcattcacgttgacgagcgcggacttgtctatgccgctgttcttcacgatcgcgcagagctcatgaatgaactcgtagtcgctgcccttctccatcttgaacatcatatagtaacagccgtcgaactccatgttcgaaagcttgaatctcgcggaattgtgcgtgatgaacttcctgagcgtcctgaacgaccttgtcccgagccacgggaacaggcaccacgtataaccgccgagcgacaccatcgaatgcctcagcatcccggtattccttgccagcgcgcgcacaacctccagcctgtgtctcgcgttcggcttgaggtacgggtataccgtgtcctcctcaagtactttccgcattctctcgagaattttcgtgtgtatctcaccgtagtcgccgggccacgagacctccatcttgccttttaccgacttcacgtagatgagctttctcgcgacgtcgagctcctctacctcccagacccttccggcgagcgcgaacctgtcgccgaccggcggcggagtggttatcgttccgatctcatccgattcacatctaaccgtgtaatcctcgctgtccttgaagaccgcgtagaacttgaagctgttcacaagccgctcgcccttcagcccgacgataagccccttttcctcggtcagctcgataaaatcgttctggagcataccgacgagcagtgtcttatagtcatccttcgtgatctctgcgaacggcggcagggacaatatcctctccgccagacgtttcggcgtcagctctccggacgacgcgagagtgctcagcgtctgctggaacgcgagactgaacggcatcttcttgaccacgggcggctcgatgaaccgctcctcgatatagagctgcacgatcgcgatggcgcgcagaaagccccacggtatcagctgcgggagcggcgcgttcggaagcgggttctcctcgcggaaaaccatcatcatctccggcggtgtccctcggcgtcccgaccggccgagcctctgtaaaaagctcgagaccgagttcggcgcgtcgttctgcacaatgcgctcgagcctaccaatatctatcccgagctccatcgtgacggtcgcgcagacgacatttttcagttcgtcgtccttcattttggattccgcttcctcacgtatcgacgcggagaggtttccgtggtggatgaggaaattgtcccggtcgccgcaattgtcggctatctgccgcatcgtcgccgtgacatattcggtctcctcgcgggagttcgagaagattatcgctttcttgcccttgacgcagtcatatatatactcatatccgggatcgatctcgaccctgccggatgactttccgtcagaagaagtatcattcgcggcggtttctgttttgtcaggcttcgcggatatatctccggcattctccgtgacaatggcgccgccggtcgggtttccgtcagcgaaatcgtggctctggtcaaaattctcgccctggatgaagaaatgctccatcccgagccgccagcgcgtcacgctctcttctatcttcggaacgacagtctcaactcccgttccgccgccgagccagtcagccgcgaggcgcgcgtcccctattgtcgcggaaagccctatcctgcgcggcacacgaccgatcagtctcgcgagccgaacgagctggcatattatctgatttccccggtcggtgccggtcagcgtgtgtatctcgtcgatcacgatgaaccgaaggtctccgaacagccgcacgatgtcgttcgagcggttcatgagcaggctctcaagcgactccggcgttatctggagtattccctgcgggtccttcagcagcttcgccttgtgcgactgcgcgacgtcgccgtgccaatggaagacagggatgccggtcatgtcgagcagctcgtcaagccgcaggaactggtcgtttatcaggctcttgagcggcgctatgtacagcgcgccgacgctcttcggcatatcctcgcacatcagggagattatcgggaagaacgccgcctcggtctttcctgacgcggtggaggatgagagcagcagattcttgtccgtctcgaatatcgccttcgccgcagcgatctgcacctctctgaggtccttccagccgttctgatagatgtaatcctgtatgaacggtgtgaaccggtagaatatctcgtcgtccctcattacggcacctcctgatcttgttcagaatctcacaattctatgtcgtcaaagcttatccctccggacacggaaggctttttcgtctctccggtctccggcttgtcgtcgcctataaccttatcgtcatcgttgtctccgtgcttcaggctgacaacgccgcttccgacgacatcggagaaagtcgtctccggattctggaagagtatattcagtacggtcatgtaatctcgtattatctcgcgcggtgttataagcgtgtccgccccggcgcgctcaaggcagatcttcagaaacgccgccatgtcctcgtcggtcactctcggcgtccagttgtagttctgagcgtgcaggttagttatcctcgcgatcagcgcgaagagctcatcgtcagacagacggcgcagccttattaccggaccgatcagattcttgtagcccgccttctggaactgtccgtcggacagacgacttcgaagcgcctcatagctgaacagtccgcgccttgtgtcctcgagaaactgcggcgttccgccgaatatcagcgcgagtccctcagctttgccctgaagcgtgtcgttgaacatcgagagcagcttttcgtagttgttctcccgcgatatcctgttcgttatcttatagagattcacgcattcatcgatgaacacgacaaatccccggtagccgatatgacggaagaacaccgcgagcagttttatatactcataccagttatcgtcgtcgattatcccgctgagcggcactccgacggcgtttctcgcctcggtcttcgtagagtactcaccgcgcagccacctgaggcacgcggacttcttctcctcgtcgccggcgagatacgccttataataagcggttatgaccgacgcgaagtcaaacccgccgatctgtgcctcaagagacctcgcgacgcggtatatcttctcggtaagacttttcgtgaacgcgtcggaaccgatatcgagtccctctcccgccgtctccgactgaagatctgacagccatctcgcgattatctgaggcatcgctccgccgtccggcgaggacttcgacgcgaggttccgtatcagctcacgataagtcgcgataccggttcccttggcgccgcatatgcgtctctcgggagacagatccgcgtccgccgtgacgaaccccttctcaagcgcgaacccgcgcacaagctggatcaggaagctctttccgcttccgtattttccgattatgaagcgcattgaacccccgccgtcatttacagcctcaaggtcaccaagcagcgcttctatctcgtcgtttctcccgatcgcaatatatggcgcgcccatacgcggcacgactcccgccgaaattgaggcgagaagcccggagagtacccttttcgggattttcgtgtgattcatttcaggcatctttttatatctccctcataatcgcttatcagtctgtatccgccgccatccggctctataacgctgtctccgataatgtcgtacgcggtctcgttgatcctgtccgcgagcgcgtccgcgagcattccgctctccgacgccgctgtaaagacaccggaagcgtcgccgcccgcgagcagacgcaaagcctttatcgacgtctcatcgagcgacgctataagaaccgcgaactcatcatcgctgtcagcggatgtttcaggcattgccggtgcggtgtgtttttcgggctcatcaacagaatcatctgatttttccgacactgtcgattgtaccggctcttccggcaacgcgggttcactgtccgtgtgttcaggttcatcaggcagcatcgacgtcaacctgtcagtagtgctccacgaatcgcgctctatgccgcgcgccctttcaagtgagaaatcgctcgtgacgggctcgtagagcttatcatactcattcacggcttcggcattggtggtctttctcttcttttcgtttttatacgccgggaggttctcgtcgaagtactcgtcgacgcacctccgcatctcatccgtgatattctcgactttgagtctcgactttattccgagcgccatccgcacacgattctcacagtactttatgacgtcagtcaccgcgaacctgaaccccgtagagcgcgtgtaggacagatattccacggtaatgctccgcttcatgtcaaagacacacagcgcgccggcgtaagcgtctctggtcaccgtcgtcacacaggacttcatctgcccgccgtccctcgagaaaacctcgcggttgaccttatcgaacgccgcggcgatatgcttcgaaaacagatttatattatccttcgtgacatacctgctcgtccgccaatcataatttgacgaataggacaggaacagcgacgacgtctcctcacccggagccggcgtcatataaaactccttgaacgccgccgcggcgacgacctctcccgaaatccccgcgagccgctccgacggacacggaagctgatttatcaggcagtaatcgcacacccactccgcgagataactgtcaatccgcggatacctcgacctgtactgaagccagatatcgacgagcagaccgatcccggtctccggcgggacaagattcggacaattcagtatctcatagatataaagcaatatataactgtaatccgtccgcggatatctcccctgtctgacctcagagcgccagtacagataccacttcatctgcgaataactcagctgattatactgcggtatatacgagaaaaacgacaccggagcgcactccgacgacgtcctgtcccaaagccgctcggcgtccggacggaaccgctcatagaaccggtaagtcgtcttccacttcgcgacagacacgcgctttatgacactgttctccggctcatagacaagataaggctcaagcggcaccggctcattctgcttcgcccgcgtcttcatagacaactccctgagccgtctcgcctcatcgcgcggcgacgccgccacaggctcacccgaaaacgtcttagaatacgccccgtccctcctcggaaccggtcccgtacgctcaggaatcggcgtcccaccggtctcagtcgtccgtccgatctcaagctctaccgtatcagtattcacgcgccgcgccggatccaccggccgcctctgcggcaaaagactgtcaagatcccagaaatcgtctatatcatcaagcgtcgggatcctcttctccccgtccttctttttgtccaacctgcgcaccacctttcacggctgttttaccagcctccggaacaatatcttattatactattttatcacattattcagccaatgtcaaggcagagtttttgcagggggaacttttttgaaaaaaagttccccctgcaccccctcaaaaaactttattcacaaaaagcagagcacctttcacagtgccctgctcttttttaactgtgcgcctcggaatctatgacctcgttggtcattaccttctcggcgtcggttatgatctttgtcgccatatctctcagaatgtagaactcacccttgccgtccaccgtgtagtacgcgcggcgggttgaatacgggtaaaccttatagacatgagtgataccggcacgggtctcaatcgtcagggtcatatatagatccttcgaatcgtcaagcgccgcgatctcctcctcggtcattccgacataatcctgcatatacaccgaaagcagcgtcttatagaactgacggaaattcttgacctccggcttgaatcctgtgtcacgctcagtgacgacaagctcctgagcctcgccctcaagatcgaatactctggtcgcggtctcgctgtcaaccgtgatagtcctgacatcattgatgttcatcatgaatatcggctcgtcaacccattttatgagatcccagtcgatccactccatgctgtgaccgtcaacctctgttatcaggttgaaaaggagcgagtaggcataataattgccgttctcattcatctcgctgaaaactatcgtctgctgtacgccctgatactcatagtaaacactgaaggccggttcgagaaggccatactccttcagctcctcctcggtcggatcatacgcgagagtgctcgtgccctggaaattcgtcagctgctcgagcgcaaccgaatagttggagtcattgaccgtatagttcgcgggcgcgagcatcttatatgagcccatcgccgcctcggcagccttctcctcctcatcgagatatgtgatcagcaccgtgatctcatcgcccttcatgaccgcgaaattcttgatcgtgaagtaatcgttcgtgttcatcgggagcgcgagcatcggcgtgatcatattctcgagcggctgaagcaccgtgtcgcctatcgtcgaatcaagcacgtacacggcgtttctgcccttatagcgcacgtaatagccggctccggtcgggatcttgcttccgatataaaccgtatgcgtcttgccatcgcgcgtcgtcagcgtatagtacgccgggttgtcgctgtcggcaagcccgaactcggacatatcctcgcagtcctcagtgaccctcgtcatcgaaagcgtatatccgcagctgacgaacagggaggatatcttttccttgtcgtacggagcctccggataaccggtgacatagaagctctcgtccttatcgtcataatagaagccccattctccggtggagttgtggacgtctatcgactggatattgcttctctcttccttctcgaagagcataacgcggtcatttgtgccgagcacctcgccgtcaagcagcttgaccgtctccttcgtgacctcctcgacgtaattgacgagcgggagcacgacgaagaaatacgcgcatatcgccgcggcgactatcaccgccattatgatgatagttttcttcctgcgcttcgacgccgtctgcttctgttttttcgagatacttgtggattcgggagcgggggctgcgaagagcgttgattcgctcttcgccttcgcctcggccttctcctcttcctttgtggaatagttcttgttctcttcgttcatgcgtgttttctcctgagccatacgacgacgcccgcgacaaggaagcaagccggcacgactgcggtgaggaatatcgtccagttggtggcctcctgagtcgtgatatcaagcgactcgtcgtcaaagaccttgaaatcaaggtcgaccgggacctgcgtcttgcccatcgtacgcatcatggcgtaaacgatatcgctgtttccgtaagcgccgcggccgacataatcggtcgacgcgaggtactgcgaaccgcaggcgaaaacgtaggaataatgcggtgtgttgtcaatatatctcgactcacgcgagagtacgatcaacggatactttccggtctcgaccttcgttccgtcgacatacttctcggcgttcgacgaagtgtagagaaccgtcgaggtcattcttccgtccttggaatcccagaggcggttgatcgggctcgcgtacttgacgaccgtcttcggcggcgttccggtattggtcatcgagctgacgagagacgcgccgagagcgtccggatcatacacggcgttctcagccgtcgtactgctagagttgagcgcgatcggataatcgccgacgagcgaataatgctcgacgtcaagggagctcgacgggtccttgagcagcgaattgtcgaactctatgccccactcagagagaaactcctcaagctcggggagctcgcccgtgtccggatccttgaacaccatcaggttgccgaagccgtcaaggaagtcgtcgatcttctcaatctctgactttctgccctttgtgtcctcggagataccctcgaaatcatagcgcgggttgttgattatcagaagacgcgcgtccgggtcgatatcttccttcgtgagatcgatcgtacgaagctcaaagcccgcgctgtcaacaagagagagaagcgatgagaaatccgttgtcagcgactcaccgtgagtattggtgatgtagcatatcggagtctccgcctgggtcacctgaatcatggcggatatgaacttcagctcgccgttgaacgcccaggtcttgccggactcgttcgagacgaagaacgcctgagccgagaagtttctgaactcagtgccgctctcgacgatgacgttggtggtcttgatattcgagacggtcgtcgtcttgtacttcgtgaccgccgtcgggttcttgattatgtcgacatactcataggtgatgttgtcgtaggacgccgccatctccttgacgagtgagaaaatcatcttcatcgccgcgtcgttttcgagatcgtcatacggctcgcagaaaatgatatttatcggctcggtgatatcgtcgagcatagcgcgcccggcgtcggagagaccgtaaacgccctccttggtcatgtccacgtaccagttgtacttatagaccagtgaagagaagatcgcgttgaagattatgacagccgcgatgactattgccgtcagcactatggcgagagctccgtatttgagctttcttgtcgtcgcgggattgaaaccattcattttcatctgtatttacctcctgcactcatcacgaccagcggcgcttttcgtagatgcgcacggtgaggaacatgaaaacgaagcatatcgagaaatagtaaacgagtgtcgccgggtcaagtatgccatagctgaaattgccgaagcggctgtagatagagatccagtcgataacgacgcggaccgcgtaaacgtcaatatagctcgtgagcagaccgacgagcagcaggaatatgagtatacccatagttccgaccgccgcgacgagctgattctcggtgagcgacgaaacgaaaagtccgatggctatgaacgccgcgccgatcagcagtatgccgatcgtgctcgagatgagcaccgcggtattcggctcgccgtacatatagagagtcgggaacatcataagagcgccgagaatgaacgtgccggcaaacatggtgaacgccgcgaggaacttcgcgaagaccattcccatgaggcttatcggcgaggtcagcagaagctgctcggtgcgcatcttcctctcctcgctgaagctcttcatcgtaagtagcggcacgaggattatgaatatgaacatgactatcatgaagtatgtcccgacgctcgagtcatctcccgccatcagggtgaagagcgagaaaatgaacgaattcagcgcgaggaacaccgcgatgaaaacatagcctatcggcgaggtgaaatatgaaagcatctcgcgcttgtaaatcgctgtcatcagttgttatcctccttggtatcagcgtcagcggattcctccggcgcgtcggtctctgtcccttccgggaactttatgtcgaaggaaggcgtttcgtcaaagccactggcgtcctttttcgactttctcgaatcctgcttcttgtcgatcagcgagatgaagatatcctcaagattcgttccctgctgctcaagaccgatcagcggcatattgttcttcgcgagcgtgtagaaaagcggcttgcggatatccacaccggcggtcgactcgatggaatacacaaagctgtcgccctcacgctcgccgaaaagctccgccgtggttatctcgggtatagagcgcagagttctcagaacgtcgcgctgcgatccgcagatacgcgcgttcaggcgtctcgttccttcgatcattctcgagatgttctcggtcttctcgtccgcgatgagctttccggaattgattatcagcagtctgtcgcagaccgcctgcacctccggaaggatatgcgtagagagaatgaccgtgtgcgtctcgccgagcgttctgatgaggttcctgatctcgattatctccttcgggtcaagaccgacggtcggctcgtcgaggattatcacgcgcgggttgccgacgagcgcctccgcgatgccgactctctgcttatagccctttgagaggttctttatcagtctgcccttcttgtaatcgtccgcgatcttgacgacctcgcagatctctccgaggtgcttcttgcggttgagcttgcagcccttgagatcatagacgaaattcaggtactccttcacggtcatgtccggatagagcggcggctgctccggcagatagccgatgaagcgcttcgcctcg

SEQ ID NO: 62 - DNA, 7799 bp, Unknown
  16S sequences of unknown bacteria
ccccaatcatgtgcgtgtgcgggccaatgaccgcaacggcaatgtttttgaagtagaaggcattgaactgacagcgcgttgcttttgccatgagatcgaacatctggacggccatttgttcgatgagcacgtcgatcatttcatgacggaggaagattttgaggagtattacgctcagcatcaggaagaaattgagcaggacacggatggagacgaagaagcatgaagatcctgtttatgggaacgccggcatttgcagtgccttcgttgaaacgccttgtggcagatgggcacgagatctgtggcgtgtttacccagccggataaaccgaaaaaccgtggccataaaatgacattttcacctgtgaaggaatatgccttgtcagagaatattccagtgtatcaacctgtaaaaatgcgggacggcactgccctttccattgtgcgggaactgcagccggagctgaccgtggtggcggcttacgggaaaattctgccggacgatattttggaaatgccgaaatacggctccatcaacgttcattcctccattttgccgcgctatcgcggcgcagcgcccatcaactgggcgattttgaatggggaaacggaaacgggcgtgtctatcatgcatatggccgccgaattggatgccggcgacgtgatcacagtggcccgaacagcgatcgatgaaaacgaagacgctggtgcgctgacgcagcggctggcagagctgggggcgcaggcactaagcgaaacggtagacgctattgcggcgggaacagcgacccgcacaccccaggagcacagccagtccacatatgcccccatgctgagcagggaactttccaatgtggactggacgaagagtgcccatagtatccattgtcagattcggggcttgttgccttggccggcagcgtccacaaccctgttttccgatgcgccggtgaaactgtactgcgccgaggaaaccaagcagagcagttcctgtgcgcctggcaccattgccgcagcggacaaaaaagggatcagcgtcgtctgtggtgacggacagatcctgcgtattacggaactgcaggctgcaggaggcaaacgtatgagtgcggcggcgtatttgctgggacatcccatccacgctggagaaatgtgaggtttcattatgctgttttggattttgctgattgccattctgatcctttccgtttgggcacagtatcaggttagccaccagttccataaatattcacaagtgcagaatcggcgttttctgaccggcgctgaagcggcttctgctgtattgcgcgcccatggcgtttccggtgtgggaattgcccgctgcagcggacacctgacggaccattatgatccccgagacaataccatttatttgtcccaaagcgtctacgacagctccacgatcgctgccgtgggcgtcgcatgccacgaggcaggccatgcctgtcaatatgccgaaggctatttccctattcgtgtgcgcagcgctattattccggtctgccagtttggttcgactttttcctatatcctgattctgattggtttgtttctgtacagtcaggcttggttcggtgtcggcgtggtgctgttttccctgacgaccctgtttcagctcgtcacgctccctgtggaattcaatgcctctggccgggccctggcaactatcgaaggggagggcctgctttacgaggatgagtattacggcgcacgcaaagtactgagcgcagcggcgctgacctatgtggcggccctgcttacgtcactcttgtatctggcgcgttatgtgatggtctttttgagcatgggcaggagagacgaatgatggaacaaaaaacagcccgcatcattgcgctggatctactggcggcctgccggagggaccgctcctggtcggatggttatttgaaggcggcaatccgtaaaaacgggcttgacagccgggatgccgcactgacaacccggcttgggtacggtgttttgcagaacgcaggattgctggatttttatatcggctgttattgcagccagcagccgggccatctggaaccggttgtgctggatgtcctgcggttgggtgcatatcaaattctgtttatggatcgggtgccggacagcgccgcagtgagcgagtctgtggaactggtcaagcgcagcggcaaagaacgggcggctggcatggtcaacgcggtgctgcgcaaaatttccgccaatcgagagcatctgccggagattcctggccggaatcgggcggaatatctgtcggttcgctatagccatcctctgtggcttgttcagcgttgcctcaccctgttgggggaagaagaagcagaggcttttttgcgctgcaacaacgaggcggtggcaactgccatccagtggaatccattgcgcggcacagaagaagcgctgcagaaagcgctccgggaagccggggtgcagatttgctcccatccatggttgtcgggctgttatgagatttccaaaaccggcgatttgacgcagttggacgcgttccggaacggtctttttctggtgcaggacgccgcggcccggctgactgctttggctgcggacgtaagacccggcatgaccgtactggatttgtgcgccgctcccggcggaaaatcgtttgctctggctatggcaatgcaaaaccggggaacaattcgttcttttgatttacataaatcaaaaatccgactcattcaggagagcgctgcccgtttggggatcacctgtatccaggctcaaagtgcagacggaaaagtatttcagccggagttggaaaagacggcggatgtcgttttgtgcgatgtgccctgcagcggcttagggattattcggaaaaaaccggatatccgtcttaagcgggaggaagagctgaagcagcttccgcaggtgcagttttcgattcttgcaaacgctgcccgctatgtcaagcccggtggcacactggtctattctacctgtacggtgctgccggaggaaaatgagcgagttgtggatcgtttcctgcgcacagaaccggcttttgaccggaaaccgtttgttttgcctgctcccatcggtgcagcggcggacggacagatcacactgtggccccagcgccagggaacagacggtttttatatctgtacactgcgcagaaaatgacccatagagcggccatactgaaaggagagcgtcgtgaaaatcgatatcaagtctctgaacatgcaggaacttgccctgcagttcaaagcgctgggtgagccgtccttccgggcaaaacaggtttttatctggctgcacaagggcgcggcatctttccatgaaatgaccaacctgtccaagccgctgcgcgaaacgctttccgcgcgctatttcattacagtgccgaccgtggaacgcaaactggtctccaaattggacggcaccataaaatacctgtggcgtctggaggatggaaattgcatcgaaaccgttctgatgaaatacaggcatggaaattcgatctgtatttccacggaagtggggtgcaaaatgggctgcgtgttttgtgcgtccacccaagctggctttgtccgccggctggccccttcggaaattctggaccaagtgcttttcacgcagctcgattccggggagccgatttccaacatcgttttgatgggcatcggcgaaccgctggacaactatgaaagcgtgcttcgctttttggaactggtgaatcatccggatggactgaacatcggcatgcgccacatttcgctttcgacctgtggtctggtggagcaaatcgaacgtctcgcgcagcaggatctgcagctgacgctctctgtttcgctccatgcgccggacgatgaaacccgcagcaaactgctgcctatcaatcgtgccgccggtgtggagaaattgatgtcgacctgccgggcttattttgaaaaaacggggcggcggatctcttttgagtatgcgttgattgacggcgttaacgatgcgccctggcaggcggatcttatggtcaggcgcctgcgcgggatgcctgggcatgtcaatttgattgcgctcaacgatattgcggaaagtccgctcaaacccagccgccgcatggccgcgtttcagcagcagctggaggagcgcggcgtcaccgctacggtgcggcgcaggttgggtttggatatcgcggcagcctgcggacagttgcgccgcagcacgcttttcggtggaaacgatagagaaacacaggtgaaacacaatgaaaatttggcaaaaaactgatcagggcgcagtccgtaaagagaatcaggatatatgcgctgcagaacagctggatcaatacactctggctgtggtgtgcgacggtatgggcggtgcccgggccggtgcgctggcttcctctttggctgccggagcttttctggaagcactccgcggcatgctgcggccgggacaggatatcaccgctgtggcgcaggccggcgaagctgccgtagcaaaagcgaaccatattgtctatgaacgttcacgggaggacaaggagtgccgcggcatgggaacgactcttgtggcggcagtgtgtgccgggccgcaggccacgatattcaatgtgggagacagccgtgcttaccggatcaacgaatccggcatctgtgcagttacacgggatcactctgtcgtgcaggatatgctggaaaacggcgatattacagaggaagaggcgcgccgtcatcccaaccgcaatttgattacccgggcgctgggtacagagcgggaggttctttgtgatgtgtttcagctgtcgctcagcaaggacgattctttgctgctgtgctccgacggtctggttaatacggtgagcgatcaggaaatgctgtatgaagtgatccacggagaaccgcggaacacctgtctggatcggttgatggagatcgccatcgaccggggcgcgccggataacgtcacaatgattctgatgcaatacgaagaggaggcggatggctgatatggatgcttatatcgggaaaatgctggatggccgctatgagatcctggaagtgatcggcaccggcggcatggctatcgtttataaggctatggaccatcggctgaatcggcaggtggctgttaaagtgctcaaaaatgatttggcacagaatgcggatttccgtcgccggttccatgacgaagcacaggctgtggccatgctgtcgcaccccaatatcgtatcggtttacgatgtatctcacgacggtgacgccgagtacattgtgatggagctgatcgacggcatcacgctcaagcagtatatggaacgccggggacagctgaactggcgcgaagcactgcactttatcacccagattatgaaggggctgggccatgcccatagccgcggtatcatccatcgggatattaaaccccataatatcatgatcctgcgggacggcagcgtcaaagtagcagattttggaattgcctgcctggtagcctcggcagaaaatacgctgacccaggaagcccttggttcggtgcattatatttcgcccgagcaggccaaaggcggtcatacagatgcgcgcacggatatttattccgctggtgtggtgctctacgaaatgctgacggatcggcttccgtttgaaggtgacagcgccgtttccattgcgattcagcacatcagttccgtgccgctttctccccgggaaatcaaccccgatattccggaagcgttggagctgatcaccatgaaggcgatggcaccggatatggaaaagcgctatccaagcgcagaggccatgctgcgtgacctggatgagttccgcaagaatcccagtatcaattttgattatgttctctctgactttgctgtggaggaaaccagtgaaccgacgcagcatctgaacgcctcagagatgaacgaggtacatccgcactatgcaaggcctcagcgcagagagcccagagacaacagatacgatccgcgcggcgattacgaagatgagtacgacgaatatgacgagcgggagcacagacgccaccggaacaagcgctccaaagggccgatgattgcaacgatcgctgcggcagtggtggtgatcgtcattctcttcagcatgatcctctccagctttgccggaggcggccaggcagaattcgtcattcccaaagtagttggaatgacggtagaagaggccatggcagatgaggagatcagcgaaaaatacaccattgaaaccataggcagtgagttcagcgacgaatatgacaaagatgtgatcatcgaacaatctccggaggacggccgcacaaagaaaggtccaaagggagaaaagtatgtcattcaagttacggtcagccttggcgaacagacagacgaaatgccggatctgacggattataaccagaccagtgccatcagcacgctgaagaatatgagtctcgacctgaatattgttcaagaagaagcctatgacgatgagattcctgcaggcaccgtaatttccactgatccggtgaagggcacaacactgaaaaagggtgatacagtaaccatcgtgttcagtaaaggtaaagaagtgaaaccggttaccgtaatcaattatgttggcatgacactggcgaaagcccaagagcaatccggtgggctgatcattcagattaaagaggtagaaagcgactctgaagcaggtacggtaatcgatcaggatatcgctagcggttctcaggtggaggaaggaacaacaatcaccctcactgtgtccaaaggtcctgcccaacccgtggaaaaaacgatcacaaaatcgattgccctgccggaaggcgagggtaccgttaaggttcgtgttgtggtaggcggcagcgatgttcagtttgacagcgatgtggatcgtgctctgatggaaatcagcattccgttgaccggttccggtacgcagatcgtgtctgtatattttgacggcactttgagctataacgaggaggttactttctcgtgagccgcgggatcattgaaaaagcactcagcggattttactacgtgaataccggcacgcgtatggtcgcgtgccgggcacgcggtagatttcgcaaggagaaaatctcacctctggtgggagattgggtgcaagtgcaggagttgagcgacggaagcggttctgtggaggcaatcgagccgcgtaagtgcgcgttcctgcgtccggccgtggccaatatcgatcagcttgtagtgatcgtttcgcaagctgttccggtcagcgatccctacctgatcgaccgcgtctgtgctattgccgaactgaagggctgcggtgtggtgatctgcatcaacaaatgtgatctggaaagcggcgaaagtttggaagaactatattgcagagtgggctatcctacggtgcaggtcagcgcggaaactggcgaaggaatggagaaactatacgagcttatatctggaaagctatctgcctttacagggaactctggcgtagggaaatccagtattttgaaccggctgcatccgtcgctggggattgaaaccagagccgttagtgaaaaattagggcgtggccggcatacgacgcgccatgtggaattgtttcgcctgaatgagcgtacgctggtggtggatacacccggtttttcttctttcgataccgcggagctgaacttggagctgaaaaaagcgttgccggaaacttttcgtgattttgcgccgtatcgggatgcgtgccagttcgttggctgcagtcacaccaaggaaaaggggtgcgccgtgctgcgcgctctggaggaaggaaagat

SEQ ID NO: 63 - DNA, 1744 bp, Unknown
  16S sequences of unknown bacteria
cacgccgttttcaaaaaacggcccggcaaaggtttgaaccgaacctgcggcatagtatattgccttcaatttcggaaaaagctttgaaacgacggtgccgtcgggagtgggcataccccacgaggaaaaaacaacgtcgatgtcggaaagcagctcggcattgctgtaaatttcgtccgtgggaagcgtgtattcggtgtcgatgtcaatgttttcacgaagcgtatttttagtgctttcaaggtataccgtgtctataacttccttgcgtcccaaaaaaattcctttcatttcaaagctcctttaataaaatcattaagtgtttccgctgtggctttaagactttcgggtcggtcgtcgtgcatgaattcaagcatgagcggaatgtcaaggccgacaaaatgctcaagatagctcaaccatttttccgcgccgtcgcaaaggggatagcgtcccttgtcgtcccagttgaacacatgaacacccaccgtaaagggggaaagcgcctttgcagcctcgatgttttgctcaaatgttttaaattgattgggctgccaataggttctgaaattttcttggtcaacgtcctttaagaatttgagaccgtcggtgtgattctcggtcatggttccgagatggcactcggtggcaattgtaatgcctttttgcgccgcggcgagggatattttctttgcttccttaacaagggcttcatattcgtctttgttaaccttgtcgggagattttgtccccgcccaaattcttatcacctttgaaccgagcgcctcggctgtctccaaatagcttgaaaagggaacggtgttttccgaaaggcggtagtaggagccgtaagcgaacggatcgacgccggccgttttacatttttcggatatttcttttgctttttttatatctccgacgggaacgtgcacgtcggagccccattcgattttgcaaagaccgttttccttgcaaagagagattatttcgtcgggacaaagtcctctgaaggaaatcgaaacaagtccgggataaaacataaaatcacaacctttttactctttggcttattttatcaagtttaaagccgtttttcaagagaatataaaaaatacttgacgaaataaaatattgttgatataatacaagtcgttgacaggctgatgtggctcaatggcagagcagttcactcgtaatgaacaggttgtcggttcgattccgaccatcagctccaaaaacccgttcgcttttgcggacgggtttttacttgtcataaagacaccgtcctttgcatataatttcgggcggaggtgtttttatgatttgcagggtgggcgagctttccgacaaggaagttatatgcgtaaaagacggaacgagacttggtttcatcggagatgtggattttgacgtttgctcgggtaaaatcgaatcggtgataattttcggccgcccgaagtttttcggacttttcgggagggaaagcgacctttgtaaagaagaaaaagcaccacccagtgttgaaacctttgcataagatttgatgacataaccgttatcggagacgacacggttttggtggatttcgagccgccgaaaaacagggaaaatggctcggcttttgccggctttctcgaccgatgacaaaaaaatgaaatttatacttgcaaaagcggttgacttatgctataatacgacggtatcgggtaaattttgcttatcgcccggtatattactcacattt

SEQ ID NO: 64 - DNA, 32759 bp, Unknown
  16S sequences of unknown bacteria
aaaggttgatgtgtacctttttctagttttctgaatcttacttttccaggattcaactcattctttacttcatattcaacaggattcgttccatccggctcaaatggataaatggttccgatcgaatccgtatactgaggatctcccacccccgtttctatcagataataatttgcattatccactagttttacattttcacatgttcctttaccatctgacaatgtcgtaatctcgccaagaattgtaacttcacctgtcgtcttatcttctgcgcaaatgttaaacctaaaacctgccaatacaccgataactgttccataagatgttgctttcttagtaacagttaacgggaatgtgtcggttctctcgtcattctttgctgtataccttaatgtcttggttccttcttctgaatctgatacatgaactgcaattccctccttccaatctcgattcaaatgatatccattcggtgcttttgtctcatagatatagtaagtttcctgcgtaggctcaaaagtaaaggttactttaccatccttgtctgtttttcctgtttttataggagcatagattgccggttttgtgctatataatgcaaactcggcacccttcagaggtttatttgtttttgagtcaacctttactacttctacatttacctcatattttttattgtaaaatgtaacataagggatggtgccatctttcactgcattactgacatctatttttttcacttcatctgatgttttgtatccaaacggagctttcgtctccttcatataatagattccatcatatgcagcattatagatgaattcatcagaaagagcatatccattatctgaagtcggacctaacgtagccactgtatctagcacattacattccggacttgcatacaatgtatattttgctccggctagtggttttgactttccggatcctaattcatacttataaactccaacacggattttgttactattggaaatattgaaatccaatcccgcatcaagtcttccattttttaaagtcgccgtatagatcttattaggctgcgccggatatccggtcggcactgttatctccttcaaataataggtgttctgggtcggatgaaatttctgaatagttgcttctcctttttcatccgttgggccgactttggcaacaggcttctgacattgtgcatcctcgtatagctggaacactgcccctttcaaaggtttcccttcatcatcttttttatgaacgactactgtcgtcgtatcctcatcattataaaaagtacctacgtccaatacttttccttctgtaaggtttcccgcatcaacaggcacttcctttatttcgttagataatttgtaatatttaggtgccactaattcttttacgtatactttgttaagtccgtaatagtagcggatcataccgcttactccttctcctttcgtatccgtcggtccaattttagtaagtaagctggtactgctgcaatccgacttcgaatatactccatatacagcacctggtaaacctagattcttattttgattagaactctttttcacctttagagaaaaatatacaggatcattttcgaatgtaacctcagcagtctcattgggttctacggtaacttctttcacctcatttgaccgattatatccataaggtgcttttatttcttttacccaatatatctcttgtgtcctggtaaactcacctgtgatcgcttctccactgcttgacgacacgctggaagtaataactaattttgtacatttcggatcactatacacagcaaactgggcccctgaaacagcttttcctgttgcagcgtctactttcttaatcttaaccttggaaggcaaaggatcatttgttgctgtcaaaatgatatctgaatctgacgactttgccttgacttttccaacccaattgcctttgtgtttcgagtcgctttgcgtctctattactttatactttccctgattcaagactgtcaccggcaaagagttacttatataacaagcttcataaccgttccatcttaagttatcaacttttttcttgtatgtttgactgtttttattccattcccatacttcaaacttacattgtccgttctgtaaaagaagatctgttcctttctccttttttactacatatagtttgatattctgtacggatgtctttgcagatactgacagcttcttttcaattggatttccatcaaactgtattaatgcgattggctgtctgtttcctccactatcatatcgagttgctttgagctggtaccccttgtatttgatctttacctgaatcgtgtctcccatgctctgaatatacgcataattcttttcatttaatacaatatggaacgaggagctttgactattcgcattgtcaaagacgacctttcccatagtctctcctgttcttttattcttacaagtaacggttcctcttcccgcaaaaccttctacatctgtaaacttcaaagaccatgtttgcttcgtacgataatattgctttccattttctgtaaatcctttccatccatcacttccactaaccgaaagcgttggaaaatctctgttaaatattttctcagacgtataagatttataatatttgttcgcatcatttgctaacgctgtcgctttataatagatctccctgccttcagcgctcattccgttaatggtattttccggaaatatatatccattctcatatccagcccaagcattcagcatatgaactgccatagatgtaatataataatccttatttgtattacctactgagtaagcagaattatagcagcatgatccatagtatctggctccatgatataagacataattcatcttttcctgaagaccttgtttaaaatctgttgacagactgtttgatccataaggtgtttttttcgtggagctcaagcagtataccagcctgttcactccatttacaggtgcatacattacctttgtaagagtagcccatccatcacctgagactttcagataatctaatggagaacccggtgcatttacattaatactatttgctgaatatgtagcaataccattgtcatctatagatagatcgtcatctcccaaatctttaaaattaacttctccatctatcacaaaattcggatcctgataaacagatatcgttcttgtaaattctatatccttatacccttctgcttttgccttcaaaagataggtcactacataatctcctacaattatgctcgcaaaatacccctcatcttttactgacaggtcataatgttctttgtcatattcaattccttctaaaaggtcaaagtcatctcttgttccaacctgataacttacatcctccgccttccagacagctttttcaatgtcctccggattatctgtgacttctgtggtctcttccggggtctctggcacttccggggtttcttctgtcccgccgttctcgtccggattctccggagtctcttcgcttccaccattctcatccgggttctccggtgcctctgtatctccaccattctcgtccgggttctccggtgcctctgtatctccaccgttctcatctggattctccgacgtctctgtgtctccgccgttctcatccgggttctcacttggtttttctggattttcccccacagtacctccgctggttccttcggtatcatccgcgtccacgattactgcctgagtctgtgaatctgttgatccctcacccgccgtctctgtcgtataattttctccagccgcagctaccccgtaggtattcatcgcatccagtggacttgtcgataaaataaggacagccatgaataatgccgtcaatctctttcccatatcttttcgcattggtacctcctgattttttagtatctgtacactgtggaaaaaaatcccagtttttcacacttttttgataattataatcacaggaaatgcaaatatcaatataaaattctttacataatcctagaatttttttgattttgttatttaataaaaggatttttatctataatatgaattattttaacttcacatggataatattatttccacttgttacagctaaatgatgaacagaaaatttgaattttcagaaaagaaaaagctcttgcatctgcaagagcttttatcatgcggaagaagggacttgaaccctcacgagcgtaacgctcacaagaacctgaatcttgctcgtctgccaattccgacacttccgcaaaccgtatgaatttattttacagagctcatactactctgcatgcggaagatgggacttgaacccacacgacctaacggtcacaagatccttagtcttgctcgtctgccaattccgacacttccgcaaaccgttgtgtttttaacgactcaacgatatgtattctatcacaggtattctcataagtcaacagtttttttaaacttttttaacttttttcttacccatgaaaaaagctcctgaaattgtaggagccaatgcggaagaagggacttgaaccctcacgagcgtagcgctcacaagaacctgaatcttgctcgtctgccaattccgacacttccgcatcacgagtgatatgatacctcatcttgacaaaaatgtcaaatatttttaaaatgtttttcaaaaaacacattctgtagattctaattatacccggtttcaaagtatcatttaagaaagcaattcgttgtcgaaaggaaggtaaacatatggactatcatgcattaggaaaaagaattcgcgaagagcgcctgagactgaacctgactcaggagaaacttgcagaggaagttggggtatccactgcttacattggacagatcgagcgcggcgagagaagtcttacactggacaagctggtaaaggttgtcaaccgtctgggtgttaccattgatttcctgctgtctgattacgtgattgcaaccgatgacaccagtatgaatctgctggttcagctcatgcatgaccgcacccaggaagagaagaccctggcgatcaacctcttaaaagttctttttgcgaacaaataagaaccgcattcaaaaagactgcctgactgatggaaacatatcaaatgtatgtcgcatcgtcagacagtctttttcttttgtacgctaattacttaaaagtataccagttcttcttccggtttctctgcactcttgatattggtggactgcagtaccagtccttcctgcccgctgtactctgcacgcttctcaatatgcgcttttgcagtcacagtcagccattgtttggactttatccggtccacataggcagatttgcacaggaaaccgatgaaagccgtatcgtccgcacagcaggtcatagccatacgtcccggaacgaaatatcccttcggcagacgtcctccggtataggccatcgccttaaagcgcatggtcttgccatcgtatttctcaggatgatccatggcatcaatataccagataccataatctacatcagagatctcaatcacatccgcattgatatcgaacggcatctcctcctcgaattccagctggcttccatcttctttttcaaataccacctgagctttcggattcactgcacgcatatttcgcttatacgtagctgccggtgtctcatccgtactgcggttgaagatgatcagatcagaatcctttgccatctccatgaacagggatttcatatttttcagatatacatcgaaggtggttgcatccacagtcgtgatgacctgtgccacgaaccatccctttggcatatacatttcccgcagatagtccagtccccacatacagttgtactctacaatgatctgggtaggcttatacttcttctgacactctgccagaaacatttcattaaattcagacttatcctccagaaccaccagcgtggtgttggtcttctgaagaagttcgtcttcgtactcttcgactccttcttcgcaggcaatgaccaggttgcgttcgccgccggagaaataatcatccgccagagtctcctgcacaaaccgggtcttgccgctctccagaaatccgtgtacgacaaatacagggatctttgccattattatttacctcattattctgtcaggccaaatacttttgccagttcttcttcgttcagatgggaaccgatcacgcacagacggccagtgtagtctgcctctccgtgacgcacctcaaattcttccggaaccatatcaaagtgaagccaggttccatctgtactcggaaggattccttttgcacgcaggataatgccacactcatcgtcatcagacagtctggtaaggatctctcgaagctgttcctcagaatatttatgcggagtctctttgccccagctggaaaatacttcatctgcatgatggtggtgatgatcatggtcatgatcgtggcagccacaggtgcagtccggtccgtgatcatggtcatgatggtcatgatggtcgtgatggtcgtgatcgtggtcgtggtcgtgatggtcgtggtcacagcaatgctcatgatcgtgatcgtgatggtcgtgatcatgatggtcatggtcatgctcttccatcagatgctccatctcctctttcatgatcagatcctgatgttccatagctgccaggatctgctcgcctttcagctcatcccacggagtcgtgatgatcgcagccttcggattcttctcacgcagcatagccacacatgcatccagcttgtcctcagacattttctgggtacgactgatcacgatcgttcctgcgttctctacctggttgttaaagaactcgccaaagttcttcatatacatcttgcatttctgaccgtctacaacagtcacagagctgttcagttctacctgctcatgtgcagccacacccataacagctttggtcacgtcggacagcttgccaacgcctgacggctcgatcagaatacgatctggtgcataagtctcaatcacctgcttcagggcagtaccaaaatcacccaccagagagcagcagatgcagccggagttcatctctgtgatctgtacgccggcatccttgaggaatcctccatcgataccgatctcgccaaattcattctcgatcagaacaatcttctcgcctggaaatacttccttcaacatcttcttgatcagtgtggtcttgccggctccaaggaaaccggaaataatctcaatctttgtcatgttctgttccttctttccttattataatatgtgaatgaaaaagccctcggatcttcaccgtgcggcagatattccaagggcttttgtgtcatacttatttattcagtgctttcttagcagtctctgccagtgcagtgaatgctgctgcatcatttacagccagctctgcaagcatcttacggttcatctcaacgcctgcgctcttcagaccatacatgaacttgctgtaggacagtccgttcatacgtgctgctgcgttgatacgagcgatccacagctgtctgaactgacgttttctctgtttacgtcctgcataagcgctggtaagagctctcataacagactgtttagctactctatactgtttgcttctggctcctctgtaaccttttgccagcttcaatactctattgtgtttctttttagcgtttaatccgcctttaattcttgccatctttcttcctccttaacttcctaaatcttataaatacggtaaaatcttcttcatgttctttacattggtagcatccgtaatggtagctttacgaagatttctctttctcttctgagattttttggttaagatatggctcttataagctttcattctctttaactgaccggttcccgtctttttgaaacgttttgcggctgctctacttgtttttacctttggcatatgttgattcctcctaaactactaaaatattttatccttaacgtttttctgttaaaaacatagtcatgctgcggccctccatcttaggagctttatcgaccactgcgacatctgccatccgctctgagaatacatccagaatctgtttgctgctctgtacatgagccatctcacgtccgcggaaacgaagagttacttttactttgttacccttctcgatgaactttcttgctgcatttaccttcgtgttcagatcgttctcatcaatattcggagacaggcgaacttctttgatttcgatggttttctgttttttctttgcttccttctcttttcttgcctgctcataccgatattttccatagtcgataatcttacatacaggcggttttgcggtcggagcaatctttaccagatccagctcagcctccctcgctaacttcatcgcttctgtgatgggcattacacctaactgttcaccatcctgaccaatcagacggacttctctgtccctgatctgctcgttgatcattaattcgctaatagttgtacacctccgaaacataaaaaaataggtagaaaactatccacctatcatacaaaaggaatgtgccgcaaaacacatttcaatactgtattaacccaggtcactgactgtgctatgtgccaaggtgagagtggatactcttctttcatttcataaccttagttatcttagcacagccagcacctgatgtcaactatattttcgcactttttcaaacttttttatccggtctgtcaagccttccaaaacgctccatctctccacgcacttttgcagccagtgcatccgtaaagcagccttccactgcccgccagcaccagttactgcccacggtggacggcttattcattctggactcgcttcccagtcccagcagatcctgagccagtacaatggtcagattcgcccggctgttccagatggcacgcatcatgacccagttgatatctgcagcatcagtcacacccagataatcataggcacgcttcacatcctctggctctgcagaagttgtccacccgactgcagtatcattgtcatgagttcccacataagccacacagtttggtggataatcctctggaaaataactggtacctccgccatctctgctgtcaaaagcaaattgtaacagcttgattcccggaaagccactgtctgccagcagttttttcacagactcagtcatatagcctaaatcttccgccataatgttctgtgctccgatctgctgctccactgcatggaacaggtccatgcccggtccctgcttccagtatccccgttttgcattggtatctccataaggaatggcaaaataggaatcaaatccacggaaatgatcaatcctgagcatatcatagactttacacagataaccaatcctggcggtccaccaccggtaaccattctgtttcatataatcccagtcaaacagcggatttccccacagctgtccatcagcagaaaatccatctggcggacatcccgccacctctcttggcactttgttctcatccagctgaaacagttccgggtgtgcccacacgtccacactgtccagagacacatagataggaagatctcctataatctgaagtcctgcctcattggcatattctctcaaagccttccactgttcaaagaacagatactgcaggcttttccagaattcaatctcttctttataagcggccgctgcatgttcaagggctttctgctcccgatttcttaatgccggttcccagtccatccaggcttttccgccgctggcagccttcagtgccataaaggaagcatagtcatgaagccaataatcattttccctgcaaaacgcctcatagtcgtccgatgcagtctcctgaaaccttctgactgcctttctgaggatcggatagcgcttctgatacaatgctccataattcacatggtccggtgcactttcccagtcaaccgtcttataatctttcgcttccagataaccggcactttccagcatttccagatcaataaaatacggatttcccgcataagccgaaaaagactgatagggcgaatctccatagctggtaggacagattggcagcatctgccagtatgtctgccccgccttcttcagaaaatccacaaattttcgggcaggagcacccatacttccaattccgtattctgacggaagtgatgaaagatgcatcaggactccactgctcttcttctgctgtgttttatccatcatagcatgttccctccgaatagttgatctgtctgttcatcagtgacagatcacattctctgtctctgcatcaaatacatggatcttattcacatccagagccagtttcaccatatcatcggcacggatgccagtacgggacggtactcttgctaccattttctgtccacagcagttcagatacagataaatctctgaacccatcatctctgccagatccacgtttgcttcaatgttagaagcttctgatatagacaggaatgactcttccgcatgaatgtcttccggccggattcccatgatcacctctttgtccacataagcttccagctccggcttctgtaccgggatcttataagtaccaaaggtcaggaacagattctcgccttcttttttcacaactacattaaggaaattcatctgcggagaaccgatgaatcctgccacaaatttattacacggatagttatacagcatctgcggtgtatcgaactgctgaatcactccatctttcatgacaacgatccggtctcccatggtcatagcctcggtctgatcgtgagtgacatagacaaatgtggtctgcagacgtttgtgaagtgctgcgatctgacttctcatctctgtacgaagcttggcgtccaggttggacagcggctcatccagcaggaatacagacggctgacgcaccatagcacgtcccagagccacacgctggcgctgacctccggacagctcctttggttttctcttcagatattcttccagtcccaggatttttgctgcttcccttacctttttatcaatctcatcctttggaacctttctcagttccagcgcaaatgccatattcttatagacagtcatatgtggatagagcgcatagctctggaataccatggcaatgtctctgtccttgggcggcacgtcattgaccttgcgatcaccaatatacagctcgccgcctgatacctcctccagtcctgcgatcatacgcagggttgtcgattttccgcagccggatggtccaaccagaacaacaaactctttgtccttgatctccagattcagatccggcactacggtatttcctttatcatatgtttttaccacatgtttaaacgtgatatcagccatttttgttcctcctgttctgagtctcccaacatccggatattacttctgcgcggacaccttcgccacactctctccggcaataatgtcaaaagagaccagctcatgtattgcttctttttcttcctcgatcctgtcaaccaggatctccatgctgcgatctgcgatcctgtcactcttctgacggatcgttgtaagtctgggtgtcagataattacccaaatcaataccatcaaaaccgatcaccgagatatcctccggtacccgaagaccccgatcccggatcgcccggatcgctcccactgccagcacatccgccatggcgaatacggcagtcagctccggcatcttatcaagcagtgcttccatggcatgatagccttcttccatggaaaacagtgccggttcatactgctttttcttatcaaatatcatctcatgattccgaaatgcctgttcacatccgatacatctggtaaatgctgcatgcgaccgctccatccgacctcccagcacaccgattctttcatgtcccagccggatcagatattccaccgccgcctctgctgcagcagcgtcatctgtactgacactggacagattcggaaaagataactttgctgctgagttggtaaccagcacacagggcacatccagtcttgcaaaccgttccctgaagaactccagattacttcccaggaagaaaattcccttgggatgtcgctccagacagacactctctgcctgctccacctcattttcttcctcaccgatataatagatgaagctgacaaaatctttttcctcgatcagtccctgcagccgctccacaatggaagcaaataacatattctgtgaacctttcacaatgactgcaatgcctttgctggcctgctgcttcagatgttttgcattgttatttaatcggaaatggtgcttttccaccaccgccaggatcgtctcccttgctttctctgatacatctggatgattatttaatacccttgacacagttcctactgcatatccggattcttttgcaatatctttgatggtcataacatcaattatcctttaactgctcctgcagctactcctttgataatatgtttttgtccgagcaggtatacgatcacgattgggataactgtcagcataatacttgccatcataggacccatctctacttttccgtagcttccacggaaatactggatcaacatggggatcgtcttgtatttcttgatatccagtaccagtgtcggcagaagatagtcgttccatacccacatagcttccagaattcctacagataccagcgtcggcttcaggatcggaagcacgatcaggaaaaaggtctggatcggattacatccatcgatcatggatgcttcctcgatctccagcggaatggatttcataaagcctgcaaacataaatactgccagtcctgctccaaatcccagataaatgatccagatattccacggagtgttgagtttcagactgtccgctgtctgtgacagggtgaacatgaccatctgaaacggaaccaccatagaaaatacaaaaaggaaatataacatcttcgataccggtcctttgactctggtaatgtaccatgcgcacatggaacagcaaaccaggatcgcgatcaccgatgtaatggtgatcagaaggctgtaacacagactctgcaggaatcctttggatgcaatggcattgatataattttcaatacctgcaaaggaatctgcagtcggcaggctgaatgcgcctgcggtggtgatcgctgtctcctttttcatggaattgaacaggatcataataatgggatatacatataatactgccagtatggataaaagtacaacccatatagaatctatcattctctttttcttacccatctactgctgcacctccctggaacgtgttgccttcagctgaatcatggagattgcaatgaccagaacacagaacagaactgcttttgcctgtccaagtcctttccactgggctcctgccctcgcataaaaggtctggtaaatattgagagcaagcatctctgtgaaatggttcggatctccaccggtcagagccaggttctgatcaaagagcttgaaggagttggtcaatgtcagaaatgcacagatggtgatagatggcattaccataggaagctttaccttccagagagtcttccaccaggtagctccatcgatctgtgctgcctcgatcagatcatccgatacattctgaagtcctgcaatatagatgatcatcatgtaaccaatctgctgccagcacatgaggatgatcagtccccagtaacctgcactggtattcaatgccagaagcggttttccaacaatggaaagcacacagttgatcagaatctgccagatatatccaagcacgattccaccgatcaggtttggcatgaaaaagatggttctgaaaatattggttccttttaatttccgtgtcagaagcaatgccaggataaatgcgatcacattgatcagcacgatcgaagcaacggcaaataacaccgtgaacttaaaagaatttgtaaatgtactgtccgtaaagatccgctgataattgccgattccgataaactttgcgtcctttacggtagtgaactgacagaaggacagatacagtccttctatgaacggaagaataaaaccgatcacaaatgccaggaatgtgggcagtacaaatatcggtgcatatcgtttgactgctttttccataaattctgtactcctttctctcgtcagtcagaattttgcgataaaaagggcaggcaagttacttgcctgcccttttcaacggttctgctgtcccgttatctactgtccatttgccagctgatactcagttgcccatccatctacaaatgcagatactactgcatcccagtttgcatcggtctgatctgctgcgtaagcggtcagtgcctgtcctaagccattcttccactcctcagacggcatggttgtgaagttccatgataccggagtctttccttctgcagtgtaagcagtatcctgttttacaaacaggttcggagattcctgtgcgcccttgaacggaataacgaatcccatatcgtctgccatggtcttggttcccagctcagaagttacacaccagttgatgaaatccagtgttgcctgaatatcagcttcatctgcctggttatttacacaccagtagttctctgtaccagtacacagtccctgatttgcttcatcaccagcaccgatatagatcgggatcattgccagatcgtcgtcagtgtatccatctttgccagtcaggttaccatactcccaggaaccattctggaagaagactgcatcgcctgccaggaattcatttctggaatcatcaccggtcttagcagagagttctgccggatcgcaggtgctgttgttgatgtacagatcccagatgtcacggtagttgtcgagataggttcctttgattgcatctgtgctgctgatgccatctgtctgatactcaaagtagatcggcaggtttgccagatgagtcttgaatctccagtcagaagatccatccataccagcggatgtgaatgcagcaaatccaagctcggaagaacgggcggtgatgtcctcagccactttcttcaggtctgcgaaggatttgatatcatcaatggtataaccagccttctcaagtaatgttttgtttgtgatcagtccataagactcgattacatatgcaataccatatacggtgtctccctctttcagtgcgtagttgtcactggtaagctgtccgtaaatatcactgccagacaggtcatagcagtaatccttccagttcgccagaccaaccggtccatttacctggaacagagtcggtgctccgctcttacccatctcactcatcagagttgtctcataattaccagatgctgctgttacaacagttaccggtacaccggtctcctctgtgtaagcttttgccagatcctgccactgctgatcctgctccggcttgaagttcagataatatacagaaccttctgctgtggaagtctcggttgctgctgtggaagtctcggttgctgctgtagagtcaccggaagctgtactgtccccgccagttgatccaccgcatcctgcaagcgcagtcgctgcaagtgcacatgtaagtgtcagtgctactaacctctttttcatattattatcctcctgatcatccttttctggaaacgtttccagttcttatgaatcaatcatacggcttttttcagataaatacaagtgatttttgtcgtccataatcattttcgtcatatttctcattttttccatcacttttttgtgaaatatcacaacaaaaagacgcgatcctctgaacatctgccagaaaatcgcgtcttctttttatacatttgtaactattattcgtggcgttcatccagtgcacagtacggtctgtggtatcccacatatttgtacgcaggacggatgatcttaccattgttgacaacttcctccagtcgatgggcactccatccggaaatacgggagattgcaaaaatcggtgtataaagctcctccgggatccccagcatggaatatacaaatccactgtagaaatccacattggcacagattggtttgaacagatgacgttttctggcgattgcttcgcctgccagacgctctactctctcatacaactcatattctttctgcagtcctttttcctcagaaagccgcttagcataggatttcagaatcacttcacgagggtcggacagggtatagactgcatggcccataccatagatgagaccggatttgtcaaatacttttttatccagcacaccttccagatatttggtcagtgttttttcatcctcataatccggacagcatttcttaatatcagcaaacatctgctgtaccttcaggttggcaccaccatggcggggacctttcagcgatgcaatggaagctgccgtagcagaataggtatctgttccagaagaagtgactacatgattggtaaatgtagagttgttaccaccaccatgctccgcatgcagcaccagtgccacatccagtaccttcgcttccagctcggtaaactctccatccgggcgaagcatctgcaatatattttccgcaatggacatatctttattcggcagacgaatcaccagcgtgtcgtcagcatgaaaatgtctccatgcgcagtaagaatgaactgcgatctgcggcatctttgcgatcagctgcagggactggcgcagtacattgggaactgtcacctcatccgggttggcatcataacaatataaggtcagaatacatctctgcaatgcattcatctgattctgactggtagccttcattactacgtcgcgcagaaactgtccggacaactcctgaagactctttacaatacggacaaagcttctaagctgcttcggtgtgggcaggctgccaaacaacaacagatacgtggtctcttcaaaaccatatctgcgatcttcaaatccctggatcagatcctgtacattgtatccctggaaatacaattctccatctgcaggcatcttctttccatccacacttttatatgaaaggacatcggatatctccgtcagaccggtcagtacacctttaccattggcatcacgcagaccacgtttgacgtcatattctgtataaagttcctgattgatctcgccagatactctacattcatttacaagccggtcgaactgctcatccagttctctgctcaattccatcatggtaatattgctcatacaaacgcaccccatctgtcagttattttgtatacacgtattcacgttgctttccattatacaaaacaagaagagaaatttcaagtgctgattgcaggaaaaagaccgatgcagaacgtcttgcatcggtcttttgaaaatcatttctactctattccaagttttaactccggattaatgcgctttaggtaagaatcaaacaatggcaccgtaaaatcaacttctcctcgtccagttgaataaataatccccttactgatcagctgtgcacgaagcggcgaaattgatttcacaggttttcccataaaaaaggctacatttgaaatagtacagggaagttcaccacattttaccatagcaaaaaggaaatcatgttctctctttgtacaacggtcaaatcgcactttgaaaaaacttgcatccaaaaatgcctgaaattccggcatcgcattttttacatcatcttctgttatcagattttcttctgttctgtcccagatagtattgcaatattcctgaataaaatatggatatccttttgtcactgatacaatagcatctattgcttcctgcgtgtaacttacatccagctcttctgccggttttacaattgctgctctcgcatcctcatctgctaattctgcaacaggaacaaacttaaataatctttcagaatatgttttcacagaaccaaatatctgtaatactttcggaagcccagctccatatatcataattggaagtcttaactgtgacactcgatgaatcgcattgattaaagcttccatctcattatccttcatatattggatctcatcaataaagaaacagattgatactcctgctcttagtgcagtcttacccatctgaacaaaaagatctgtcaaatcatctgccagtagacccgttgtgatatatgccggcatctcagataatccggctgaaaaagtctggtcattgggattataagtgatgctgaaagcctgcaaaatagccatcgctttctgtgcaaatgcctttgccttttcagatgtactcattttatggatcaattgtttagaataacttgatatctgctgtaaaaaacttcttttctcagcaacctcaatatgcacatataaaatatctaacagatctgctttttcctcaattgcattcagcaaaacagtttttcctactccacgcaagccataatatacaactgactgctgtggatacccttttacgagtgctatgatactcttctctgcattcttcaacaattcatcgcgtcctgccagatatttcggaaccgcgcctgctcctggtgtataaggtgatccaaatctcatagattcatatatcccttcttcatattttccttctcttgcaacaaattcattatactatctcaattccttgaacgcaacaaaccatcttaaaaagtggcatatccattttgccttatacatacattattttagaaatatctgaataattccggaggtcttatgagacgcattgcttcctttctatcctctctttccattcagcgcataaccgccccctgcctttgcctgacgcttgtactcatctgtcttttttcctttcagaaacagttaactcccacatctggaattgtgagttccagaaagctgccgatctattgtgtcaataccgaaagtcctaaagttgcgatcagcttcgatgctgcctggggcaacgaacaaaccgagaccttgctgtccattctggaaaagtatcatgtgaaaaccacattcttcatgactggtggatgggtggaatcttacccggatgatgtaaaagctattgctgctgccggacatgatcttggcaatcacagtgagaatcacaaacagatgtccacactgtcagccgatgaatgtaaacaggagattcagaaggttcacgataaagtaaaggaactgaccggacaggatatgatcctcttccgtccaccttacggagactacaatgatacactgattgatacggcaaatagccttggatatcatgtgatccagtgggacattgacagtttagactggaaggactacggggctgacaatatcgtctcccgtgtggtagataatgatcatcttggaaatggttcgatcattcttatgcacaatggtgccaaatacactccggatgccctggaacgtgtaatcaccgggcttcaggagaaagggtatgaaatcgtaccgatctcacagttgatctataaagaaaattatgaaatggatcatgaaggaagacagtttataaaaggaaatgcaaaataagctgctgcccgtatgactttaaaaatttcatacgggcagcggcttctacattttcttcttctccggcagctgtgccagaatgatcgcacagaagatcagcacacagccaaacagttccttaagactcagttcctgtcccagcagcacccagccagccagtaccgagaacacggactccagactgagaagcagggaggctaccgtcggatctgcatttttctgcgctatgatctgtagggtatacgccactccacaggacattacaccggcataaagcaccggctgccatgcctgcaggatctccgtaagcaccggctgctcccatagcagagttggaactgcactgatgatcgcagctgtcagaaactggatcgcggacattttcacgccatccactttcggtgaaaaatgatcgatcaccagaatatggattgaaaatgcaattgcacacagcagcaccagaaaatctcccagtcccaggcgaagactctccgtcatacacagaaaatagaatccgaccacagcgatagctacgcagccaatgatcagcggacgtactttcttaccgataaatatccccagcagcggcacgatcacaatatacatagctgtgatgaatccggcttttccaaccgtcgtaaataagatgccccattgctgcagagtactggcaacagccagtgcgattccacagcagattccaccaatgatcagtgtcttctgtcctgcacctttttctgcgcccgttttccgttgacgatccataaaccagatcaccggcagcaacacgatcgctccgatcaggaatcttgccatattaaaggtaaaaggtcccacgaaatccatgcccacgctctgcgctacaaatgcgcagccccagatcagggctgtgagcaccagcaggatattatttttcattcgatccacttcttttgtctcctcatataagtcttctgaaaaccacaaagtacctgccaggtgttggcacccggcaggcaatcatctgatttccttatgacaactcaaaagctcctgtatataactggtagtaacgtcctttctctgccagcagagattcatggtctccacgctcaatgatccgtccctgatccagaaccatgatcacatccgagttcttgatcgtagacagacgatgggcaatgacaaatactgtacgtcccttcatcagcttatccataccattctgtacaatggtctctgtacgggtatcaatactggaggttgcctcatccagcaccagtaccggcgggtcggcgatggctgctctggcgatggccagcagctgacgctcgccctgagagagttctgagccgtctccatccagcattgtatcatatccttgcggaagtttggtaataaaataatgtgcatttgcaagttttgcagctgcaacaacttcctcgtctgttgcatccagctttccataacggatattgtctgccactgttccggtgaacagatgggtatcctgcagtaccattccaagggatcttcttaaatccggcttcttgatcttgttaatattgatgccatcataacggatctttccgtcctgaatatcataaaaacggttcagcagattggtaatggtggtcttgccggctccggtcgctcctacaaaggcaaccttctgacctggctttgcatacatcttaatgtcatgaagcacgatcttgtcatcgttgtatccaaaatccacaccgttaaacaccacatcaccctgcagtttttcataagtgacagtgccgtctgcctgatgaggatgtttccatgcccagacaccggtacgcaccggggactccgtgagagttccatccggctgctccactgcatttaccagcgtcacataaccattatccacctcttccggctcatcaagcagatcaaacacacgctcagcaccggccaatgccataatgatagagttgaactgctgagacacctgcgtgatcggcatattgaagcttctggtcaactgcaggaaggatgccagaccgccaagggtcagaccgccgattccggtaatagcaaggacagatcccacaccaagagtcagcacatagttgatatttccaaggttcgccatgacaggcatcagaatatttgcataggtatttgcattttttgcactgttgaacagtccgtcattaagaatataaaaattcttcttggactcctcttcatgacagaatacctttacaaccttctggccttccatcatttcctcaatataaccgttcagtttaccaagatctttctgttgttcaataaaatattttccactctgcgctccgattttacgaactgttttcaacataacgaagatcattacaatgatcagaagagtcagctgcgggctcagtacgatcatggaaataaaagtgccgatgatcgtgatggagcagctgaataactgcggaatactctgactgatcatctggcgcagggtatccgtatcatttgtatagcagctcatgatatcaccatgtgcatgggtatcaaaatatttgatcggcagtttctccatatgcgtgaacatctcatcacggatctgctttaaggttccctgggtcacattgatcatcaatcttgcatacagatatgtggctgcagttcctgcataatagataaccgccatcacaagcaatgcccgcagaagcggtgcaaaggtcggatctgccgaggtcaggaacggtgtaatataatcatcgatcagatttttaataaacaggtttccagctactccggcaagagagctgatcacgatagcgatcagtacgatcacaaattccattttataatatttccagatataaccgagcaggcgcttcagagtcttgcccgggttacggcttccgcggcgcttcatgcccggatttccacctggtttctgtcccggtcccatcattttactcattttctcctgctcctttctgctgtaatctgtaaatatcgcggtagatctcattggttcttagaagctcgtcatgcgttcccattcctgagatccgtccctgatccagcacaaggatacggtctgcatcctgtacagaagaaatacgctgggcaatgatcagcttggtcgtatccgggatctcctcacgaaatgccttcctgatcaatgcatccgtcttggtatccactgcactggtggaatcgtcaaggatcaggatcttcggcttcttcagcagagctcttgcaatacaaagacgctgcttctgtccaccggacacattggttccaccctgctcaatataagtctcatagtcctggggcattttctcgataaattcgctggcctgcgcaagctcacaggcatgacggcactcttcctccgtcgcgtctttattgccccagcggagattttcaaggatcgtgccggagaacagtacatttttctgaagcaccatggacacctcattacgaagagtctcgatatcataatcacgcacatccacaccgccgaccttgaccgcaccgttcagtacatcatacagacgcgggatcaactgtacaaaggtagacttggaacttccggttccaccgatgattccaatagtctcacctgagtgaatggaaagattaatatcacgaagtacgcatttttcctgctgcgcttctttatcctgctcgtctccgtaagcaaaattcacatgatcaaactcgatggaaccgtcttttacttcgtagaccggctgctccggattggtcaggctgctcttctcatccagtacttccacaatacgctttgcagaagagattgccatggtcaccataacaaataccatggagatcatcatcagactcatgagaatctgtatggtgtaagtaaacagactcatcagatctccggtggtcatggagccatttccaacaatcatctttgcgccgatccaggagatcagaagaatacaggtgtatactgtaaactgcatcaccggctggttcatgatgaccagacgctctgcatggacactcatcttcttcagattgtctgtagcatcacagaatttcttattttcatggtcttcccgcacatacgctttcaccacgcggataccggtcagattctcctgaacgctggcattcagcttatcatagcctttgaacatcttatcaaagatcggaaatgcgtggcttacgataaatgccatcacgccgcctaagaataccagtgcaatcaggaagatcagggaaatcttcggactgatggatacacacattaccagtgctgagatcatcatgatcggggcacgaacaaacatacgaatcagcatctggtatgcattctgtacgttggtcacatcggtggtcatacgggttacaaggccagctgtggaaaaatggtcaatgttctggaacgaaaaatcctgaatattgtcatacatggcctttcttaaatttttaccaaatcccatggatgctctcgctgcaaatacgccggacaaagttcctgccgccagagagagcatggcaactaccagcatcagcagtcccatcttcaccacataattcatatttcctgcttccacaccattgtcaatgactttcgccatcagcatgggcagcagcacttccagaatgacttcaaaagtcacactgatcggtgaaagcagcgtatctcgcttatattctccgatatatgacatgagtttcttaatcatattctgcctccttcaatccagtctccaatttattgatacaacggatccaccacgactgttcctccggtgtgagccatccgttcatcttcgattccatctgctccagacgattgatgacctcactttgtatcttcattccttcatctgtcagtaccagctccttttgtctggcatcggtacttacgcttctgcgctccagcagtccccgcttctccagacactgcaccacgctgcacacggatgaccggcggatcttaaactctgcttccagctccttctgaaatgcaggttccttcttccaggccttccaccacagatagcccagtacccggctctgcacagaagagatctccagatctgccatctgccgctctgtcgctcttcttaccagatgactcaagtccatgattgccttaatcggatgattctccatctccaaacttatgatcctccttccataatatctcaagagtcagagccattcgcaaaaccgcccaagctctgaatctctcataaacaagttagaactctaacgattatacgttagagttctaacaaagtcaacaaacaaaatatgaaatttctgtgaaaacctgcttactgtcggttcctcttctctttcaaacgatccagccgaagcttcttgatcagatcccggatctctgcggagacggtctctcccctggcagtcataaaacgggaacccgggttgtgggtcaggaaccactcggcattctctgccatgcggttcttcaactgctgctgcaatttctccagccgaacactctccagatccaggctctgcaccttctgtgccagtgcttctttcttctctgcgatattttccgtcacagtagcttttgcaaatgtggctgttgcttccagcagacgcttcttctcagcagcccgctgttccagctcctgcaggatctgctctgcctgatccagcagttttctcagatccatggccttgcggaatgcgcctgcaaaatcatataccatgcagaccgtgatcagaaatgtcataactgacacaaattcactgttgagccagaatacaaaccgctccacctgcggctgcaccacatagaccatcatcacactgaagaatccccacacaatggaggaactcagacaaatatgacctttgtactgaaaatgctggttactgtaatcccagtagcgtaccttgaacaggcgcaccatggcctcaccggtcacaagctccagaagtgtggcgccgatcagacctgcaatatacactgccaccggatgctggtcaaagggcatggtgatcagtaataccagaacagcaccacttccatataaaggaagccagggtccctttaagaagccccggttcacaaaacaatgctgcttgagcgacacatacgtggactcaaaacaccatccaaatatacaatacagatagaaaaatgacagccactggcgaaattcatagtgaaacatagatgtcctctcagttgtctgtgtgcgtatcctatacgctgatgtcagcttttacaccaagtaactctttatttgcatccaggatcggctgcaccacatctttcaggaatgctgtcacctgaatctcagaacgtccagtataacgagccggatccatgcatgcctccagctgttccagtgtcatgttaaatgccggatcagctgcgatcagctccagaagattattgtccttaccttctactttcacatttcttcctgcttccatggaaagctcacgaatacgctcatgcagttcctgacggtctccgcctgcttttactgcgtccatcatgatattctcagtcgccatgaacggaagctcacttctcagacgtttctcgatcaccttcggatatactaccagaccatctaccacgttcaggcacagatccaggataccgtcgattgccaggaatccttccggaacggaaagtctcttgtttgcggagtcatccagcgttctctcaaaccactgggttgctgaggtgatcgccggattcagcgcatccaccatcacatatctggacagagaagcaatacgctcacttctcataggatttctcttatacgccattgcagaagaaccgatctgagatttttcaaatggctcctctacctctttcagatgctgcagcagacggatatcgttggacatcttgtgcgcacttgccgcaatacctgccagtacattcagtactctggtgtccaccttacgggagtaagtctgaccggataccggtacgcatttctcaaagcccatcttcttagcgatcataggatcgatcttgtcgatggtctcctgatctccgtcaaagagctccaggaaacttgcctgggttcctgtggttcccttggatcccagcagcttcataccatctaatacatattccacatcttccagatccatgcagaactcgttgagccacagagatgctctcttacctactgtggtcggctgtgctggctggaagtgagtaaatgccagggttggcagtgctttatattcatctgcaaattttgcaagctcagcgatcacattgatcagctttttacggaccagacgaagtgcctcggtcatcacgataatatctgtgttgtctcctacataacaggaagttgcacccagatggatgattccttttgctttcggacactgtacaccatatgcataaacatgggacataacatcatggcgaacttccttctcgcgggcttttgccacatcataattaatatcttctgcatgggctttcagttcatcgatctgctcctgtgtgatcggaagtcccagctccttctcggtctctgccagtgcgatccacagctttctccaggtgcggaatttcatgtcctgagagaaaatgtactgcatctccttgctggcataacgctctgataacggactgctatatctgtctgtgctcatgtttttgttcctttctgttttgtttaaattaattatatccacagtgctagcgctcgtagtcgccgcgaatatcctctttcgggggatccagcggatattttccggtaaagcatccgctgcagcagggaagtccatccaccatatctttcaatctgtccaattccagataggcaagggagtccgctccgatgatctgacgaatctcctccacagaccggttataagcgatcagctgctcacgggccggcacatcggtaccgaagtagcacggatacagaaatggcggagagctgactctcatgtgcacctctgtggctcccgcatcccgaagcatcttcacgatccggtcactggtggttccacggacgatggaatcatcgatcatgatcacacgttttccatttaccgcttctttcagaacatttaattttacctgcacactggattcccggttgctctgcttgggtttaataaaggttcttcctatataactgttttttacaaatgcggttccataaggaattcctgactgaagagaatatcccaatgccgctgcattaccagactccgggacacctaccaccaggtctgcctccaccggactgtccatggcaagatatttacctgcctgaatacgggaactgtagacactgatgccatcaatatgactgtccggtctggcaaaataaatgtattcaaacacacaacgtgcttctttttcttttggaagacaacgactcttgtcagagacgatgcctgtcttcggagagatgctgacgatctcacccggctccacatcacggacaaattctgcgccgatcgtatgaagagcgcaggtctcggatgccagaatgtaggtgttatctctcttaccaatacagagcggtcggaatccgtaaggatctctggctccgatcagctttcttggagacataacgaccagagaataagctccctggatcttatccatggctcttgcaactgcttcttctgcggattttgcattcacacgctctctggcaatatgataggcaatgacctcagaatcaatggttgtctggaaaattgctccgctgtactccagttcatgccgaagctgtggtgcattgatcagattaccattgtgggcaactgccagagtacctttaatataattaaggaccagcggctgtgcattctctctggtgctgcttcctgccgtggaataacgggtatgtcccactgcaatatcaccatgcattccttccagaatctccggggtaaatacttcattgaccagtcccatgcccttgtgggtcgtcactttacggggtccgtccgtatctcctactgcgattccgcagctctcctgtccacggtgctgcagtgccagcagtccataatatacggatgaggccacatcgcctccatcgaaatcatagataccgaacacaccgcactcttcatgcagcccattcagatcttcttccatttcaaaaaccttcgtactttccatccgctgtcatccttcctgtccgattttataaaaaaatctgcgttgtacgcgaatagtataacttgcgacaatgggaatttcaatattttgattagaattttttataaattgtaacttatttataagaaaaccagtccaattaaactatctctgattaaatctggataaaaactgtctggtccgctcttcctgtgtatgaccgaatacctgatccggtgtaccctgttccacaataaatccattatccataaatacgacctgattggccacatctctggcaaatgccatctcatgggtaacgatgatcatggtcatcttctgatctgccagtcctttgatgaccttcaggacttcaccggtcagctccggatccagcgcggaagtcggctcatcaaagcacagaatatcagggcgaagggccagggcacgggcaatcgccacacgctgacactgtccgccggacagctgatggggataattacccatccggtcagcaagtcccatatctttcaacagctccacggcctgtccttcaatctcatcgtggatctctttctttctcactttataatccggctgttccttctccagcagttccttggccagcataacattttccagtgctgtatactgcggaaacaggttaaatgactggaacaccagtccaaaatgcagccgcttcttacggatctctgcttcctgcgtggaggacttctgtgcagcgtcaaacaaagtatctccgttgaccttgataattccaccatctggtctctccaggaaattcaggcagcgaagcagtgtcgtcttaccgcttcctgaagaaccgatgatagagagcacctggctcttctccagagaaaagctgatgtccttgagcacttccgtgccttcaaatgatttgcaaatatgttctacttccagaattggcatcttcttctccctcccttacctgaaataatccagtttcttctcaagctgtcctaacagaacggtcagaacaccattgaagatcagataataaactgccgtgaagaacagcggccagatggctcctgagattccctgggaacctttcatgaaagcctgtcctgcccagatgatctcctgcagtgcaataatacgtgccagtgaggtatcctttaccagcgtgatgatctcattggacatgggcggaacgatccgcttgatcatctgcagtaaggttaccttaaagaaaatctgtgctttggtcatgccaagcaccagtcctgcttcttcctgtcccttcggcacactctggatccccccacggtagatctcagaaaaatagcaggcatagttaaaaataaaggatacagcagccgccataaaacgtccggtctctccgccgccccagatcgtctttccaagaaccagccctgggaaataatagatgatcagaagctggatcatcagcggcgtaccacgcacgatccatacgatcactttggtaaaataactcagcggcttaaactgtgacatagaaccgaatgcaataataagtcccagcgggaacgcgccgatcagcgtcaccaaaaataaccttaaagtctgtaaaaagccgatgttcagtgaatgaacaacgatcggcatctgttgtaatatcagttccatgtaaatccttctcctatttctcttgtttattacgcacgaaagcagtgcagttttcgcttacgttccgactgcactgccataatggttttcatttcttttcaaacagaacttatttgataagtgctgcctgtactccataggtctctgcaaccttctccatactaccatcctcaaggctggttgtaaagtaatcattgagtgctgctgcaagatcggagcctttacggaagcctacaccatactcctcgctgttcaggccgatggtgtaagtcagatctgcatatccggttccctcaccgatcatagcacctgccatcagggaatcgatgactgctgcatcagagctcttggaagcaacctccatcagagcatctgcctgagaagataccggtgtgtagttcaggcccagagcgcttacctcagcctctcctgcacttcctgcttctactgcgaagcttaagtctttgagactctcttcatcctgatactgatcagctacatcagccggaacaacaactacctgtgcattgttcagatatgcattggtgcactccatagcactggtaacttcgtctgtcagagtcattccgttccatacacagtcgatggtctttccttcaagctccaggatcttgttatcccagtcgattacctggaactcagcagttacaccaaggctctctgcgaatgcttttgccatatcagcatcgaatccgatccactcgccattctcatctttgtaatccatcggctcaaactcggtaataccaactaccagagttcctttttcttttacatatgcaagatcgctcttagcatctgctgctgtgtcttctgctgcctctgcagtatcctctgttgcctctgcatctgctgctgtatcctctgctgctgcatcagttgatgcggatgtatctgcgctgcttccacaaccagtcatcattgctgcggtcatggctcctactaacataagtgctactaactttttcataatagatcctcctgttgatcgttttgtatgctaccactctaccatggtaaagcaatcaaatatgaatgaattatagcaagcacttctataattgtcaaccagttttttgacgacttctgtaatcttcttcccagcgaagcagttttttctgaggatccgtgtcgtctgcctccggtgtacgcgctttctttccatttcccggacgttttcctgctgccagctgttctgccagctccctgtattttcttgtatcttcatgaggagcgaactgcatggacgtttcaaagcactccactgcccgttcaaacaggaactgccgcacatagcagatccccagattgttccatactgccgcatagaactctacgccaagccgggtattctgatgcatccgcaggattcttcgatactcttccgctgccgcccattcgttgcggctgttcagaagtccatccgcccggagctttaagcgctcctgttcctgcatagtaccgaggctcttcagctgctcccccagctctgccagttcctgattggtaaacagatccactgctcccacaacggagatcaccagattctgaaaattcgtcccggactccttcccattgcggatccttctggcaagctctgaagaaccgatctcttcctccagccagcggcacagacggtcatcgaacatctgcggctctgccagacagatattgtgatacaaaaaccatgccagttcttccagactgtacatattaagacccgcctgttccagaaaatacggtgtctttgccctgcggtatttacagatcgttaccagtgccatgaccgtcctcctgttcttccatcaaaaatgattccttccagtacagatctgacgcgggatacaactcaccgaagcccaggtctgtcaccttcacctcacagcggtaccggtctgtaaaatgcgcctcgaccagtactctggaagctccatccggtcttgcaggcagatccgtcagctggaaccgctttctcaccggatctccacccatcatggactgaaagtaaaattctaaaatatgatcttctccccgcagcagcatttctgtgtgacagcccgcatcgtaccagctgcatccggcactgatcagcgtgtagatcacttcttttccatttttgatgctgcggatccccacattgtgaagcagtgtctgttcatttaaaaataaatacttcttctttccactctgatcccccgctgctgcacaggcacctctggcatgaatctgttccgccagaaagactctccggtgaaagcagatctcttcccggcttttcttataatctctggcattaaaatctgttcccgccagaaagactgccgacaccgggccacctccaaaccgctctttggccagctgtgccagcttttcgtcccggcttccttccagaagagttcccacatgccagtattccggctctccagccttcacaagcatgggcatggcccgtcggttcacttccagccatgtagccttgatctcatctgtgtcaaattccagaagccagacccggtgctgccagatgtccggtgtctgctcc

SEQ ID NO: 65 - DNA, 32759 bp, Unknown
  16S sequences of unknown bacteria
gcttcatgttcgaccatatcctgtgcaagcgaagttcggacatgggtactgcttttttcattttccgataacacccgcacgacatggtatgcccgttcgttaggtctgttcctctgacaattgctatccctccgcactcgcattcgcaaagccaaagccttgcggaattcttgccgtggggcggaagagattccaatgccgtcagccgtccgaagtgctgtcccgttaaatctttgaacctacccattgagcaaactcctccaatcgtccaccatcagcttggcaatgtcgcccttatgcttgagtgcgttcatgactttttcgtcgaccgtccctttgcagaccagatgaatgtacagacactttttcttttgtccgatgcggtgtatccttgcccgcgattgctcgtagttggagtagctgaagtccaacgagtaatacacggcgaccgaagcggcggtcagcgtcagtcccatacccgttgtctgaagttgcccgacaaatacttgcacgtcctcctcttcctggaacctgcgcacctgctccgctctgtcttttacgctgcccataatgagcgagtacccgatgcctttctttttcagcatccgctctatcgcctcgatctcgggaacgaaccttgcaaagacgacgagcttcttcccctcgtccatgcacccgtccacgatatcctcgagcgcatcgagtttcgcctcgctcaccttttgcggctcactcatctcatcgctgcgaataaatccgcccgtgcattgcgacagtcgcaggagctgcgtcagcacgtttctcgccgtgacttcgccctctgcaagcaaagcacagcagtcgcggttgaggttgtcgtatatcacccttgcccgctcttcaagccgaatgctccgtacttcgtcaataaacggcggaaggtcgacggcatcctctatccgaatacggaatgcaatggcgtgtactttttcgaccaactccgcaaggttctgataaccgatgacctggtgccgctggtacccgccgaggatcgcatacttgtttcggaacaggtaataactcgtgccgagaatgctttcgtccaggaacttgtactgactgaaaaagtcgagcgggctgcctgtcgtcggcgttcccgtcaggatcatgttgtatttcgaaatccgtccgagcctgtgcagggctttggattgcgccgtctggggattcttgattttactcgactcatcgcatacgatgatgtccggtctccatttcgccacttccttttcgagccgccagcagctttcgtaattcaccacgatgacctgcaatgccgtgccgttcatatactcaaaggcactcttctttttatcgagcgttccgtccaacactgtcagcgcgtatcggaaatccgcgaattttcggaactcttcttcccatactccgacgatggatttcggacagacgacgagcattttatggatacgctcctgttcatacaacgtccccactgtgctgatggtgatgagcgtcttgcctgtacccatgtctgcgaatatcgccgccgcacgaccatcttcaagcatttcgagcgcaaagttatatgctctgacttggtgcgcatataaggtggctttcactctcggctgggtatttatcgtctcgtatctctttgcgacagccttgctttgagatgacggttctattccgtcgccgagcctcgcgccgagcagttccagcgtccgtactgcttcgtctgtgtacggaagtacccatgctttgtcgtccgcatcaaagtatcgccccggaatgtttttcagtccgtctcgataaaggtaggcatcatacacgcggagggtgtcagatgagcgggttgcgtacattcatcccctcccaatcaatcacctctgccatcacttccgctccgaatatttccaggaggcgcttactctgttcgtagtcaaacgcaccctgccgtgcagttttgatgaactctctttgcttcatgttcagttccaatgccaacagcatgagactgactcttgcccggcgcattgccatcgccaatagtgctgcttttactttcatttgtctcctctggacggctcgctgaattttttgagaatagactgcatcgtctgaaagtcctcgcccgtgagccgcgtcgctaatttttcaagcaggtttttctgctctttcgtcaaatactgtttcccgattcgatagccatctaccacatgaacgcctcctccgttcccgagtgttgtgtaaatcgggtaagacagtgtaagctcttggatgtcgcgttttatcgtcgctcttgaaacggaaaactcgaacatcagattgctgatcgtatcgaatcttcgttcgcaaagaacttcgagtatctgtctgcgacgctcatttgcattcaactgtctcacctcctttacctttgatggctgtattctaaaaggcaaatggctcactttttgaaccatttgaaaaattttctaaatattttttttggggccttggacgaacaaaaaaagccccgacagatcggactcctataatggaatcttttctgtcggggcttctcgtttccggcataaccaccgatatttcagatatatgacctgggcttggatttatagagaggcgctgtttcagccacgaccatgcccgtcgttatacgttattcagttgtcatcgtcctcgtccaaattctccatgcccggcggtgcgtatgtatcacatcgttcgtgacgcctatcgagcatcctgctgattgaactcaccccgcatttggggcaatctactttgactactccttgcttgttcttaaagccaactgtctttgcgccacagttacggcaatgccgtataatgggcttccatttttgcattcaaggtttccctccttttcccgccggcacgagccttgaatttgcctatctgcgcaagcagggtcgggaaagtccactgccgaagaaaggtaactcgcgcctccgttgtttactgtatccgacaacacggggctatttattgtcggggtcagactttatgagccaactttgggaggtctttccattcgataatgggaatgcggacgcagccgaggtcatatcccgccacctgcattacgctaccgcatttcgaacactcgtaccatccctttgtttcttccagattcaaactcttattgagttcaccgcatttcgggcatttcacgtttgccattctttttccctcctttcacttccatacgcaaatatgtgccgtcgtgaatatacgatttcggataggttagatatatctgtttcccgaacagcgtttgcctggtgcggatcgtcgaaccacaattgcagcaatacgcatcgctgtaaaacagtccaagccgcacccggatatcctcaccgcaataagtacaatgtcgttgcttttcttttgccatcactgtcttctcctcacattattttaggccttacaggtcgttgcttcgtcatatctacctcacaataagtctttcagtacctttaccgccactccttgtatttggcaactctccacgatgatatccttcatccgtttattctccgggtgcaagcgaatacagccgttctgcaggtcggggaaaaatcgtttcaacgtcacttcgtcgtccaccaaagcgacaacgatctgtcctggctctgccgtcgcctgttgccgaacaacgacaaggtccccgtcttctatccccgctcctatcatggattgaccgctcgcgtgaagaatgaagaacttccctgcacccaaaagcgacgttggaagtttgatgtactcctctatgttctcctctgcaaaggtcagcggaccacaggaaacagaaccaaccacagctacggatacagtgtcgatgttcatcttggctatcgcttccgtttcatactccccgtcctctcgcgtgatgatgcctctgtctatcatctcgttcaagtaccgggacacggtgctatagcaacaccctacaccggctgcaatctctctaatggatggaaaccatccacagctttcgtatgtttgctcgattctcttttttatccgctgaatcaatgccgcatcttttgatctcatgacactatcctctttctatctgcaacactttgttgcagttacagctatattatatatagaacatttgttcgtgtcaatagaattgtaccaacataattaggggtgtgcaaaaacatgcacacccctaaaaattaaaatacataaaaatcatttactctggttgagtcctatattaatcctctcaccagtgttaactaatcgaataaacttccccagagtaaaccaacaatcctgcttatacaatcatgttttccttcaacttatccactatccgaagtatttctttcacttggaatttagaaagttgcgcataaatcccattacaatagttgacagcagcctgtaatgacttttcctcactatagaccaaaacctcttgtgctttcccgcggacaattaaagattcccagtaagcacttcccttattgaagatataaacctcatcacttatgccgttatcaaatctctgttcttttttcgccctcgcattttcggcatcaagttcagcacttgttgccaagtattcagcaagattttccgtaatttgatattcctgtttcattataacctgccaacactcttcttttttacaataagtttcaatgttagccgtcgaccgattttcatcatatatcaaatcaaatacaagctttccaattctggcaatatcagtttcaaaaatatcggaaaccttctgattgtcccaaatttgcctataatttattctctttttggcgcgttgtgcttcataaacaagttttgaaaatgtataggcaacgatttggggtctatacgcacgacgctcttggtaccattgttggtcagagatcacatgctctatataggcaaacattattttcttgccaatcaactccttataaaagagctcgttaaatactgtattgtccttattccactgtttcaccatgttgttgtggaagtgcgcagcatttacctccccaccccacgaaacataatagggcaacatcgctgcggcattcatatatttcgccaaatccgtaagtgtaaacttcttatcctttggccttaccagtttataatcgtccttttgtttcttggtcatttgcatcattggctgttcgtactgcccacgggctctctcaaagaaccacagcggctgaaccaatcgtccactttccaatggagcatagagttttcttgaaaaaccttccatacgaacatagaaaggatggcttgaattaagatctgctgttttaactttattctgactatttgcgtaagtcgcaatatttcgtatcaattccggatcatcgttttttaataccgtgagcttcatttgaacgaaaattcccgataaatctgccccattcttaatattcgttgcggcgagagttgctgttgtttgaccaccattgattatttgcaaatctgtaaaagaagtaatcatcaacccatgaataggattgttctctaattcaatactctttgctgttgtcgatattccattattatatgtaaaaaatcttgatttttcatttagaattgtaccacgtatacctttgttaactccaccattgaattttaagaatgagcgtacattggcttccaaaagcgacgcattatgctttttgtatatgtccgcaagaaattgtccgggaacgatagccaaataggactcatactgatcggtttctatttcggcttttatacacggaataccctctattccaaaatcagaacatcttatgataacttcttcttttgcaaagcctgcaagttttgacctatatattccttcaatatcaagcacatccaacgcaactttgaacgtttggaagccataagtataatcaggcaaatcgagtgtctttacggctttactcaacttgtccgtactaactacaaatagatgtattttatatatatatcctatattagccctgatatcgcgcgccaactgcactgccgggttcgcctgttctccgttcacgaaaaaacctttcaaacagttttcaaaataattaaggagcaattgggtcttagaattaaggaattcattggttatattctttacttccgcatcgttgaagtccgcaatcaataagttcaatgtatttgcgggtaagtccatatatgcagcatctatccgcatattcttgtatgcacgatttcctttcgtaaactcgtaaaaacactgcgaaatatcggtaattaaagaatagtcgttctttaatatatcagccgcactatcaataaaaacttcaattggatacctttgtgtattgatggcttcagcattgatatcatcgttaatataactttctctgaattcctctatgttcatcatcagttctccttatactgttctattgctggcaatgaaagttcgtatgaaatattggttatctctgaaaacggaacttccttatgagtcaatcgagggaaaccattaccaactgaatactgagcaactgaatcaacactataccgataattatccccctcattgttgaggcaatatccataggctactaacttggtcaaaaaggcatcgcgtaattcatcttccttaatctgtgaaactatgctgtccattaactctgacaccatacattcaccatcatcataagcatcggacattttttccacctttatggtaaccaaatgcccatcgacattcgactccaactgtgaaagcgaggtaattactatcgtcgaagacttaacagaaagcgtttttacttcccaccaagtatcgttaatcgaaaagtctttcgctgttttgtccggcccgccccaaccctttatagcctgttcaactccaaactgcggaatcataatatgatttaaaacaaacaactcgccaaataagcctttatacgcctcttcagtcataagagttgatgctcgttgaaacatttttcgccaagagtaaagcctgtttttcacggcaatcatagcatcggcatcatcagtcttggacaaagcggccgcaataaggtcattccctaaaatgtaaaaaatggttcttgcacgatcatcaatcaaatcaacacatgtccaaaataaattcgtattctcagaccactgcacaaccttcaaagtatttgtagaatcaatcagcggtggttgcgatttagataaaaacgcaaggcgataattgccatcgctgttttttccataaaaaacacctatgactgaatcgtctgttttagccctgattagattacagttgctccctgtaatatcctcgaacaatggtgctatatcaatcgttttcatattccgaatcctcttcaggctcctctcgttcctgctttatggcattcaatttaactttatttgctctgtatcttaatctttcgccagtctcctttttaggaaacccaactgcaaaacctaatacacacggcaaagaagacaaattgttaactgcagctatctcccccgcattagcattggatggagcctgcaattcaatcgggtatataactaataatggttttctatcctctattgacaaataatctgttaccgttaaccccgatgatggtttgcctgtttcaatctctctccgcatttcatttgctcttgccatgtccatttgttctctggtcaatccgctgttaaaaatattagggtcgatcaatcggttgttattatcgccaattcgtaaaagttcttgcaccccatctctacgccggaagtaacgttttactaaacgcacaccctcaaaagtttttacactattggaagagcctgacgcaataactaaatcccacgatggaaatgcttgacttttttcgatataatcggccaagttatctacatcaaatttaacattttcgtatggaatttgaagttttcttataaactttgctacatgcagcttatcgatattccgaatcatatgccgtgacgacttaccgtcaacgattggaatatcttcccaaacgaacccggcttttgccaattccgagaaaaactcattgaccatgtttatgtttttctcatttttagcgcaggtcgggtacaactttgatgtatccgcataagttccaccatagtttaatattcgaataatttcatccgaattatacattttgtttcggcttgttatcaaaagcgatgtgtttaatgtttctggcgattctttaatcatcaagccgaactcggaaggtttactttttcttaacgccatctccctgaactgatctttcaagtcttcgactgcatcgactacggctctaaaattcataatgtttatgggagacatgtaaattcggcacaaatcttcgtaccgcggtctgtacccaaaccacctacacatttgaagcaatgagtcatatgcagatgaattccgactaaaataactaaccattaatccttcaagcgtcaaccccctcgacaatacatacccgccgattgcaatcacccttgcaccgacccccttataattgtcataactaaatcgctcaacttttttctgacgattattaataattacaacattaaactgctttatttcgttataaagccctccttttatttgctcccaactaatggtctcgcgtatatcggcgtaataatcgggttgtccctctatatattgcttatcacccatataaagcccataaagcattgccatgtcttcgttctttataaaatcgggagtagatttatagtcatcttgttcaataatatcttttagacgattaacatatgtacccacaaccctataaatttgatcatggaaatcgttcagcacagatatatttatcatcattgagcgatgtttctgccccgcacctctaattgtccgtataacattatttattaagaagcaaagtattgcctctttcatactctgtggcatagcatcaaagcgatttataccaaccttatgtttaactggcaagaaatattgttcagactcatccagttcacgaatataacgagaatttgactcgccgctataagcaaacacttttgttgccccgaaatagtttgatggcggatttagtagaactatgaaatccgatgggaataaatccttaaaaaactcatcatcttcagggttgataaaaatattagcaaaaggtgtggctgtataaccgacatatgtcgctatcgggaaattgttaaataggtttcttatgtgtccatttattaccgatgcggaatactcttcgggcttttttgtattaatagaagcattgtccgcctcatcgtcaacgattaaaatgttatcacaactaatgttgtgctgtcccggcttgagccactctacgacttgttttaagacagagccgtttttctttacgacaagcactattggcttattaaaatcgccactcgtcgcatttaaattttttttgacaaactttacgaaatcgttttcattgttcgtcaaaggcacagcgtagtgatgctgcacttgatcatctgcgctgacgcctacatatgtaatctctgcaccgccacctatggtatcgctaattgccccaataaagccagaatcaacacggctctgtgtctgctgacgcaatgaatccgtcatccccgccaataaaacaataatcttataaccataatcgcaagcaaggttaatcaaaccaagatagttggctgttttccccgattgcacatctcctactaccagtccccgttttttcctttcacttacattcatcgtcatttccgggttggcacattgtttcaatgttcttgcacaatcaagttccattcgatgtataactgactcatcaaagtcctcacgccttaagtatcttttatatcgctcgaaaaagccatctttcaaactatactttataagttccttcttacgctcgaaccattttccatcattttcgtcatttacaagcacatcaggttcactaaccttaatgagaggatgattttcttcatatcgtattactatttcatcacgaatagacatatctgtcgagccaagcgtcgcaagcactctatcagctgttgcgactatttcggtgtgagtatgagatatcgtccccaacattatttttaagatgtcgtaggcattatttaataaggtatctttatccattttcttgcaacctctttagtagttccgtctttttatcagcaatagtcttgtaagcttccaagcctaataattccattaatttattggcttgttgttctttcgggaaaaagccaacacattttaatacttgttctactaaaacatccttctcagcatcgtccatactgttaatgatattcagggaatctattacatcgttctggatgcggtatttggggatgcacgcttcaatctgggacaatagaacttctaacagctcattttcctctgttcctattacacttgataatgcttgtataaaaggattgtcacgattgattacatatcttacattcccatcgtgttcattgattttatcccaaattttatgttcaacagttgcctcttttaatcctggatttttaaccgtacgcttgctacgaacaactgagtcctcgactgctatacgaattctatctcttattttatcgggaatttttgctgaagacttctttacatccaacatccaaactgaatcaagtgtagatggtatgtctacctgtattcgtgccaatttatttaattcactgcgaattcccattcgcatccaactgccccaagaaataagccttttattcctatataggtaaaagccttgctcatcgaatatactcttcggatttcccaataatgccttttcttctgttgttagtgtgtttgcaaaaggtaaggtataaggaataatagtaattgttgaaccatccacgattatattggatgtccgccccgtttgctgtctcccgaaggaatctgttaagaatggatcacgacgctctatccttttttcattgtaaaaaatcttaattttgttataaaatcgatgaaaaacaaattctacatgtttttttgactccgcaacagcttctcggaaactctcctcaaagttctttgcgagcccttctatcttatcaaaattctcccaaataaccaatgtacccgattcatagttgcgtaaatcatttattcgtggcaatgaatcaatttcgtcttggtctaactgcaataaccataatttgtcatcaattaagtccaaatcaaatgccattgcacgaattttaccatattttttacttgcaacgatgaattttcggcactgtgataatgatgctgatttaagcccaagaccaaacctcccgagttcaagctcacactcttctttgtcttctcggtttgaaccaaacagcatagcattgtctaattcctttgtagtcatgccgtatccattatctaaaatacagaaaaatggaacatctgccagtgggtctgaatagattttaatttcagtagcctcagccgatatactattatcaataagatcagcaaccgcagtcgaaaaactgtatccgattgcccttaatcctaatagcagcgttttagctggaaattgtctttctacagactcactcatttattaatcctccgattttctatatccgatcgaattgataatctttgacatttgatttaattcactaatcgaaaatgaatatattcttggtgtcccttcaatatcggtaaccaacattacctttgcaattttagaaaaatcgttacaaaatacaattttattggtttgcaaattgaaataaacttgcttcgtcgcagtgtgacgcactatcacatagtgcctttccccatcaaacgtatattgtatatcatacaacgcgtaagggtattcttcagccaatattcttatgttctttgctcctctggcgtcgagttgttctctcacgatagtaattgctttttctctgtcgaactgcattacttcacaaaagttttctggtccaacactgtcatatccgcgtttttcacgtagcgctataatttccgaatcataggagtccgcatcttcattaaaaaccgtggaaaacttattccctacaccacgcctattgataaagaccttggaatacggaatcccattttcacctactattgttgcgtcaaaattaaacacgccactttcgtcgtcgtattcgaacgcttctacgataaacgcatagttgagtaattcagcagatactgcctttaagaccaatttattatcaatttcaacctcactatcgttataatgcaagctcatcggatagtgaatttttaagcgcccaaaatgacagttattagggtccgtttcttctcgtatgtatatgcaaaatgacgagactcctcttaaaaggattccatttacagcaattttatcaaacacgaacacgtttgttatccgtaccaacgctcttgacttagacagtaattggctaataattccttctcgactatttgggtgaatattttccggcaattctaaaatatgtgataactcctctcgaacaaaggccccctgctttaatggggttgcaactgttgccgtatgccctgtttcgttatcatttttaatgttgagatatagcgattttgtatcgatcggaattctaattatcaatatttatctatctcctttgcatacttattctcaaacatcgcttggaatatggcttgcaacacattgactacgatagaatttcctatcagcttgtttagttttctataactgaatgcaagtcccgccgccgatgaatactcctcctctgtaaatcccattagcaagaatgcctctcgcagagtcaatcttcgatatgtatctccctttatccctttgtacctaaacaatgccgctgtatgtgtcctgtccatattgcaggttattgttcgaataatcgtatcatcattaatctcttttccattgatgcgccacatttcatcacgagatggcgttttgttgagctgcgccatatccgcttctgccctatacatataattggattcgtaatcgtctttaatgaaatctcttatgcggaactttcttgggcgttgaagttccctaactcgatgttctatcgacaatggttctccaagatggcttacaataaatgctctctctcgatcttgagggacgccaaagtccaatgagttcagtatcatgcactcatcactactataaccaattgacgaaaggaattcaagccattggtttaggtcttttatattcgaagacgcttttattgtttttacattctccaatagtagatattccggtaatctattaagtgattttaatcccaataaaatacgctctatttcccacaataaccccgatcgtgttccagatccttttttcattccttttcccaagcctcccgtagataaatcttggcaaggaaaactatatactaataaatccgtttcgggcatttccactggctctatttcactaattgaccccaagttgttagactgtttattagctctatataaatctctcaagtcatcttccgataacctgcgaagatctgtcggcctgaccgaatcagcactaaatgtaaactttgataagtattccaatagttttgctttgtcttccggcacctcaacttgacgatccttacagtgtattgccgcatagcactttattgcatcaataaaccaatcactaataccaactatctcgtattcaatgtttaatcgttttaatgctgacgcttgtgcacctatcccggcgaatgcttcaaaaacttttagttttcttttgcgcttttccatagtattctccaactgtttcacgatgcctttattcaacctttattccgctgttaatgcaaaattcattaaaacgcaattcagctttttttgttgggttagtttttcctctctcccatctatttattgttgcaaaagatacgtccaatgctcttgccatagcctcttgactcaaatttaatttggcgcgagcgacaatcagtttgtccttaaactccataaacaaacctccattcagatgttatagtatatcatagcattttatagcatctatgtcaagaacaaattgcgtcaattatcgagattattataattaatcagtgtttccctccatttctatctgtttatatccaatgataagcgaataaatatactcgacgatcttctctaccacttcgttcggcccgattagttgcagtttatcaccaaacgacaagcaccatccgtagaatgtcggactcaactgcaccgcagccgtaaaccgcactgttccgtcctcttcctccgtaaactctatcgcttcaccgaaaatgtcaaagatagcgtctaacagactcttatctgctcgaaactccacgcgctgttcatcgccttggaacataccgaacaatgtcttcttgtggtgttttaggtcgaaggattcgcccttatatgggtctatgggttgttccatctccattgctacatgatccatgcggtctatacgataatgcaccacgccctcatgctttgcgtaataacaaataagatagtaattgtcatcatcaaatattgttgccaagggattgacatagtaacgtttcccctgttttctgtaaactctttcgtgatgcatatcataatcgaagtattcgaatgacaccttgtatcctctttcgatagcggaattgatttcgtttattgaatagaaaatattctcgttcgcactctttgttgtattgaatttcacaacattgctccgcagtaattccgaacgatgacttcccccaagattggcaagcttgtctataagaacctgcgtctttttgggcgtaataaacctggatgcttgaaccgcatccatcaatatacgaagttcggggacatcgaagctgcggtctacaatgcaatacatgtttggcttccccggctctttttcacacaacacctcatatccgtaatcattcagcacatcaatatcggcggccaaagtgcgtctgtcgcacacgatacccatggctgcaagctttgctaacagttccgttgttcctatgtagttttcctcatcggagtcctggcgcaatatctctaagattttgacgagttttattttatgagcgttttcctgtctcatgtttgaacaatagacctctccgattattatactgatattataccatctcataagttaaaagtaaaggcgatggtgtacaaattaaccgacaccatcgccccattatattggatttattccctacgattactcgatcttagaatatctctttttcgtaagcgcaactgcctgcgtgagattgtaaataattgcattttcttcgggaacggaaaccccaatgactctgtaagatgtatcatcgttccagcccataagattacgaactgctgcgtgtgcggctttgaacgccacattaataacgtttttcttttcctttgtgggactggaaaatttaactgccgcctccgctttctcatcgctttttacaatagcgattctcttgccatctgtgtcgatcatcatattaatatagttcggatttccaagttcgattgcagtatctgcattgaacttgaagtacttaccagtgatcgtcatagcggactcgcttgcgttgccatacacctgaatgagtttaaacccttttaacattgtttacttctcctgtttttaaatttttctgtgattgcactcatatgtgcaatatcgatcacttccacctctgacgggataggaataaatcccgccagggctcctttgcgtatcggtttgaacttgacccgcgcttcttgctctcccgttctacgccgcctgttcccaccctcttgaaaaatcttttgcactttctcgaaggtactccgcgatactatcggttcatgataattgcggacgacgtactggtttgccagtccacgattctttttgattttgtgcgtgaacaggtcgaccgtgaccgtcttctgcattctcatttcgcccatgtacttttcgttgtggagaatattacacaccaccgtcgcttgccaaactcccttgcctttcggggtcggcacttttgcgacagtcaaagctgcggctatctctgtggtgcttttcccttccaggtaggcgttaaacataaaccggattatttcagcctctttctcgacgacaatgatgttccctttctcatcggtatcgtatcccatgatcgcccacatattgttgacggggataccctttgcgaacctgcgacgatacgaccattttaaactgtccgatttctgtttggattcttcctgggcaactatgctcaatatcgtcaaaatcatttcgctattcggatcgaggctgtttataccctccatctcaaaaaacaccccaacgggcggattcagcaatttgagctgccgtacatacgaaatacagtccaggacgtttcgcgcaaagcgacttatcgacttcgtaacgataaggttgatattacctgctttgcattcctcgatcatctgcagaaactgctttctatgcatgaccgaagtcccggatattccttcgtcagcatatatcccctgcaatgtccaattctcgtggtcattgatatattgagtataatgctgcacctggagttcatagctgctctgctgcgactcttcctccgtactgacgcgacaatatgcacacacccgcatctctttgggcgtgtcgtcagtcttggctgtgccgacagcttctatgacctccacttccacgttattcgcaccattgtaagcgtttttgattctttcggctgaggcggatcgtttcctccgcctcactacacttgtttccatcttctcacctccttttcgcccttgatttgactatagtcataggcgaattgctgcgcgggcatcaaatatgataggaaaaaatgcccggttaatctattaaaatcggggtgttttgacaaaaaaagtgtccgaataccaagttccacaaaaaatgaaaaacccgacctcttttttccgagatcgggcacaaatttcttataccatttacctgtaaatgctgattgtctttaggatatccgacacgaggtttttgccgctgcgggcatcgctcggtgtcttatgaagcgtaatgacgtacttatcgttccctttgtatatgagcctgtaatggttactatctgataccacttcgaacccgatagcctttaactccagcaggtcgcgttctttgacgttttcgcctttggagagtacccttttcaaagtctcatcgacttctttcccctcgccgcgtaaggcattaagggcgagtattccctcgagaagttcgtaggctcttgtattcgtttcggttgtccgtaatgcctttgccagggtgattacgacaaggtcatattgctctccgctgaaaaactcgtcgattggagcggctatcaacattctgcgtccatcgtccctcgcattgagagcttgccgaaggctttcgttctgcgccgccaacgacttggtttccatgactgctctgtgcagtttctctttagcttctttcagttgatcctctaatgtaccgttttcgttaatagtctcatttaataaatcctcgctctctttcgctcggtgcgctaatatttcaccatgtaactgttcccaggagactccctcggcatccgtctgtgccgtaatgaaacttgccacctctttgattatcgtggcattgaccgaaccgtatcttcgccaatctgatggtcgatacactcttgcgttacgggagtgcgggaagtaaattccgatatgtccgttgaatggattctgcctgtttgttctttcttttagttcctcaaggtagttatcatcctgctctgccaccacgacaccgattcccgcaaggtcttttgcaagccattgaacatcgacctcatgccccgctgaatcgaaatatttagagacaaagaccagtggcagactccctcggtacgatccgtttattgcatcaaccaccacattgacctctgctcccgtcagcatgattggttcggcggatattggtagtatgtcctccttgagccagccgtctttgacgaatgcccgaatgatttcggttctcacggtcggaatttcatcaaagcccgtcgtatcgcccaggcagtcaatgttgatataaaccttgctttctgaatgtggtgttgtctttagaattgcctctgtgacccatgtctgctctctgtagatgtgagtcaatttacaagcctcgtatgtcgcatctggtcgcttaagtataaaggtttccagtgtgcaatatcctgctttcagtatggtcggctttgtcgtaatctcttcggtttcgtatcgctcaccgacctctttgcttggcggtcccgctttgagccactcaattattgtgcgtcgaaattgctctggtaggtaaccatccctcattgccaatcgcgttgataaaactttcatggcggtttcctccttgcttataggataccacaaatctcctccatagtcaatttgaaagggtttgcaagggtggtataaaaccattcattcctcgatatgttcccacaaccgagtatattttatcgtcttaaattacccagaaaaatacataaagtctcacgccttttcgcccatcgggacaaagaaaaatcacccttcatgctctggtataagcataaaaggtgattatttactccaattttgcccccaaacggctatttccgttcgagacaaattagagtttcaacatgcttcgtctgcggaaacatatcaaacggctgaacggaacggatacggtaatacccgttcaccccttcctccgtcccttggaaatcgggatttttgacgagctccccgtccttttcgattaaacctcccgtcagtatccccacgtcgcgcgccaaagtggccggattgcagctgatcacggcgatttcgggtatgtccgaagcgagaacggccttcaaaacgcttcgcgcgatccccgcgcgcggcgggtcgagcaccagccgcagccgctcccccttttccttttcgagcacatcttccagcttttcctccacatatccgcagatattcgtcatattttcgagtccgtttttcctcttcaattcgtccgcacagcgcacggcctcctcttccagctcgatcccataaacgcgcctgcacgccttcgcaaacatcgcggtgagcagccccccgcccgaataggcatcgacgaccacctcgtccccgttttccgcaatcgccgccaaaacggcgtcatagagctttccgcgcacgtcggcatttacctgcataaacgtcgcgggccccgcttcgtaacaaattccccgctcctccgcctcaaaaaatcccgggccgaaaatcagctcgaacttttcgccgaacacgacgttggtatccttgtcgttgatgttcagccagagggtaaacgtacccagcacggtggaaagcagctcgataaaataggtcaggttaggcaggcttttcacggccgaaaccaacgtgacgataaactttccgccgatctcgcgcacgacgatatgcctcaggcttcccgttcctttttcctcgtcgtacccctttattgcacattctttcatataacgcttcaaaagcgcgatcaccttttccgcccattcgggatgaatggcgcagttttccacgggaataatccgatggctgcgttcggcataaaacccgattacgttgtttccgtccttatcgaccccgacgggcatctgcaatttattgcgatagccgtaaggaaagtcgcttttaaccgccgcgggcacgtcgaaagaaatccccgcgattttgcgcagggcgtccctgacgatatttcccttaaaccgcagctgcgcccgatattgcaggtgctgaagctggcagccgccgcagcgggtaaaaacgggacatttcggccgcacccgttcctcggcgggcgtcaaaatttcttccgccttgccgtaaccgattttatcctttactttcaaaacgcggaatcggaccttttcccccggcaaacaataaggcacgaaaaaagtgactccttcgtgcctgataatgccttctccgttgctgcccaaaccttccgtcacggcacaaacgatttgatttttttctgtcataaatccttttttcgaacctcctttctatcctttccgaagcttacggagcccaagccccgtccgtcattttctgatgatccgcccgataatctgattgacggaaacctgacacttgaaaatcatatagtcgtagagaaagaaaaatgccgtaccgccgatgaggagaatgggaatgatataccgactcacccactcccagccgaaaggcgcagccatgcccgtcaccacccgccagacgaaatacatcgaggcgtcaaaccagacggcttttacgggcatagcgatccagcgtttaaccttaaacttcagctgcaaagcgttgaccagcgggtgcagcccgaaaaacatgataaagggaagggtgtcaaaaaaattgaacccgttgaacatgagggcgatgaggctcgccccgataaaggccaagacgtccccccaccagcaatttttggcgagcgggatcataagggcgaaccccgcgaagagataccccgtaaacagcagaggggtatagagcgtccccaccgtcagagcgattgcggcaatcgcgcaggacacggcggaaagcgctatttcataggctgaaatcttcttcatttttcgggaaagcttcccttacctgcaaccgcagcagagactgaacagacagtccacgcaaaggtaggtatagcagcaggagatgcagttggaacagacgttgccgcccatctgatcggcgtcgggatttacgggctggccgttgccgcccgcatagggatcctccgcctttgcggcctgcttcgcatagtcgtttttcgcgttcagcttgccgtaagcctcctgatatttccgattgttcggatccatctgcatggcgatttccagctgctttttgctctcgttcgaccaatttttcttatagaacaccaccgcctgaagatagtgccactcggcgccgcgctcgttaaactcgtcgagacgggactgcgcctcggagagcttgtcgcttttcaaaagatccgcgatttcctgaaaggcgtccttgccctccgtatttttcgactgctcgcgccgcgccgacataatttctgtataggccgtatccagcttgttgagcatgcgcgcggcctcgttgcccgcttcgccgtccagccagcggtcctcgttgtatttctttttcagctcgccgtagcgctctttgatctcttcgtccgtcgcgtcctcgtttaagccgagaaggtcgtaatattccctgttcatgtcttaaaaaaatgtctcctttcctttttccgcggcttccgcccgaaaaatcccgtcacttgttttcctttttcgcctgccgcgcggtctgcggcggcgcgtccctgcacgctttgcacggggcggaacgcatgatccgttcggtttcggcgggaagcccccgcaataatatattatccgacaaatcccgattaaaatgaaattttatctttgacaaattttccctgatatcgaaaaacaacgaatggaaggcaaattccacttcctctttccgccgccgcatcagctcgcatttgtcctcgcacttaaacgccagcacgaagggattgtacgcgcccttctttttgtccttgtcgtaatcgtccagcgcgtcgatgagataaatccactttcccacggcataaaagagattgtgggtaaagggggtctttttatccccgaggagataatcgctgatttccgcgatcatattggccgaggcgtccgccgccctgtccaggctgtccgcgcccgccttttccgttttctcctgcgccgcgagattgtcccgcacgatccgctcgatttcggggtattcccttgcggcccgcttgtgtccgcttacaaaccacagccgtttgccccgtcccctgtcgccgtccttgatgtcgtccgtgtatttgtaatacaccagcgccgtattcagcgcgcccagctttttcgtcatgtcatcgacgcaggccatcggctttttccgaagcacgtgcgtaagacagtgctgtttctcgacggtgacgtcctcccccgcgatgttgtgcagaatcacggaaaaaaaagtaacgtcgtaggtaagccccatgcgcgcgcactgcccgcaggaggcggatattcccttgcatacgccgcagtacatcgccctgtagagcatttgatccttgatatataaatatggcgtatccgtacgaatataaccgaacataagctccccgcggcggatttttccacactttgcgccgcttttataccattataacataactgtctttatatttgaataaggcgcggaaatgcccgtaaatacttcgtgcttccgcatttccgcttttattataacatcgcttacgcaatgtttgaataaggcgcggaaatgccgataaatacttcgtgcttccgcatttccgcttttattataacacgacttttgataaaaagcaaaccctaaaagcgcacttcacaataaataacggaatttatcaccaatttaacaaaaaaggcccgcggagcttcggagaagtttcacgggaaacccttttttattttttcggagcgacggggacgggcgcgatctcccctcccgcgaatctgacgatttccgcgcacaattttttctcatccgcgggcagggactgcttgaaacggacgggcttatacctaagttcgagcagacatttgggcggtttcatggccgtcaggagattgaggcgtttaatgcccttgaagctgtccttgacgtcgttgcccgaaagggcgtacagcacgtcctgcggaaatttatagggattggcggtggagagcacgacgacgggcgtcgtatccttgtcgccgcgcttttcgcggaagaaatcggcggcgtacatcgccacgcccgtatgcgtgtccatgggatagccgtattcctcgaagatctcgtacatcgcctccacggtttcgtcctcgcccgcgtaggcggcgaagaaatcctcctccaaaagcccgagctccgcgcccgatatctcgtagctccccctttcggaaagcgacttcatacgctccgccgtaagcgccgcgttgcggccgctgacctcaaacagcagacgctcgaggttggaggagacgaggatatccatggacggggacatggtgcggtaaaacgtccgtttggcgtcgtaaacgccctttgcgaaaaattcggtaagtacgcggttgcggttggacgcgcaaaccaatttacgaacgggcaggcccatctttttcgcgtaccagcccgcgagaatgtccccgaaattgcccgtcgggacggaaaaatccacttcgtcgcccggagcgatctgttccgaggaaacgaggtcggcgtaggccgaaaaataataggcgatctgcggcacgagacggccgaaattgatcgagttggcgctggagagcaaaacgcccttttccttaagcgcggcgttgaaatcggacgaggcgaacaactttttcaccgcgcgctggcagtcgtcgaaattgcccttgactcccgcgacgaaaacgttgtttccgtcctgcgtgcacatctgcagccgctgcattttggacacgccctcgtcgggatagagcaccgccactttcgtgcccgcgacgtccttaaagccttcgagcgccgccttgcccgtatccccgctcgtcgcggcaagaatgaggatatcctccttgacgcccgtcagctcgcaactccttttcagcaaatggggaagcagagtaagcgccatatccttaaacgcgcaggtagggccgtggaacagctcgaggatgtaaagtccctcgtctatcctcacaaggggggcgggatcgctgccctcaaaggaagaatacgcttttttgcaggcttcggcgaggaaatcctctcccagttcgcccagatactttccgataacgaacgcggcgcgttcgggatagctcatgccgacgagttgttctatctccccgagggaaacttcgggaaaagtttcgggcacgaaaagcccgccgtctcccgcgagcccccgtacgatcgcctcggcgcccgtcgctttttcgtctcctcttgtactgacaaaatacattgttttacctctctatatttctgaactgtaaattttttccttatataacatgcattattaattctactgatctgggattccaaatttcacatcctgtaaaagaatgaattgaaatatggtatctgcctttatctttgatagatcttatccctccatcttggttcccgtcattatcttcatacagccaaactgaatcgaaccaatcacttgaagtcggtgattcatattgatcgtgaataacttcactgtcagccaagcgataccttatacgtaaaaaaatctcttcgccgctataacaaatagaatattccaatttgtctatatcgggagggaatttggcaattaacctgttatcggttttgttgtaaaccaatatcgttaaatctttttccgaatctgcacagcccgaaaacagaattcccgtcccgacagccaagaatacgctaagtattatgcttaccaaatttcttattgttttcataaattgatttcgtttaatgaaaaaccggacggaaccaccgtccggcattcgcccgctgaaaagctcttttgcggaagccccgacgggccgcgtcaaagatatttctttataaaatcgggaagatcttctttcgcggcggaaacggaaaccgtaacggtgaggccgttttggtccgcaaccttatcgagcatatagaaaaatcccgcaagctccgcggcgggtttgcccgcgatgcgcatgacgccgtcgatatatacgtactcgttgtcgtgattgcccgcgataacgcccttgatgaagccgcacagcgccgcttcccccgcgacgtcgaaatcggtgacatcgataaacctgatctcgcgcgcgagatcgtacatgccgcgtttggtatcggtgacgaatataaggtgtcctttcgccgtagcgaccgccgcatttgccgcatcgatcatctgtttggtcttgcccgtgcctttagcgccgtagattactttgatcatataaaatcctcccgaattttttgatgatgagaatatattttccgaaagtttttcggtttattatattctaccaagttttcgtgttaatttcaagaccttttcgaaaaattttttgttttttctcaaaaatttttttattgcgccgaaattgcccgttttttccgtgcgaaaagcctttcgattattgcccgttttcgaaaattttattcgagcgcggccacaaaacgggcgatccgtcccagcccttcctcgatatcttccaaagagagcgaataggaaagcctcacgcagtcgtccgcgccgaaggatacgccgggcaccgtcgccactttttccgcctccagaagcgcgtccgagaaagaaatcgatccgtcgatcgtcttgcccgcatagcgtttgccgtaaatcccgtttaccgccagcatcacgtaaaacgcgccgtcgggctccacggcggaaagcccgtcgatcttcgcgatcgtctccagcatttttttccgccgcgcggcgaatacgctcaccattccctcaatctcgctttcgggcgaagagagggcctcgatcgccgcatactgcgcaatcgagcaggcgttggaggtggcgtggctctgaaaggaatcgatcgccttggcgacgtccttgggcgcggcgagatagccgatacgccagcccgtcatggcgtacgttttggagacgccgttgaccgtaatcgtcagctccttcattttttcggagcaggccgcgatggaaaaggacttcacgccgttatagcaaagcttttcgtaaatctcgtcggaaagaacgaaaatttccgcctcctcgcaaacctttgcaatcgcccgtacctcgtcctccgtatagacggtgcccgcggggttggagggagaattgaaaatcagcattttcgttttgggcgttattgcttttttcagctgttcgggggtaaatttgaatttattttcccgtttgccctctatgtaaacgggaacgccgccgcacaccttcaccacttcgggataggtcagccaatagggcgcgggaataatcacctcgtccccttcctccagcacggcgaagcaggcgttgaaaatcgaatgcttcgcgccgtcggagacgatcacctgcgacgggtcgtagtcgaggccgttatcgcggcggaatttatcgcagatcgcctttcttaaaggaagcagccccgaagaaggcgtatattttgtgtagcctttgtcgagcgcggcttttgcggcgtcgatgatatgggcgggggtattgaaatcaggctctcccgcgccgaaggagacaacgggttcccccgcggccttcatggccttcgccttcgccgtaatagcgagcgtcagcgacggagcgatgacggacattctcgaagcgattcttttgttcatacgatttatctccgaataaattattttttcgattttttgagggcgtaatattctatttctctattttactcgctttccccaaaaaaagcaactttacaaaggcggtttatgacaaaattttttatttctctttaggaatttgcgccttttccttaccccgaacgattttacaattataagataaaacagtaaaaattgtagttttcagcgcccaagcgatttttacaaccgcgtcggccgaaagatatccttgacttgtacttttcagccagcgacggaaggtggcgggcgtaacccctaccttttcggccatatattttacgtcccagcgattctttttcatgagaaatgcgacggtttccatatcgataaaatcgtaaaacggctctttctcactcgttttttgtgttttcatagctttttctccttaactgctattgtactaatttttagtatttacaacattctactactaaaatttagtattgtcaactaatttttagtagttaatagtaaaataaaactatgaaacaggaaataggctgtaaaattaaagaattaagaaaactaaacggtttaacgcaaaaagaacttgcttttcttttgcataaatcgccgacgggcgttgcgagctgggaacaggggctatcggagcccggggtggaagacataaggaaattatgttttatcttccacgtatcggcagacgaattactcgagatagaataaccccgtgaatttaacgccactaaataaaaaggattaaaatgataccgcaggaagagattacggcgagcggaaaatcccagacggaaattgcacaggcattgggaatcaagcaacaaagcgtacagcaatatctttcggggcgcgcgttgccctccctcgatacgtttgcaaatctttgtgaaattttggagcttgatcccgcctatatcctcgggataaaaaattaaaatttataaaaagaaccgacagggagatcaattctccctgtcggtttcgcttgcgagaagcgcctcgcggtcggccagcgtcagcgcctccaccatcgagtcgatgtctcccatgatgaaagcgtccagattatattggcttaccccgatacggtgatcggtgacgcggctctgcgggaagttgtaggtgcggatgcgttcgctcctgtcgcccgtccccacgagactgcggcggttttccgtccgttccttcgcgcttctgccgttatagtaatcgtacagcctcgagcgcagaaccttgaaagcgcgctctttgtttttcagctgcgagcgctcgtcctgacaggtgacgacgattcccgtcgggaaatgcgtaatccgtaccgcagaggcgaccttgttgacgttttgcccgcccgccccgcccgaatggaaaatatcgatgcggatatccttgtcgttgatctccacctccacgtcctccgcctcgggcagcacggccacggtcgccgtagaggtatggatgcgcccctgcgtctccgtctcgggcacgcgctgtacgcggtgaacgccgctttcgtacttcagccgcttatacgcgccctttcccgaaacgttatagaccgcttccttgacgccgccaagctcggtttcgctgacgtccagcgcctcggtcttaagacggtgcgcagcgcagtaattctgatacatgcggcaaagctccgcggcaaaaagcgccgcttcctccccgcccgcgcccgcgcggatctcgaggatacagctcctctcgtcgtttttgtccttgggcagaagcagaattttcaattcctcttcaagtcttcccagccgctccttgcaggcgtatccctcgtcggaaaaaaggcggcgcatttccgcgtcctcctcggtttccgcgcccgcgaaggcttccttcatttccttctcgcaggagaggtattcgaggtatttttccgccgcgtccttaaggtcggcctgctccttggaatacttctgccacgcccccatgtccgcaatcgtttcggggtcggcaagctgtgccgacagatattgataccgtttcaaaatgtcgtcgagtctctttaacatatttctgttttcatagggtcagacgacgattttcacaaatctgtccacgccctgcatatccttgaggatcatcgcataatcgcagtatttgaacaatttcacgacgtcctcggcttcgcccgcgcccacttccatgatcagcatgcccccgcgcgcgaggtatttggttgcgtccagcgcgatgcggcggtaaaaatccagcccgtccgctccgccgtccagcgcggaacgcggttcaaaatccctcacttcccgctgaagcgcgtcgatctccttcgaggggatatagggcgggttgctgacgataatgttgtatctgccgcgtatgcgggcaaagagatcggactgaatgaaatttatattcgcctcgtttgcctccgcgttttcctttgcgagctccaaagcctcggcgctgacgtccgacgcggtgaccgtcaccttgcggcggctcttttccagctccttataaacggaaatcgcaatcgcgccgctgcccgtgcaaaggtcgagaatattgtctccctcctccgccgcggaaatcacctgttgggcgagctcctccgtctcggggcgggggatcagcactctttcgtccaccttgattttatagccgtaaaaatccgcgtccccgatgatataccacagcggccgccccgtcagacgttcgtccgccacgcgcagaatttccttcgcctggctcaccttcaaaatgcgctcctcgttattgatcgcgctcttgggaatatccatgagaatggaaaaaatccactccgcctcctcctcgtcgatttcgttgtcgcgaaagcgttttttggtgtttcccagaagctccgtcatcttgcacgaggtggcaaacaccgtttcgggaacggacggatcggcgtccatggccacaaccttttcaaaggcggcgatggcgcactccatcattccgtcgtcgggttccctcgtcgtaatccgctgaaggagcaggccgggggccttgaaaacgaggaaaaacttatttttcgtctttgccagcgctttcaaaatttcataggaaacgcccgcgacgatcggcagcatcagcaatttgaaggccatgcggataaaaaaatccagcgtcttgtttcccgtatagataaaggtccccgccgccgcgttggcgagggaaaagacaaggatgctcaccaccatgacgaggaacaaaaaggtggtgccgcagcggtcgtgcacgcgggagcagccgcgcacattttccaccgtcagaggcttcccgctctcgtagcaggtgatcgtcttatgctccgcgccgtgatacataaacacgcggcggagggttttggacaccgacatcaggaggatatacaggacaaagacggcgatgcggatcgcgccctcgatgaggttgaaccacaacccctcgaggcccgtggtcttaaacttcgtcagccccgtcagccactgcggcagaagcacgaaaatgacgatcgccagcgcgattcccagcacggtcgccacgccgttgagcagtccgttgaggttgattttatgcttttccgccagccatttttccgccttcgagggctgttcggcctccccctccgccacttcggcgctgcgcataagcacgcggttgccgacgaccagcgaggagacgaagttaaaaatcccgcgcacaaagggcagacgggaaaaacggctctttttttcgggcggcagaatacgctgcgcctctatctgaatgttgccttctccgtcgcgcacggcggtggccatcgcctgtctgccgcgcatcatcaccccttccattaccgcctgaccgccgatataagtataagtttttttaaggttttttttctttttcatgctttatacgtccgtagccgtgccccgcgcgccgcgtgcgcacggttcaaaaaaaagggccttaagatgaaaagacaccttaaagcccgtttcgtttcttcctttacataccgtatcttttcttgaacttatcgatacgaccaccggtatccaccagcttctgcttgcccgtgaagaaaggatggcaattgctgcaaatatccactttcatgacgtccccctctttggtggtgcccgtcttgaaggtagctccgcacgcacagactactgttacttcgtgatatttgggatgtatatcagctttcattcttatcacctcgctgtttcgtgtgctttccgtttcagatgctttcccattataacgctttttttttcggccgtcaactgtttttgtgtgaatttgcaaaaaatagttgcaaaattgcccgaaatgcgttatactgattttgagaaaagtttccgccgctctgttaagcggtaaaaagcaaggaagtaagcggtattcatgaaagtttggcaattaaactcccccaacaatttacagcgcgccgacgcgccggacctcgaactcaccgaagacaaggtaaaggtcaaaatcaccaaggcgctcctctccgaagcggatgtggcggtctattcgggcgccacgcgggtgaaataccccgtcgttcccggcagattcgccatcgggcaggtgacggaggcggccgaggattcgtacatgaaaaagggcgaccgcgtttatcttgcgggcgtcacggaggacgagtgcgctcccgacgggctgcgcttcgcgggagaaacggcaaacggcttttaccgcgattttgtcgccgcgggcgccgacgaggcgtacgtgcttcccgcttccgtctcggacgaggcggcctttctcatcgacgccgtggccatggcggagcgcgtggtagatgaaatgcatgtgtccgtcggccagcatatcctcgtcgtaggcgggggactctacggaaacgtgctctgccagatcctcatctatcaccgcgcggtgcccattctggcggacaacaacgccgaacgtctggcccgcgccaaaaagagcggcatctattatacgtatcccaacgacgatacgctgaaggagcatatccttcaggtgacgggcggcaagcttgcggacgcggcggtctatctcgccttttccaacaagagcgagccctccaccgtcttttcgctcgtcgcgcgggaggcgtacgtcgcctattgcgcgatgacgggaaagccccttgcggtcaatctcgaaaacgcgctcaaaaacaacgtcaccgtcaagggaatcaccgaaagccgcgaatttgtctctaccgccatcaacattctggccaacaaggcggtgaatttttccgaattcgcctatgccaattttcccgaggaaaaactgcccgagctgctgaaaaaatacgccgctctcacggcggagggggttcccctgcccgaggaaatcgacgtcgtcaaatttattttttaagccttgggaagcggaatgcgcctcttatcgccgtcaaatttgtttttcaagccttgggaggcgggccgtctctcaaataagggacgtatgtcccctcccgcacatgcgggtacgcggcaaacgccgcagtggattttgtatgatcaaatttatcgccaccgacctggacggcaccctgctcgatccgcggggcgtcctccccaacgaaatttttcctttagtcgcgcgcctttcggagtgcggcattcttttcgctcccgccagcggcaggcagtacgccaacctgaaaaagctgttctttcccgtctgggaaaagacgattttcatctgcgaaaacggcgcgctcgtgcggcagggcgacaaaacgctctatctcaacgccctgtccgccgcccccatcaagggcattctcgacgccgtcaggcggacggagggtctgtttcccatcctctgcggagcggacaacgcttacatagaaaacaaggaggagcctttccgtacccgagcgagaggcccctattccaactgtatagagctgcaaagcctcgacgaggcgatcgaacgggaacccgtatgcaaaatttccgtctataacgcccgttccgcgcaggaacagggcatgaaggtattgccgccctttttggagggcttgaagctcacgctttcgggcgagcattggtgcgatatttccgcagcgacggcagacaagggcgaagcggtaaaggagatacaaaagcagctcggccttgcgcccgacgaatgtatggccttcggagaccacatgaacgatctgggg

SEQ ID NO: 66 - DNA, 1655 bp, Unknown
  16S sequences of unknown bacteria
cggtacggatagcgtcgatactttcccggttgatgtaggacagccccgcaagggtgtagtcccaatcctccggcaatgacagcatttgtgaaagcagcccctttgcctttaaggaaagctccttattgcgtaagtggtggttgctcattacggtgtagcctgtgttgcgttccacacggaaaactgccatagcttcatcactcctttgctttagatttgttgcgcagtagaacgcggattttgaggggtaaggtatcttttccttgcttcctctgttttgcgttctgtaagcccgataaatcaaggctttttttgcccctactgcgtaacatgagggcataaaaatagcggcgttcctgttctcccagtgagagagtgagaaacgccgctgtgcgggtcgctatttcatttcttctgctatcagttcttgcatgacttctccaaagtctgccatgaaagaaaagatgaagtattccaaaacgtcggggtctgcgtccataggctcggcttcctctgaaaaaggcaagcccattagcccataaagcagtttgatgattttgaacagcttgccccggtcggtggggttgttcatggttacaagtacgttggtaaggcggttgattgtttccatgtcgccgcctgtcgttacccataccatttccgcgaacggctgcgtgattgccccggcgacaaggtttatcttattcttgccgatttcgccggacggaagtataatacccttagtcaaaagttcgtttttcatgtcgtcctccttatattctgtggtgctaaaatggtgcccggtcttacaaaaacaccttatgcggagatatgacaagaaaaatgaagatatgcggaaaaccttgattttaagccattttcacattggtttataaacatttgtgaggacttataaaaggttttgcgtctatcaaatcaataaaaaagcaaaaaacaatgattcaactgattgtgtttgcagtttgtctcctttttctctttatggaatggatattgttgacttttatcactggagagcgtttgccgagcttagcccttatgttctcatatgtgatggggatgataatttcctgcgcatatatattcaaacatcacgaaattgcaaattcaaaatcgaatatattaataaatatttttccaatcttgtcaacgttaccagcatttttactagcaagctttatagattgcgattatggtatttggggtgtcgctttaatttcactcctatatctggcaaaaagtattaaaatttctgccgtgataatggcagtgttactcgtaccctattatgggcaacatatttatagcaatgttgtttcttttgaggcaatacgaaatatgtgtttttcacttttgtctattttgtttgtttgcctgtacaatgggcaacacggaagtaagaaaaagtggatttattattgggcatacccgttacacattttattctttgcaattttgcgttgttagcgcttggtgaaaatcgccaatttcaccagggcaggaaatagtactgtgtcacgagatggtcaaggcaccagctacgcctcgcatagggttgtattggtcggtccgaaaaagtaatctcttggtgttggtgtaggcgtaatattaaaattacgcctacatttttagat

SEQ ID NO: 67 - DNA, 4315 bp, Unknown
  16S sequences of unknown bacteria
cgaaggcgtcttcaagccggagatcgtctgacctcaacggggagcgccccgatggggtgagtgaatagggaaaagtgaagagtgaaaagtttcggtgtgccgcaagcggcacaggtttggaagaggctgtgcgggggaggaaaacttccgctttcctgtttagctaacgggggacgccagagaactgcttccaccgcaggtggtgcctggcggcacagaatcacagatgcaaaaaagcgacggcattgccgtcgctttttacattgcatgagcgcagaggacacggatttttcggactgagcggcagtcagagtttaccgtttccggctgcctggctcaaattcccctttgcaccaccgcagaaagtttgacgagtggagcagataagtcctggctgttttttcggtcagccgcccctgttcctgggcagaagtgacctcagcttcccacagctggtacagccgttccatttcatggagcgtgttccggtctgttttcatgcttttctctccttttcagaatcgtcaggctttctttgccctcttgggcttgggagctggaagttcctcgtacaatgcctgtatcagttctgtcagcagttcccggttctcgggatcgcgcaccagcagcatctcctttgccccttcatagggcagttcccggggcgcatcgggcagcagccggacagccgaggctgtgggtttgaccagcagacggttgtcatagataccgcccaccagcttcccctgacagtagagcagatattcccccatcatggcccggcaggagatcccctccaggccggtgagctgatccagaatataatcccggtattcctgtgtggatgccatgcgttttcctcctctctgtaaagaaacaaagccgggaagaaagactccccggctctggttctgttatgccgccttcgccggttcgctttccggttcgctctcagcggtggagctgcccggattggccttgacctcctcaatccaggcgttcacattgtgctccacgatgaagtagggcacgctgccgctctttagaatggcagtatggaagcccatctcggtaaagctgtcgtccagttccttttcggcatagtcccgcaggctttccagcttgagccagcccgcatagtaggacagataggcagtgggttccagacgcatcatgtcatagtagtaatccgcaaaggacggatcgatatacatgctgaaggcgtcagcgaattcctcccggctcatgccgtcatagttgaccgagatgtccatgatggtcaccagacagttggagagttccgcgttgagccgttccatttccagcacttcggctgggattccctgctcctccaggtatcccaggctgagcagttccacataggtggcatatccctcattgtaaccggtctgggaggccagtaccttgcggaaatcggaactgaggttctgatagctgtatgccgaagcatacatgtgcccggggattccctcatgggccagggtggagaaggtggacagggcattcatatccacggtgttctgggtgttgacccggatgcgcagcggaccgctctcgtccacagcgggattgatgaagtaggcagccacaccgctgttggcaacatcagcgggaatgggatcgatcacataggagagttctcccacatccgggaaactggcatcggtggcgctgtccaggaaggtgagcatctcctcatagctggcaaaggcagtcttgtaaccctcttccagccagccgttgtaggcatcgggatagaggaaggccagtcctcccatccgggagatggtcttatccaggcgttcctctgccatctgccggatctcatccggggattcgtccagagcggtggcagcggcaaagaggatctcatagtagtccttgccttcgggaagagcagccatgccttcggtgttgttgaagccgttttccagttcccgcatggtgtcggcaatcttttcatagctggggataaagcattccagataggcttcccggatctcggactgatagcgggctaccgcttcatccgaaagtcccagtccctcagcctgggccagcaggttcagaaggacagtgctgtcctctccctggctggcggtggaatcacagacatcgatcaccgaatcaaaatcaatggtcagcactttttccttctgctgtttgcgggtgtattccagcaggctgtcgatatagtcaggaatgctccggagcagatcggggatcttctggagatcctcttccgactgtacctgcagttcgctcagggtggtgagcagactggtatgcacaccgctgagattggagaagtaacttccataataccggaaccggtcctcatagcttttctggctgagttcaccgctccattccagcagatcataggtgtcctgctgttccgctgtgagcagcgaccggtcaaaccgatgcagggcatccagggtagcttcattctgtttggcagcttcccggaagttttcgtccgattcctccacacctacggtgacttccatctcactgcggtcaaagccataggcttcggggttttccacaaaatagaccgaactggtgaagtcactctgcatggtacccaggaacatttcctgagtgaagtcatcgaaccggctctggaccacagcgggatcaccggaggaacaggccgcaaggggaagggtcaggctgagtgccagcaaaagggcactcaggcgtttgggcagggttctcaaaggataaaacctccttttatgaatcggggtattccagatcagtatagtctttctgaccgggaagatatgcgttgtttacagggatttgcccaggttccggatctcccggagcagatcgggctggctgcggacttcgccgggtttgccggcggagatggatttggagaaggccagagtaaagcccacatagtctgccatgcactggaactgttcccggatcagacggtactggggactgtcgagggcatcggcgccggtgacaatcagaccgatgggtttgcctttgaggacactggaatcggcatacagacggtcgatggcaagtttgagctgcgcggtcataccccaccagtagacaggggtggcaaagacaagatagtctgcctgacgcatttcattcatcaggagctgggaatcgtccttctggacacagatcttttcaccccgtttgcagccatcgcagcccagacagggggcgatcttcatgcgggtgacatccactgttttgaccgagtgttttccggcttcgaggataccggcagtgagttcttccaggagggcattggtattgccatttttgcgggggcttccggagatgagcaggatattcatacaaaaaaccacctttcaggatctgggatcagagaatgaggcccatgcggcgtttgacttcctcaaaggagatgggacggtagtcggtgcgttccacacagacgcagcaggactgggaactggcgtcggcataggcgggattgccgtggacatgtccgaagagattgccatagggcatattgctgttgaggtagaggggctcatgggagagcagccagaaggattcaaagaggatgggacagtcatagacctcctcaaagccgcagtcccggtaccattgggtgctgcgggtgtcgtggttgcccatgaccagacggatatgtccctggagagcggagaggatctcagtggatttttccttgccgtagaaggagaaatcccccagcagatagacggtatcctccggggaaacagtttcattccagcggcggatgagttcctgatccatctcctcagccgaggcaaagggacggttttcatagcgaatgatattggtatggccgaaatggggatcggcagtgaaaaagacagtggacatacagcacctcctatactatgattctatcctaacacaacgccggtagacaggcaacccccgaacggtggggacaggccggggaattgacaaggcaaggctaaaaatggtataatacgggtacttgtcggcctgctgttttgtgaatgtgcagggccaaagtgaaataagcggaagtggcggaatggtagacgctctggtcttagaagccagtacttcggtgtgtgggttcgagtcccatcttccgcaccaaaagaaaagggcaccgaaaggtgcctttttcttttgacgccaaggcatttggcatagccaaatgccgcccgctgcggcggggacttccgtttcgctccatgtgtggcaggaacccgcgggttccccccccacccccccccccctttttgcgtgcgaaggagatgaaatc

SEQ ID NO: 68 - DNA, 4427 bp, Unknown
  16S sequences of unknown bacteria
cccgccgtagagccacttgcgccaccaatcagcatacaaacgacgctcagcgccttagccccctgggtcagcccgctctggtcaaagcccgcgaagcccgccgtacgcatcgtcaccgcttcaaacagtgccattaggagcttctggcccgctggccgcagcccaagcgttgccgggtttcgccactccagagcggcaaacgcgccccagctgaccagaagcagcaccgccgtcgccaccaggaccacacggctgtagaccgtcagccgccggaacgaaaaccgggcagcaatacaatcagcccaaacgaaaaagccgatcccgccgcagacgatcagcgtcatcaaaacgccgcagaccgccgggtccgccccgtacggtgcgatgctcgccccaggggcgatgcagcccaataaatcaaatcctgcgttgcaaaaggcggagactgcgtgaaatacgcccagccagagcgcgcggcccaagggcatctgggcagaaaaccgcaccgccagcgccaatgcgccgcccgcttccaaaatcgccgtcacgcccaggacacgccgcaccaggccgatgattccctgcatattggaaaggcccagcgccgccgccagcagcatccggctcttgagcccgatcctgcgccggagcatcaagaaaaagacgcaggcaatggtcatgaagcctaaaccgcctacctggatcagcaccagcagcaccgcctggccaaagccactccattgggtgtaggtatcgaccagggaaaggcccgtcacacaggtcgcggatgtggcggtgaacagcgccgtgccaaagccgcagctatgcccgtttcgagaagccaccggcaaacacagcaatgcgctgcccagcagaatcagcgccagaaataccagcacaatataccgctccggcgacattttctccccgcgtcgctccaaccggcgggccaagcgccgcgccaaagcgcgtgaacattgcatcatagtcggcctccatccagcagcaggcacgccccggcggggccgcaaaacagcgcctgcagctggctatacttatttataatatagcacattttcgctcccatttcaatacaagcagagcgatttcccgcccgataaaacgatcccaccggcggcaagccgtcggtgggatgaaaaaacaagatgaaattagcccttcagcgcctcttccaccgcgactgccactgcgaccgtcgcgccgaccatggggttgttgcccatgcccaggaagcccatcatctcaacgtgggccggaacagaggaggaaccggcaaactgggcgtcggagtgcatccggcccatggtgtcggtcatgccgtaggaagcggggcctgcagccatgttatccgggtgcagggtacggcccgtgccgccgccggaggcaacggagaagtacttcttgccctgctcgatgcactctttcttgtaagtgccagcgaccgggtgctggaagcgggtcgggttcgtggagttaccggtgatggagacatccacaccctcctggtgcatgatagcgacgccttcgcggacgtcgtcagcgccgtagcagcggacattggcacgctcgccttcggagtagcggacctcgcggacaatgttcagcttgcttgtagcatagtcaaactgggtctgcacataggtaaagccattgatgcgggagataatctgtgccgcatccttgcccaggccgttcaggatgacgcgcaggggctccttgcgggccttgttggcattcttgacgatgccgatggcgccttccgcagcggcaaaggactcgtggccagccaggaacgcgaagcacttggagtcctcgctcagcagcatagcacccaggttgccgtgaccaagaccgaccttccggtcgtccgcaacggagccgtcgatgcagaaggcctgcaggccttcgccgatcttgcgggcagcgtccgccgccgtcttgacgccagccttcagagcgatggccgcgccgacacagtaagcccaagccgcgttatcgaagcagatgggctggatgctcttggtgatctcatacgggtcaaatcccttggccttgcacatctcgcggcactcttccacagagccgatgccgtactgggccaggacgccattgatcttatcaattcttctttcgtagctttcaaacagtgccatgtttcgtcctcctcattagtcctgacgggggtcaatgtatttggcagcgttatcaaactgaccataatgacccttggccttttccagtgcagcgccggcctcatcgcccttcttgatgaattccatcatcttgcccaggttgatgaattcgtagccgacgacctcgtcatcgccgttgagggcaacgcgggtaacatagccttctgccatttccagatagcgcgggccctttgccttcgtggcaaacatcgtgccgacctggctgcgcaggcccttgcccaggtcctccagggaggcgccgacggccaggccgccttcggagaatgcggactgcgtccggccataaacgatctgcaggaacagctcccgcatcgccgtattgatggcgtcacagaccaggtccgtgttcagcgcttccagcagcgttttgccgatcaggatctcggaggccattgctgccgaatgggtcatgccggagcagccgatggtctccaccagcgcttcttcgatgatgccgtccttcacattcaggctcagcttgcaggcgccctgctgcggtgcgcaccagcccacgccgtgggtaaagccggagatgtcgctgatttctttggcctgaacccacttgccctcttcaggaatgggagccggaccatggtatgcgcccttcgctaccggacacatatgctgtacttccgtcgtatagatcatggcaattttcctttctgtacctgccgcggtgaaacgccacggcagagattctgattattttttgaaccttccggcttattatacaaaaatcgcggaagcttgtcaatgactgccgccgggaatttctcccgctcgcccagggcttgcatttttcgcgccgggcgctataatttataggataaaaccccggcataatctgggaaatcttctccaaaggaaggaatgcagcatgaaccccctcacccttcgcccctatacgcaaaacgatctgcccgccctgtgcgccatctggaacgaagtcgtcgccgcaggcgacgcatttccccaggaagactgcctgacgccggagaccggcgccgccttttttgcaggccagagctactgcggcgtcgcctgcgacgaggcaggccagctcctgggactctatattctgcaccccaataacgtcggccgctgcggccatctctgcaatgccagctacgccgtcagcgccagcgaccggggccgcggcgtcggccgtcagctggtccgcgactgcatcgaccaggccgcccggctgggcttccggatcctgcagttcaatgccgtcgtcgcgacaaataccccggcccggcgcctctacgaaagcctgggattccagcagctcggcgtcatccccggcggcttccgtttgtcagacggaagctacgcggatatttgcccctattatctccccctgccctgcagccagtagaacaaaacgcaagccctcccggcacgtttcccccgctcaccgcagcttcgcccggtccgggaatgcactttataaagatcgcacgcagccgcgaaagcggctgcttttttcgcccccaaagcagcaccatgctggttccgatccgtgcctacgcttgtccgcacctttcctcacccgaattacagccatgtcgcagcaacaggcccgcaggcatctccgcctgcgggcctgtgtttttcatacggcgcgttttactctgcgctcggctccgggaagcgcatggctttaacatagttgggcttgaacagcgggtccgtcgagagttcgacggcgtgggccttcgtggcgatgcccatggcttcgcgttcaagctgcttgctctgcaggatacggctggcacccgtcccggcagcgttgccgatggcgatggtcttgcccgcaaagcccggcgggatcagaccgatcagctccgccgagtgggggtcaatgtagctgccgaagccgccgcagaagacgatatggtccaggtcctggtattccaccttgcagtgctggagcagcgtgtccatcccggcgcggatagcgcccttggccagcagcagctgggcgatgtcgttgcgggtcagcgtcaggccgctgtcgccgatggggacactggctgcgcccctttcccggaagcggcccttgggcaggatctcccccacctggagcagcgccgctaccgcgtcgatcaggcctgagccgcagatggactgggcagggccgtcaccgatggtcgtataaaccacatggccgtcggccaccgcgacggt

SEQ ID NO: 69 - DNA, 6463 bp, Unknown
  16S sequences of unknown bacteria
tttttcatcagccattttgcaataaaggttggccaataacgacaaaaaatggcgtaatcctcttgaaaacgttgcccgtccgcctctagttgcttggttgtctctgaatcctcatgaattctatgtagcattaagatttccggcacatacacaaaagagccttttttctgtgccaaacgattccacgcatcccaatccaagctacaagccatggactcgtcaaaccgaaaatccggatagacggacctgtgtaaacaaacagaagggcagcaaatcgcgttgccgattgaaagcgcccggttgcgcatgaacttgctgtgccaaaacagtttgggcttaatcaaagcattgatcatacgcttgatttttaaatttttgttttctgttatgacagccccattccgaagttctccatagtcggtaaaaaggatcaagggatctttggctttttggccgtattcctgtagtgttttaagataatctggctgatagacgtcatcctgatgtgcaatggtcacaaaatccgtctctgcacaagaaaccgcaaaattccaatctcggccgattccgcttggcttatcgctgataaagagcggcacaccaaactcttctgccaaggaacgaatcgcgtcattgggcgtggaagtagccatcagaatgcgggccggcagcgtttgttttgttaaagaaaccagacagtcgcgcaaaaaagggctttctttataggcgcagaccacaaaggtatgggaaaattcatccatggcgctgctcctctttctcaaactcatccatagcaattttctgtgccatctggtttgttttctgctgccattgagagattcggatggtgatccaaaattgctttagagaaatcatccctatgaagaacagcagcaaaaagctaaagggagcttctatccctaagagtcgagaaaaaaagtacggaatttgagggaaaaggctcaaaatcagcaaaagccccgaaaaaataacccaatagatggagtctgtgatattcaatttggattttcggatcttgtataggacatagattagtatcaataaagacattagaatcaatacaatacgaagctttaaggcgatcatatggcttcttccctccgcctacgaaatagattgataaatgagatggaaacaaacatgcgcagcatataacggatggaactcatgagtgtaaaatagcttgtcccagcctcgcgttcattcatctccacctgtacctcaataaaccttgcaccgttacgaacaaaataggcccaggtatctggctcagcgccacagttcatatcaaaagcaatctgccgcatgatcttgcgatttaccaacctcataccgctggtaggatctgtaaagcgtttaccggtcgttaaacgaaagatagcactgatgatccgtgatcccatcatacggaggctgtgtccctttttcttatgaagaaagcgggaaccaatgacaatatcatagtttccctcctgcattttacggagcataggaagaatatagcgggcattgtgctggccatcgccatcaaagggcatagccgctttatagccatgcagataggcaaatttattgcctgtctggaaaacaccgtccaaacccaagtttacagggagcgacatgcagggaatccctttctgatggcatatttccgcggtatggtccgtagaaccgtcatctatgacaagaaaatcaagcccaggacagtgttcttcaagatcctcgatgaccttttcaatattttcttcctcgttgtgtgcaggaatgaaaacaagcagttccttttcattcatagagattcccccaaagctccccataatttacccattatatatgtttctttaaattttagcatatttatgcctgttttaccagcaatcttctaggccagtcaaatgcgttttttgaaagaaagatttttcacagcaacggagaatacacaggttttttgtagtgcgggcaaaggaaattgccagggctgatttggagcatagtgggccatgagggaagcaagggccactcgcttctcgttgagatcttctatcagtgtggctcggccgcttcctatgatgctggcgtaccgcatgctaaagccacaagcctgtgttgagggaataatttgaacataatcatccatttcaaaacatacttgtggattggcagataggaaagaaagcttttttccttcctgcgcactatgaaagtataaggtagtcaaattgcccgtcttatcaaaatgcatgccataggacaacggtatgagatacggttgtccgccatcacatagagccaaacgacatacctggcagtgttgcaaaaaggctcgaatctcctggagatcctttacttcaaattcgtttctgcgcatacggcgcccccttcctataaatcatcttattatatatgatatttgattcggtacacaataaaaaagggcccgaaggccctttggatgtagagtcaggaaagcgcaccacgctgccaaagggccaaggcctgacagaaaatgcgaatatgatgctcttcatctaggatgatgcgccggatatttttctgtacagatgaatcctgtataaggcatagatgacgacgataattctctatcgcctgtttttctccttggatgttttcatagatcagtgaaggaaagtcgcattgataatctacattttgtccgctccaaaaatgtcccatggttggattggaatgagcgcgatagcgtggatcgcccccaagcttaaagatgagctgcgccaaaatatggagatgatgcatctctgccatgccaatcttggaaagctctttggcaaagtgaggaaaagtattcatcagcacgacagattgatattcgtatttagtgatggcggtaagctcactaacgatacctgcatagtcctccatcagtatttgcgcatagtgcggattcggttttggatcaatgggaggatagggtggggaaacgaaatcatgctcgtttttatgatccatgtgtattttctcctttctggttgatgattggatagcggaatatgctatactaaaataaactattcattttaggtgaaaggggaaacagagatggatctaggtttacgtggaaaaacggcgatcatcacaggcggcgcgaggggtatcggagcaggcatcagcgaagtattggcccaggaaggggccaatctggtcatcaattaccattctgcgccggaagaatgcgaagcatttgcgcatagcatggaagaaaaatacgggataaaatcgattgctgtgcaggcagatatccgttaccaagaggagatcgataaggtgttcaataaagccattgagatctttggtggggtagatcttctggtgaacaatgcaggcgttatgggaaaggtacccattgaggaaatgcccaaaaccgaatgggatcgttttatggacaccaacctgacggcactgtttcttaccagccagacattcattcgtcattgcctagaagaaaagaaaggtgggcgctgtgtcaatgtattgagtaaatcggccgtctctaccaatagctcgggcaacgtgcattacatggccagcaagggcggtggcctgatgctcaccaagggattggccaatgaaatgacaaagcatggcatctatttcaatgccattttaccgggctatgtcatttcgcacggcaccgattatgataagggcacagaggaggcagagcgtaaacgactaatgattccgacacaaaaatacgccaccccgatagagatggggtatgtaacagccttcttgctttcagacaaagcttctcagatggcgggttctattgtggattgtacgggcggtttgctgctgtaacttaacaataaaaaagcacccaactgggtgcttttttattgtaattatacgctgcggcatgtcactttggaaaggatttcctctaccagtgcgcgcggcggaatttccgttccgtcagtagaggccatggcagagccaaaggctgcgccagtacagatggactcctggaacgatttgccctgagaaagggccatcaaggtaccggctacaacactgtcgccagcaccgaccgtagaacgaacctgaatcttaggaacatctaccttataggcctcttcagcactaatgcccaacagcccatcgccgcccatactgatgacgacatattcgacacctttggcgacaacttctcgggcagcttcaatcagcgcttcatgtgtatccagaggacgccctaacattttagaaaactccagttcgttaggcttaatcagagtggggccgagagccacaacttcctccaacgtaagagactcagaatctactacgattttcgcgccggcttgttttgccttcaacagaagatcgatggtcattttcccatcaattccgggcggattttttccagccagcacaacaaaaccgcctttttgggcctgctttaaaagcatgttctcaaaagctttgcattcttctgcgctgatctgggggcctgcttcgttgatcttaatggttttgctgccttgttcaacgaaaacggttacattttgccttgtttcgcctgcaacgggggttagctgggcgtctacgtttgcttcctccaataaggaaagaagcagcgacccattcgggccgccgcaaaatcccatcgctagggtaggacaatccatcactgttaaaaaacgagagatgttgatccctttcccccctgcatcgatctttttgcctttcaggcgattaatctcttcttcgtcaaacgaatctagaaaccaagtagcatcgatggcaggattgagggtaactgttgtgatcatgtaatttacaaactccagtctattgctgaattagaatacacgacgtgcagaacgcaggttcttctgccagtaagaggtttggatactggagatgataaccttgccctggccggaagaagcgtgaatcatctggccgccgccaatgtaaataccggtatgcgtaatgcgggaaccgccatcgctaaagaacagcagatcgccggctttcaggctggaagtgctaacgcttggccatttggtggtgtttgcataaccctgtgcgctcaatcgaccggtggaaacaccaacgctgcgcaggcagtagtatacgaaaccagagcagtcaaacgaattaggaccttccgcacccaacacatagcgtttgccttgctgagccttggctaccttcaagaagttagacacattggcggacatagagccatcgttatcatccttgcccggggtagaaggcttttgcgtcggctttggcgtagaggacggcttagacggtttggatgtctcaggcgcctcaacagccttttcggaatacaaacgttcacgcgtacgcgtaccaacaacaccatcagcagtcagcttgtttgccttttggaatgccttaacagccgaggtcgtttcgctgccgaagaagccggttacattgccgtcaaagtaattcagtgctttcaaacgacgctgtaagctagagacgtcagagccgctatctccggggaaaatggtatactttttcgcatcgccagagaacaacagtttcaaggtctcttcgccggctacgccgtcgattttcagcttattggcacgctggaagtactgaatggcctctttggtgatagaaccatagaatccagtcggcagatcgctttccatgtagttgagctccatcaggcgttcctgaaggatccgtacttcttcgctggttgtccccggcgtcaaagtcgtgctcgtgattttggtagtcgcttcgtcagccttgtcctcgtcgtccacaacaggggtttccgtcggggcaggagtctcagtcggctccgcagttgcctcgggggtctccgttgcttccggcgtagaggtgggctcctccgtagtggcaggctctaccgtaacaggggcctccgtgccgtcgttgccaatggcaacatcctgttctacttcgccgccagtggtcatcgaagtctcaagactttggatgatcgccgtttggatctgcacggaaaacggattttcattcgtttccggcgccgccgaagcgaattccagtacaggcatgaaggtcatggtaaaagccaacacaccgacaccaaaagatcgaaaacgtttcattggtacatcctttctttcttttctcgggtattcaacacgaaatattatactataaatcgcatgaaaaggatataaatttttaaagaatttctatcccatcccggtgatttgttacaattttattacaaaatcaagaaaaaatcaaccctatttatagaaaatgttgttcttgtaccggtatccatgtgtttctatggtataattcattcgtatatatagaacattggagaggagaaaatgtcatggcaaccattctttgtgcagggggtgcgggctatattggaacgcatacctgtattgctgtctcttataca

SEQ ID NO: 70 - DNA, 15259 bp, Unknown
  16S sequences of unknown bacteria
caagctgatcaaccgcccctccaatgtacttcttttggacgagcctaccaaccatctggatcaggacgccaaagaagaactctttcgggcattatccgcatacaagggaagtatcctgatggtctgccacgaacccgaattttaccgcggtctcgctaccgatgtctgggactgcacacagtggacgacaaaactcgtatgacaaaagccggcatcacgcgccggccaaaatgcagagctttctcccctccggacttccccggcttcggcagtttcaccgcgctcttttcgtagcagagctcttcatcggaatcagttcactgtttccgctccgataacatattatgagagaaaatgtcgcatattgcctgacctcctgaaataggtacaaggcgaaggtcctgcgaagaaaagaagcacaaaaaaccgcggctttccaaaaatggaaagccgcggttttctcattctgtgatacggcgcgataccgcgcaatctctcgtttgtgcggtatcgcccggacttctccgagcttttgcctccatccggcttttctgagaaatctctttttccgggaccagcgaacaatcttaaaagattttttactcttcaactttcgaaccgttgatcgcatcatatccgcgctcgccggtccggatgcggatgacagtatccagatcataggcgaaaatcttcccatcaccgtaatgtccggtattggcagatttcataatggcatccacagctgtcttttcccaggcttcatcggatacgacaatctccagcttgatcttgggcagaatctgcgtatagacctcctggcctctgacgataccgatgcagcctttctgcgtcccgcagcccatgacctggtataccgtgattcccgtgatctctgccgccgtgagcgcgtccagaacatcctgcatcttttcttctctgataatcgcttctatttttctcatatcatttcactccatatttcaaaagaatatccattaatcgagaccgttgaaggacggataagcggattccccgtgttctgcagcgtccagaccgattttttcatcgtgttcttcagctctgagtttcgtaaacagacggacgattcccgcgcagatcagcgttccggcgacggatactgcgatggtcaccagaattcccgcaatctgaaccgcaaagagatggaaatctccaaagatcagaccatcccagcgagccactggattgatggagctgtcggcgaagatacctgtggtgatacctccccagataccgccgattccatggcagccgaaagcgtccagagcatcatcataaccgaactttttctttaaaacagccactgcgaaatagcagatcggactgacagtcagaccgatgatgacagagctccataccggaacaaatcctgctcccggtgtgatcgctaccaaaccgatcacgccgccggtgcacgcgccgatcacagtcggacgccccgtcttgatcacgtcgatgagcatccaggagagcatacctgccgccgcagaagtatttgtcgtcatcagcgcgtgtaccgcgagtccgtccgccgccagagcgctgccggcattgaagccgaaccagccgaaccagaggagaaacgctcccagaactacgaacggcacattatggggccgtactgagatctgtccgtacccgctgcgctttccaaggatcatcgccagcaccagaccggatacgccggaactgatatgtactacattgcctccggcaaagtccactgaacctatctccgccaaaaatccgccggcgccccacaccatatgagccatcggataatagacgatgacagaccagacagcgataaagagaaaaagcgctttgaacttcattcttcccgcgactgccccggtaatcagcgccggtgtgataatcgcaaacatcatctgaaaagcagcgaataaaagcgccggcagagaatcagaatactcgccgggatctgcgccgattcctttcagaccgacagcctgcagcgtaccgataatcccgccgttatccccggaaaacgacagagaataaccgatcataacccacatgagcgatgccagaccgatgataaaaatcgacgacatcatcgtattcaatacattctttcttcttgacaatccgccgtaaaagaacgcgagtcccggcgtcatcaagaaaacaaaggtgacagctatcaaaagaaaggctgtgttacctgcacttatcatttttcattccctcctaaattccgctcagcaaaacttctctatggccataaggaaattcgctgtccacagggttcacagatctgttcggtctttttcaccgcgaacctcatgcgacaatatgaaaaccggaataaattattccgatgtttttccatcttccccgacgtcgcacgtcaaagaaaaaacagaaaaacaaaaaggagtccgcgggccaatgccctcgaactcctttgctctgtatacagaataacacactgtatacgaatgtcaatacgacttcgcggatttttcgattttttccaatgatattccacggaacgccctcatccgcctgcagacccagacggctttttccgccggaactttgacagaatcccgacggaccagcggcgcggaccggcccgcaatccgccgccggagccctgcgttctccgcctctatgagctgcgcgcgcttttgatcaggacccgtattcctttgagaatctgtatcaccagaaggctggccagcgacagtccccacacggtcatcagctgcatgacatcgagcgtctgtaccttaaacagtccctgaagccccggcatgatcagtacgagattgatcaaaacaaatccggcgaaaaacgcgccgaagagataacggttattgaaaaagcgcttcttgaagagcaccggcgcctcagacttgcagttaaagccgtgaagcagtctggaaatgcacagcgttccgaacgccatcgtgctgcccagtacggcgccttccccatagtatcccaggcagaaagccgctacggtaaccgccgcgatacagaatccttcgattcctaccctgctgaggaaattctttgtcagaatcgattcgttcagcggacgcggcttttccttcatgacctcggaagagtgaggctccagtcccagagcgatcgccggcagactgtcggtcagaaggttgataaaaagcagatgtaccggcgcaaacggaaccggcagccctgcgacagcggcatacagcaccgccagaattcctccgaaattgccggacaacaggaataagatcgaattcttaatattggcgtagatatttctgccgttttccaccgccttgacgatggtggcgaaattgtcatccgtcagcaccatagaagctgcgtccttcgatacttcgcttcccgtgattcccatagcaacgccgatatccgcctgtttcagcgccggagcatcgttgacgccgtcccccgtcatagcgaccacgttgcccttatcctgccaggctcttacgatcctgatcttatgctctggagaaaccctggcgtaaaccgagattccctctacgaaatctttcagttcctcatcgctcatgccgtcgattacagctccctcacaggcttctgattcctccctcagaataccgatacgtttcgcgattgccgacgccgtcaccttgtggtctcccgtgatcatcaccggccggattcccgcttcgatacattcagctaccgccgctttcgattcgatccgcggaggatccatcatcgcgatgagaccgagaaatatgaaatctttttcgtcttctgtactgatcgtccgttcttcgtcaaattttttatatgcaattcccaatacccttaaaccctgacgagaaaattccatattctgttcttcgatccggcggacatcctccgctgtaatcggctgtaccgcaccgtccttctgaatcgatacggtatttcggagaaggacgtccaccgcgccctttgtaatcatcgtaaagccgtccttcagatgatggaatgtggacatgagcttccggtcgctgtcaaacggcacctcggaaagcctcggataaacccctcttacccgctgcgccggaacgcccagatcatcccccagattgatcatggccgtctcggtgggatcccctatctcctcaccgttgatattcgtggaatcgttgcagagaatgctgtaacgaagcatctgtttctgaaccggtatttccacatcgatctctccggcttcgatcacgcttccttccgtgtaataatgctctactgtcatccggttctgcgtcagcgtacccgtcttatccgaacaaatgacggaaacgctccctaacccttcgactgcctgcagttttcgtatgatggccccctctttggccatcttctgcgtaccgaaagacaatacgatcgtaacgatggagctcagcgcttccggaatcgccgcgaccgccagagcgatagcaaacatgaaagaatcgcccaccgatgcgccctgtatcacattgattccgaagagaattccgcagaatacgagaatcagaatcgacagcttctgaccgaacttatccagattgatctgaagcggagtctttttttccgaagtcgtcttcagcagctgagcgattttccccatctccgtctgcattccgatgtctgtcactaaaaacgaacctcttccgtaagtaacaaagcttcccgagtagaccatatttttccggtctcccagaggaacatccccgtcgatggtttcgatttctttttccacacccaggctctctccggtcagagcgctctcgtccactttcagactggcattttcgagaatccgtccgtcagcgggaatacagtctcccgcttcgatgcggacttcatcgcctactgtgacttccctgccgggaatctcaacgataattccgccacggagaactttagctgtcggcgccgacatctgtttcagactgtccagtgatttttcagcttttaccgtctgtacggtacccagaatcgcatttatggtaatgactaccaaaatgaccagggtgctctcaaaatcgcccagaaagcctgagacaactgccgccgcaatcaggatgatgacgagaaaatctttgaactgttcgagaaaaatgaccggaatgctctttttcttcccctcggccagttcattgggaccgtatttctcctgattcgcctttatctgttctgcgctcagcggctgggccgatccgttgatatgacggcgcacctcttctgagcccatctgatagtatggcttcataatttttcctccctttattttatcagagtctttccgcaatccattgtgcaggaaattttttcctttttcaggtaataaaaaaagacttttattgcacaatgaattatgtacaataaaagtcttgctgtttcattacgacacggacagagacgaaactctctgtcgggattgacgtcatcgtacacgcagccgataaatcggaccggcgtcagctactcccttttactgaaaataaggataccgtaaagatgacaatatgtcaagatttttccaaaaatttatatattcttattgacgatcctcgtttcgtatacgcctgtctcgatatcgatatagcggacgaaaagagatactttgttgtcttcgttcagagctccccaaacagtatcggtaaattcatcgatactgccgctgatttccacaggcgtaggctcgccttcatagctcggaagcggactgccgtcacccatataagtgtggatgtaacgggcggttcccgccttcggctcggaatacgcgaaagtgtagcgattgcaggattcgggatgatcgatgtcgctcttcaaaatcgacatagcgaaattaaacctgcctccgtctactttgataataccgctgattctcggcgtataattcggagcgtccggttcgaattctctggtacgcagagcctgttcaaaagtctgctgctgattcatcagttcataaatcgtatcggtctggtccccgtttgtgacgatcgtcttattgccaagcacgcgtaccggcgcgtagataatcaggctcggatcgctgagtttggacggatcgtaagcttctgtacgaatgccttcgccttctgttacaaaaatacggtttctgctgttttcgcttctccccatgatgaagtatgcggtcaccgctttttttccatcggctgatctgccgatgacgattcccctgcctggataagacgtgctgctgagttcctgtgccagtgatacgtatttcatattgttctccttttcttgcgattcactcgtcctgtagcttcaataactttcaaaccggagcgcagctgtgacagatccgcccggtcaaagagccgatacgattccgatacggcgccgggaagcctctgcctctccggaactttccgccgctcagtttttgccgaaactgttctccggatggatgctctgaacaaatgccaagttctgcattagctgcggcaaaagcggttcgtctgtgacatacttcacatacatcaggaaaaacgctgtctgaaacatttcctgctgctcctccagggtctttgcctcgtgcatgagcctcgaacagacactccccagacgcttatacatcttaacgcattcatcgtatttttcgacttcaaaccggtccagccactcctgaacagtgacgtccgtatccttcaccgcagcgcagtcaaaatcctccagataataatgaaaatcgtgctcctgcgtcgcatcgttgagaaacagcattctgcccagaggaaacaccgagcacggaatcggctttgcatcgtgaatcgtgcattttccctttctcagaaaagtgcagcttccgtccagacgctgcttcatcaccagcagcggcagcatggattctccgccgggcaccagctcgcagtgcatgccgatgaacgtctgtacttcgagattgagatactttgccgcccggtaaatatctacggcggaaagaagaattttatcctctttttctacatttctgcagcactcgccgcattccgtacatcgaaatcgaaatttcgtattcttggctacaaaattctgattcagctgcgattttttatagtctcttttgatcgccatatggtagaaagtctcctgtcttcgtgaataaatatcctgccggacagactatttcatccgcagatcccatacatcccgccctctccgggcaaatctgcgtgtccgccgcggaaaaaacggcggatccgaaagagaaaaccgccggctgcccgtctctcgtttcctccggcagatccgcccgccgttatctgtccctccggattattatataccatcggtatttcgatgtcgagttgagaaaacgcaaaggcatgcccggcagaatttccacagacatctcaaagacccgcggacgaataccgcgggccgtctgaagacagaaattttaattgttatctttttttctccagttcagcagaaatgcggaattgacgataaccatcacagaaccggcattgtggaccagagccccgatcacaggattcagcactccggtgatcgccaggacaatagcggcaaagttcagagtcatagaaaacgtcagattgcatttaatcgtcgtcatcatccgtctcgacagacgcagcagatgcggcagctcgtcgattttatcatcgatgagtgcaatatctgcggcatccaccgcaatatcgcttccgatcccgcccatcgcaattcccacataggatttcttcagcgctggagcatcgttgattccgtcgccgatcatgcataccatctttccgtccttctgaaaattttcaatctgccgcagtttatgttccggcagacaattggcatgaacttcgctgatccccagtcttttcgccatataccgcgcggcctgctcatggtctccagtcagcagaaccggtgtaatgccctccgccttgatctttccgaccgtatccggcgcattgcggcgcagcgtatcggacagagccgcaaaaccggcgggattttcatcgactgctatgtaagtgatcgtgcacccttttttcagatattgttccgcctgttttctcatctcctccggcattcggatctgatactcatcgagcagttctgcatttccggcaaggactgcccgctcctccacttcggcgaaaacgccccgccccggcatcatccggaaccgccgaggctgtggaatatcttcttcttgacaattttcgtagcagctgacgaccgccctgcctaacggatgttcggaccgcagttccgcacccgccaagagacggtagagctgattttcatcgaattcccggctgcaggccaccacagcgtctacttccggagtcccgtaagtgagcgtgccggttttatcgaacgcaatgccggatactgccgccagacgttccaatgcatcgccttcccggacgagaaagccgtgcttcgtcgcattgcccacagctgccataatcgctgtcggtgtcgccagaaccagagcgcagggacagaatacgaccaatatcgtgaccgcacggataatctctccggaaaacagccatgtcagagctgccgccgccagcgcgatcacgacgatccacgtcgcccatcgatccgcgacgcctacgattttggcttttccggcgtctaccgactgaaccagtcttatcatccgctgaatcgaactgtcatcgcccacttttaccgcccgcatatcaaaggcgccgaactgattgaccgtaccgctgaaaatactgtcgccttccgccttgtcgacgggaagagattccccggtcatcaccgcctgattgacggaagtctgtcccgacacaatgattccatcgacgggaatcgtctcgccgggcagtacccgcaggacatctccgacctgcacctgttccgcgggaattaccgtctccccgctttccgtcaactttctggcggtgcgcggcgtcagatgcaccagtttttcgatcccagctctggcccgcgccacagtcagatcctccagcagagctcccagctgcatgataaaagcgacttctccggcagcaaaggtctcgccgatgacaacagatgcgatcagagcgagagatacgagtacatccgcttttatatcaaattccgttacaagcccgatcaccgcctctaagataataggaattccgcacagaacgatcgcaatccatgcgaaatcaaatccgaacaccccgatgtgaaaaatactcagaaccaatgcaattcccgaaataaccagaaaggatatgtctctcttaacaccgccccattccagtatcttttccaattgcctcacgacatcttcctcctttcagacgcacaagcttatacccctataagtatatttttattatactaataggggtataggttgtcaatacacagcaaaaaaccagccttttaaaataaggctggttatgtatcacttcatatttgcaaatcgttctacagcttttgtaaattttgcgatcgtctgatccacatctccatgttcgatgccgtcgcgcacacaatgcttgatgtgtccctccaaaatcacctgccccgctttatgaagcgctgactttgcggcgttaatctgtgcgagaatatcttcgcacggaatatcttcatcgatcatgcggtcgatcgcctgcacctgaccgatgattttctttaagcgccggtgcagattgtccgcgtccatacactgtttcatagtgccacctcctcataccgtccggggtatctgtacgaagcattatccttcaaattcagacgcttgtcaagacagcacagttaccttccgtcaccttctgcggttctgctccacaaaatcgatttcctcagatccccccgacatctccgggtactacaactgaagtctcacggaacttccgccgctcttcgcctttgtgacgataatctgacggtcgacgctgactttcagctgggatacatgggaaatgattcccacggtacggctgccttctgacaggctgtttaaaacccgaagcgcctgatgcagcgattcgtcgtccaacgaaccgaagccttcgtcgataaacatcgcatccagccggatgccgccggcggaggactgaatctcatcggaaagccccagggccagggccagagaagctttaaaagattctcctcccgacagagtatttacgctgcggacggtatcattatagtgatcgaccacatccagttccagtccgctctgactcttcaggctgtccgctgttttcctccggatcaggtcatactggccgttcgtcattttcatcaggcgggaattggcccggcggagaatccggtcgaagtaagccatctgaacgaaagtttccagcgtgattttttcccgcttcggcagcgttcctcctgcggtatccgccaaaagcttcatctgagaccatcgtttttcggtctctctgctgttttccgacaatttttcgatcttttccgccgcggcccggtttctctccagcctggagcggacggcggcctgtttctcggccgcctgactttttttattctcgatgagtgtcatttcctgcgacagcgcttccggatcgccgtcagcggagccgctcagctgcgctgtcagcgctgcgattacggcctcgtttccctcgactttgacttttcggttcagatagtccgtctccgcgtttttcagagcttcggcggcaagacgctttttctccctcagtttccgtaccgtgtccaaagcttccgcctcggaggaaaagatcatttccccggaaattctctctatttcccgctccgcggaccggatctgagcgccgcacgccgccagagcctccgaaatacgctgcagatcccgtatgcactcttctttctgcgaaagaaaagccggtattattttttccagttcctcccgcctttttactgcctgctccgcctgccgcagatcctggagacgaaaaggcttctcctccagaaaacgctctgtcaattccgccgtctgcaaccgcagtttctggagatcctccgggaattccccggaatcaggatcccgtaagctctccagcccatcggtctccgccgccgttttcagacattgtttcttcagagcctcgtaagttcctctcctctccgctgtcttgctgctgagagagcgcattttttccgatgccttttccgcctgcaatttgctttccttcagctgctcctccgatggagctccctcggtctttgcggcgggcgcaggatgatgcgcagaaccgcagacggggcagggctggcctgtttccaggcgggaagccagtatccccgcctgttcatcaaaaaagattttctccgtttcggcgtatttcagggtggatatccggcttttctccgccgcccgctgatattcttcgctgcagcatttcagttcctcttccgccctgccgcaccgctcgatcatttcagaaaaacggttcatcccgctgatcttttcctccagctgctgctccgcatttcgtgccgaaacgagccgggcatccgcattctttaaatttcccgcttcctcctccgcgctcttcagcctctcttcgatttctcttttccgatgagatactttttcccgttccccgcacagttcttctgtctctcttctgaacttctccagacgatcctgccactccgccgctcttctgtgacgctgaacctgttcttccgccgcggcgatttcagcgtcgatgatctcttcttccggcgattcgttcctccgtttcttccatagaatctctgccgtctccagcagagtgcggttctgctccagagcatctcgttctgatttcagcgcacgttccgctttttttctctcctgtatccgccccaaaagattgctgatctctgccaggcgccgctctgcggcggaaatctccgcttttaatcgctccaacgtgaaaagatctgtacgttccgacgatgcgatcagtgaaaccgcatcgccggcaagcgctgtacccgctgaaagtttcaattcagcaagagcctccgcctgcggggattcaggatcgcagacaactccttcaatctcctgcagaatgcggtttttcagatcttccatcttatttccaagttcggacgcccgggattttaaatattcctgaacggaaatataaattttcgtgcggaaaatttcccggaagatttcgcttcgctccggtgtcctggccagcagcaatttcataaaatcgccctgcgcgatcatcgcgatctgagaaaattgcctggcgttcactccggtgatttttacaatctcctcaccgacctctttcagcttcgtcagcggcggacggacgtccgggaaatggagttccgcctcggctttctgtgtcgtgattccgtcccgctttttcttcggtcgctgatattcgggacttcgtttgactgtgtattctcgtcctctgtaggaaaacaccagctccacataagtcggagtctccggctgcgcatacttgctccgcagcatcgaagcgtctctggcgccgccgctggcctcaccgtacagagcaaaagagatggcgtcaaagatcgtcgtttttcccgcgccggtatctcctgtgatcagatagatcccgccttctccgaattttgaaaaatccacggtttccgcgccggcataaggtccgaaagctgacatcgtgagtttcagaggtctcatatcattctccctcctttatctgttcaaaaacgccggcgatcatccgccgttcctcctcatccatagctctgccgttctgaagctcgaagagctcggcgaagaaatcgatttcggatttttcttctccggaagaatcccatcccgcctcttccgcgctccgcgtccgccgattgtcgtaatccaaaagcatgatattgggataaatcgtgcgcaggcgccctacggcgtcgtgaatgtctccgtcatccgtaagcgtaacatgaatataggcgtcagtgtccgtgttttcgtaattctttctgctggtgagttcctcataacttccgcgaagttctctcatttcgcggcacggctctaaagggatcaaccgtatatccagactgcccttttctttgatatcgatcagtacgacagatttctgctgatttgcctcggaaaacgaatacttcaaaggcgagccgcagtacctcgctaaagcccccggaatctgctgcggcgaatgaatatgccccagagcggtatagtcgaaaggcttaaacgctgtacaatccacattgtccagtccccctatgctgatatcctcggaatcgcttcgaaaggcaccggtgacaaactgatgcgccaccatcagatttctccggcccgtatcgatctccatgcggcggatgaccgcatgcacagcatcgttataactctcgatcttctcctccggaaaaaaatgtctcacatccgccggacgaagaaacggcatcatccagacgtacagcggaccatattcatcctccacaatctccggcgatatttctccggaaaatacaggagaaagatgaatcccgctgcggcgcatgatctccgatccgaaagcgagacgctctctggaatcgtgattgccgctgatgacaaagacttccagattcctctctctcagaccggtcagaaaacggtcaaacagcaggacggcctccgccggaggcaccggcttgtcataaacgtctcctgcgatcagcacaccctctgctccgttctcgtcgataattttaagaatctgattcagaatgtactcctgatcgcaaatcatggaaaattcatacagtctttttcccagatgcagatctgacaggtggatgaatttcatcgaacactcctttgatattttttgaaataatttttaaaaacgatttctctgataaaatccggggcaaattagatgttataattctatcacaaaaccgtttctctgtggtatgatgtctgcgtctcggaccataacgccggccgcaggaaggcggaaatgaagtccacggcccgcaagagcgggaaatttaccgtcactgtatacaaggaggttcattttcataatgaaacagcaatacaaaggcattattctgatcatcgcttccgcatttttcttttccctgatgagtcttttcgtcaaactctccggtgatcttccctcgatacagaagagtttttttcgaaattttgtagccgcaatcttcgctacggttattcttctgcgcagcggaaagggattttcttttgaaaagcgaaacctcccttatctgatcatacgctccgtcttcggaacgctgggaatcctgtgcaacttctatgctgtggaccatctgctactctccgacgccagcatgctcaataaaatgtctcctttcttcgccattctgtgcagcatgttcttcctcagagaaaaaacgcgcccttaccagatcggcgccgtcctcgccgctttcgccggcgcgctttttatcatcaggcccactttttccaatctggaactcctgccgtcgctcatcggtctgctgggcggtttcgccgccggagccgcctacactgccgtgcgatttctggggcagcggggagaacggggacctttcgtggttttctttttctccgcattctcctgcctcttttgcctcccctttatgatagctgattacgctccgatgtcgctctatcagctgacgatgctgctgctggccggttttgccgccgcaggaggtcagtttaccatcaccttcgcctatttttacgcccccgccggtgagatatcgatttacgactatacgcagatcctcttcgcaacgctgtggagcctcgtcatattttcacaggtcccggatctgttcagtattctcggttacctgattatctgcaccgcggcagtcgtcaactttctgctggcacagcgccagacccgccgtaagaaaaattcctgaatccgctcctttccatgcgatatacagtacgcaaaaaaacgaagactgcgccgcagccgacatggtaaaatataatagaattttacatcagaacagaaaagagaggttccaatgaatcacacagattatcgcggcagctgtccgcacacaggattgatcggttcgaaagtcagccaaacggcggagaaaagccggtaccggcgcattttttcaaaagcgctgtctctgtttctcctcctgacggcggcgctgcttttcacggcctgtacatcggattccgataaaaatgacgaaccgctttcctccccggtatacagcg

SEQ ID NO: 71 - DNA, 32759 bp, Unknown
  16S sequences of unknown bacteria
ttctgctttttttaccagcatctttatcacccctcactattataccgcattctttccctcaattcgagaatctccaatgagaaaaaaggccaccttccggtgacctttttcgacaagctgaaaggaccgctttgcggtccttttcttgttttttacgcctcggcgaggggctggatcttgcgcttgtaggcgcgcaggtagaagagcgtgcacagcgcgcaggagaccagctccgcgatggggaaggcccaccagacgttgttgacctggcccgtgagcgagagcagccacgccgcgggcagcagcaccaccagctggcgcgcaaccgagatgatcaggctcggcattccgtcgcccagggcctggaagacggagctgatgacgatggaataggccgcgatgaggaagtgcacgctgatgatccgcagcgcggagacgcccagcgcctgcatggcctccgaggcgtcaaacagcgccatcagctgcgcgggcaggagctggaagagcagaacgcccgccgccatgatgatcaccgcgtagagcaccgccagcttgatcgtgccggtgatgcgcttcttcctgcgcgcgccgtagttgtaggagaggatgggcaccatgccgttgttcaggccgaacacgggcatgaacacgaaggactgcagcttgaagtacacgccgaagaccgccgcggccgtggaggaaaagccgatgaggatcttgttcatgccaaaggtcatcaccgaggagatggaggccatgatgatcgagggcacgcccacggcgtagatgcgcccgatggtccggccgcaggggcggaagccccggaaggagaggcggatgtcgtggttcagcttatagttgaacacgatgcccagcgcaaagcccgcgatctgccccacgaccgtggccagcgccgcgcccgtgacgcccatcttagggaagccgagcaggccgaagatcatgatcgggtccaggatgatgttgaggatcgcgcccacgccctgggtgatcatggtgtagaaggtccggcccgtggcctgcagcaggcgctcaaacgcgatctgcccgaacacgccgaagctcaggatcgaaaccacgcgcaggtagtcctcgccatagtccacgatctctgggatgtccgtctgccagagcatgaactgccgcgcgccgaagatcccgaacaggatgaagagcaccgaggtcagcatcatgacgaaaacgccgtttgtggccgcgcggtttgcgccgtcgaagtcctttgcgcccagcgaccgcgagagcagcgcgttgatgcccacgcccgtgcccgtggcaaaggcgatcatcaggttctggatcggaaaggccagggagacggccgtcagcgccgcctcgctcacgcgcgcgacaaagaccgagtccaccacgttgtagagcgcctgcaccagcatggagatcatgatcggcagggacatgctcagcagcagcttgttgatgggcatgacgcccatcttgttttcctgtgcgggaatttcgctttgcatggggttcctccttcgaaaaaaattcctgggttccgcgcgcttcctgcgcgcggacagaagaaaatctcctttgtgaaaaggagattttcttcgcggggttcgccgtttctcagatggcgcaggcgagggagtggccgctctttgcggaggcgaagatcgcctcgatgagctgcagcacgcggcgcacctgctcgggcttgacgatgagctccgcgccgttgtcgatgacgtccaccaggttgcggtagaggctcgtccagtccgcgtcgctcgtgggcagggacagctcctcgcgcgtctccgggggccggggcgccatcatgcgggtcgggcccgcgggcgtctgcaccacgaccggcgcgaccttgccctccgtgccgaagcgcggccgcgtgatgccgcccttctccgcggtgaagtcgtcgatctccagggtgccgcccgcgccgatgcagtaccaccgcggcagcgcgcggaaggcgtaggacccgacctcgaccgtcagaaccggtccgccctcgagcttgagcaggaccttgaagtagtcgtcgacctccttattggcctccaggatcgacatcagctccgccttgacgtccacgatcttcttgtccgggtacatccacaggagctggtcaaacatgtgcacgccccagtcgtacaccatgccgccgccataggccttgaaggcgcgccagccgtacatcgcgcccacggtgccgaacacccggctctcgatggagaagaccttgccgatggcgccgctctcgaccacctcgcgcatgatgcggtagtccttgtcccagcggcggttctggtggacggtgaggatcttgccgcattcgcggctgacggcgaccatctcgtcccagtccgcgacggagagggtcgcgggcttttcggtcatgacgtgcttgtccgcgcgcagggcggcgatgaccatgtccttgtggatctggttgggcgtggccacgagcacgaagttgatctccgggatcgaaaggagctcctccagcgtgcggcagggccgcatgccgaactcctcctgcgcgctctgcagctgcttttcatccacgtcgtaggccgcgacaaagtccacgccctcgatcttggaggcgttggtcgcgtgccagtgggccattccgccaaagccgatgataccgatcttcaagctcatatgcatatccttctttcctgaaattctggggttcacgggttatccgtttctcgcccaggggaactgggcgacgcgcagcggcgcctgcgcatagggaacgagcgaaatccgctccaccggcgcgccgccccgcggcgggcgcacgggcggatcgtccgccgagccgcccttctcgacccagcccgggcagcggacggccgagcaggcgatgcgggccccgccgccctcgacggcaaagccctcttccggcacgagcgcatagttccagggcccctgcggctccgcccagcggtcgcacaggggcatctcccccttgtactcccacttggccggcacgggcagggcgaagagcaccggcccgcggtagacggccagggtctggtggtgccacttctcggttcgcacctgcatggggagggtcagctcgatctcgtcgccgtcgcaccagacgcgctccaggcgcaggtactgcccgggggttccctccagccgctcgccggccacctcggcatgggcgccctcggcccagccggggatgcgcagctggatcgggaagcgcgcctcgccctccatcttcaggcggatgcgcacgcgctcctgcgtcggatagtcgccctgcaccgtcaggcggatgcgcgtctgccccgcgcgccagagcacctcgcacggcgcgtaggactgcgccgcgagccccccgccgcgcacggccatccacagatgcgccgtgaacttggggtagccctggtgcaggttcgccgtgcagcagccgtagttcggctccaggccgaagacgttcgcgtccggcttgttgttgtaccaggcgcggggatagcggtcgatgcggatctggttgacctgctggtcgtactggtgcgcccatccgtcgggcgagagggccgccggcagcgcgttgtaggcgatgcgctcccaaaggtcgccgacgcgggcctcgccggtcagggcgagcacgcgctcgagggagtagagcgtctccaccaccgcgcaggtctccgtgccctgcgaggggtttgcgccggagaggtgctcgtcccccgtgaacatgccgttggccacgccgtggaagcgcgtgagcttctcccaccccgcgcggaaggcgtccgcctgcttggtgccgccgtggagcgcgtgctcgacctgcggggtcttcagcgccatggccaggttcaccacgtgcgtgcgctggtggatctgccaggcctcggaccaggggtcgtccgtggccttgaggcgcggctccagcatggaccaggggtgcgcgcgcttctggtcctgctcgtcggggaaggtgtggaagtggcgcgtccaatccatggcctgacccaggaccttgtcgcagagcttgagcagccccgccttgcccgtgatgtcgtagagccacaggatcgcgtccacgcagtcgcccgcgcgcgcgatggcccacagccccaggggctgctcgtccagcttgtgcgccatgtaggcgaagtacttcgtcagaaagaccaggatcttcttgtcgcccgtgatggtgaaatactgctgcagggccttgagcacgaccatgcgcggccaccagtcggggttgtccttcgggccaaagaagccctcctcgtcctgggaggcgaggatccagtccacaaagcgccgggccaggttctgcagctcctcatcctccagctgccaggccagggggatcagcccgtccaaatagtaggggccgcgctcccagttttcgcccttgccgcccatccaggcgctgtcgcgcaggccgtcccaaacgcgggtgatttgaccgcccaggccgttcgcctgcgcgcgctcggccgcaagcaaatagcccaggggcttgatcgcgcccgtgggcaggggggcgaaggcgtcgggggccagcggcgcgcggtggaaaatcgccctgtcaatcatgcggggtgctcctttctccaaaccagagcggcggccggcaggtttcccggcgctccgtctccatcttacaatattttacccgtttcccctgcatagcgcaagcaatattccggtaaagcgcgccccggccccacaaaaaaccggctccgcgccgaggtcgcgcgcggagccggccgcccctttcagtcggtttgcagggaggcgcgcaggcgcttttcccacagggcgatgcccaggtacatcagcgccgcaaagaggcacagcaccgccgtgcccgccatgaccaggtccagcttgaacacctgcccgccgtagacgatcaggtaccccagccccgcgcgcgagaccaggaattcgcccacgatcacgccgacccacgtcatgccgatccccagcttgagcgcggagaccgtgttggccagcgccccgggaaagaccaccatcgtaaactcctgcaccttgctcgccccaaaggcccgcagcagcgtgcgcttctccctttccacggagaggaagccgcccagcaccgtcaccagcatcacgatcaccgagaccagcagcgacatcgtgatgatggccggcatccccgcgccgatccagacgatcaataccggccccagcgcgatcttgggcagggcgttgagcacgacgaggtaggggtccaggatcttggtcagcgtgtcggaccaccacagggcgatggccagcgcgatccccagcagcgagcccaggacaaagccgaccaccgtctcccacagggtggtgcccaggtgcagccacatctccccggtgcggatgagctcggcgatggtcgcgaccatgcgcgaggggctcgagagcaggaagggatcgatcgcgcccacgcgcgccaggacctcccaaagcagcaaaaacccggcgaggattccatacctcgcaaggcggattcccagcgcccggcgccggcgctgctgccggtagcgcgcctgcgccggggattccgtccgcaattcattgcacatgtacgtccagctccttccagatgcggtcaaagtagtccttaaactgcgcgctgcgccgccgctccatgggcgagccgggcaggtcgattcgatgctcggaccggatgcgcgccggccgccgcgtcagcaccacgacccggtccgccatggagatggcctcgctcacgtcgtgggtcaccaggatcgtcgcggccgcgcccccggagagctgctgcttgacctcgtccgagagctggatgcgcgtctgcgcgtccagcgcggagaagggttcgtccagcagcaggaagtccggctccaccgcgagcgtgcgcaccagggccgcccgctgccgcatcccgccggagagctgcccgggcagcgcgtcggcgaactccgtcaggccgcaggccgcgagcaggtcctccacgtgccgcttctgccgggccgagggctccttctggcgcacgcggatgcccagcagcgcgttctcccgcaccgtcagccacggaaacaggtggtcccgctgtaacatgtagcccatgtgcagcggcggccggcggatctcctgcccgcgcagcgtcacgcggccgctgtccggctttagcagcccggccgccagcgacaggaccgtggacttgccgcacccgctcggcccgagcagcgcgaggaactccccgctgtccacccgcagcgtaaagtcggagagcacctccgtctccccgctgtcgtcgtgataacacattgaaacgcaatcaaaaaacagcaatggctgatccatgttcctccccttccttgtgcgtgggactccgtacaatggacagcatatgcggtttcttcgcacggtgtgcggccggatcgccgccctttgcggcgaaaccgaaggccgaaccccgacgcgggatgcggcctcccgggctgtagccccctccttcctctgcaatccgcagcgacagcgtgtgcgctgcgagaaagcgggcctccagcacgctttccgggattcggcgcgccgaatgtctctcaaaaccatgcgccttgcacggtttccaagcgcgtcggctttgccaacacgcaaaaaaggctgcaccccggcgcgggatgcggcctcccgggttgtagccccctccttcctccgcaatccgcagcgacagcgtgtgcgctgcgagaaagcgggcctccggcacgctttctgggattcggcgcgccgaatgtctctcaaaaccatgcgccttgcacggtttccaagcgcgtcggctttgcgaaacgcaaaaaaggccgcaccccggcgcgggatgcggcctccgctttgtctcttaggcgatggcgctgttttggatgcggttcatgcgggcgtagatgccgccgcgggcgaccagctcctcgtgcgtgccggactcggcgatgcgcccgtcctggatgaccaggatcaggtccgcgctgcggatggtcgagagccggtgcgcgatggccaggatcgtgctcttgcccgcgatggaggcgatggccttttggatctgccgctcggtctccacgtccacggaggccgtggcctcgtccaggatgatgatggggctggcccgcaggatcgcgcgggcgatggccacgcgctgcttctgcccgccggagaggcgcagcccgcgctcgcccacgcgcgtgcggtacccgtcgggcatggcctcgatgtcgtcgtggatgttcgccgcgcgcgccgcggccacgatctgctcgtgcgtggcgtcgggcttggcgtagccgatgttctcctcgatcgtgccgttgaagaggaaggtgtcctgcaggaccggggagatgttgcgccgcaggctctccaccgtcacgtcctggatgtcctggccgtcgacgaggatgcgcccgctcgtcggctcgtaaaagcgggagatgagctgggtgagcgtcgtcttgcccacgcccgtgggcccgaccagcgccaccatcatccccggctcgcagcggaagctgatgtcctgcaggatgggctccccttccgtgtaggcaaaggagacgtggtcgaactcgatggcgcccttggggtcgcgcaggggctttgcgcccttcctatcctggatgcgcgagggcgtgtccagcaccagcatcacgcgctcggcgccggccatggactgctgcatgttctccagcagcgtcgcaaggcccgagatcggcgcgtagaacaggcttaagtacagcacaaaggagacgatgtcctccacggacaggttgccctggtaggccagcagcccgccgaaggccaccacgaggatcgtgccgatggaggagaggaactccaccgaggggtggaacaccgcgctgatcttgagcgccttgagcatcgcgcgcacgtggtcgaagttcttctcgtccacgcgctcggtctcaaagctctcctggccaaaggactggatctcgtggatgccggagaggttgtcctgcagcttgccgctcagctcgcccatcttccgctgcgaaacgcggaagaacggccgcaccttcttggcaaagatcacgccggagacgaggatcagcggaatcgggaagcaggtgatcagcgccagcttccagttgatcgtcagcaggatcgccagcaccccgaggaaggtgaccacgtttgtgatcatctccgggatgatgtgcgcgtagagcagctcaaagtcgcgcgtgtcgttgaccacgcggctcatcaggtcgccggtctgcttgtcgtggaagaagcccaggtccagccgctcgagcttgtcgtagatcttggtgcgcaggtcccccaccaggtaccaggcggccttgtgcgccaggtagttgctcaggaaccggaaggccacccgcagcaggtacagcgccagcaggatcgccgtcaggaccccgatggcccgcagggacgtctcgtccatgccgcgctccacaatgcccgtcatggacgagagcacgcgcggcgcggccaggttcacggccgttaagcccagcgtggaaagaatcgccacaacgtagaggtttttgtagcgaatcgcctcgcggctcagcctccacaagagtttcatgtccgttccactcccctttttctgtttcgccccggaaaggccgatttcgaaaaaaaagctcgaaagccattgctttcgagctactggcacctccaaggggattcgaacccctgttgccgccgtgagagggcggtgtcctaggccactagaccatggaggcaaacaagatggcagcgggactaggattcgaacctaggcaatacgagtcagagtcgtaggtgctaccgttacaccatcccgctatctgccttgttgacgcggtgccgtgtcaacgatggttattatagcaggggggattctgtttgtcaacaccttttttgcagattctgcaagtttttttccgacccttgtccgccgcgtttttttgggcagaaaaaaaccccaaagtgccgctcgccctattttgacacctgctactaaagcagggtggcgccctgcgaacatccgctgccgtccactggccgccgcgagggcgggtggcatgacattggggaatccgacgcgggctccatttgacgtctgtaggttcaaaatcaggacgttacgcacaccccaggatttcttgtttcccattatagcaacgcagcatgggctttgtcaagcggacaaaatcgggaaggagcgcgcgcgggcgtcacgaggccgcacgatccgccacggatccgcgctccacaaaggggcagggcaaaaagacgcgccggccgccccgcgcccggcgccggtccgccatgcaggcataggcggccatggcgatgtcgtgccggttgatctcaaaggtggtcagcggcggcgaggtgtgcgcgcagagcggcgcgttgtcaaacccgacgagggacacgtcctgcggcacgcgctttcccgcgccgcgcagcgcctccagcagggaataggcgatcaggtcgctctggcagacgaaggccgtgggcatctcctccggcaggggcacggcaaagggcgcgttcgccttgtcgtcgcggatttcgatctgccaggtcgggcgcgggggcaggcccgccagcgtcagggccttcaggtatccgaagtagcggtccagcacggcgctgctctggcgcacgtccccggcaaagccgatgcgccggtgccccttttccagcagaaaccgggtcgcgcgaaagcccaggtcgtagttgtccacgcgcacgctgtccacgggcgcgcgctccggcgcaaagtcgatggccacaaggtccgcggcctgcttctcgcacagggcgcgcaggtacggcccctccacctcgcccagcagaaagatgccgtcgaagaggacgcgccccaggggctcgggcaggcgcagcgcccgctcctgctcccggctgagcgccagggaatagagctggtgcccgtcgtgcgcgcagagcttgctcaggtgataagaaacctccgtgtgcaggccgttcgtctccaggaaaaagcgctccggcacgatcagggcatagcgcagcgggacctcctgcggcaggtccttctgctttccgcggtagcccaggcgctcggccgtctccatcacgcgccggcgcgtgtcggcgctgatgccgggccggccgttgagcgccctggagacggagactttcgtcagccccagctggtccgcgatgtcctgcagggtcacttttctcatccaaaccacacctcttgtcgtttcgcccctccattatagcaactgccgcgcgccagcacaaccggaagcgcgcatctcctctttgacgcatccccccggccctgctatactaaagagcgggaaaaggaggggaactgcacattgccatgaaagaaaaaatcttggttgtcgacgacgaggccgccattgcggaccttgtggaagtctacctgacaaacgaggggtatgcggtgttcgcctgcggcacggcggccgaggcgctggagatcgtcgcccgcgaggagctgagcctggccatcctggacgtcatgctgccggacatggacggctttgcgctctgccagcgcatccgggagaatcacctcttccccatcctgatgctgaccgcgcgcggggaggacacggacaagatcacgggcctgaccctcggcgcggacgactacgtcacaaagcccttcagccccctggagctggtcgcccgggtcaagacgcagcttcggcgctacctgcgctacaacggcggcgagggcgcggccccggaggacgacgagatcgacatccgcggcctgagcatctcccaggcgcggcaccgctgcacgctcaacggccaggagctcaagctcacgcccctcgagttccgcatcctctggacgctctgccggcgccgcggcagcgtcgtctcctcggaggagctgttcgagagcgcgtggggcgaaaagtatctggacaacaacaacaccgtcatggcgcacatcgcccgcctgcgcgagaagatgcacgagccggcgcgcaggcccaagttcatcaagaccgtctggggggtgggctataccattgagccatagcgaaaaccgcagcgcgggccgccgcggcctgcgcaaccgcctgacgcgccgcatcgccgcgcaatacgtcctggcgctgttcacctttgtggccgtgtttctgctgtgcttcttcctcggctggcagatctgcgcctccatcacctggtatccggaggacccgctctaccagttcctgcacctgctgctggactatctgccgctgacgctcggcatccccctgcttgcgggctgggcgatcctcacctatgtcttcatggccaagcccttgcgctacctggacgaggtgatcgacgcctcggaggagctcgtctcctcccgggagcagccggtgcgcctgagcgcgcccctgcgcagcgtgcaggaggagctcaaccgcttccgggagcaggccctgcgcagcgagcgcgccgcgcgcgaggccgagcagcgcaaaaacgaattgatcgtctacctcgcgcacgacctgaagaccccgctgaccagcgtcatcgggtacctgacgctcctgcgggacgagccggacctttcgccggagtcccgcgcgcgctttacgggcgtggcgctggacaaggccgagcggctggaggagctcatcaacgagttcttcgacatcacgcgcttcagcctctcgtccctgacgctggacgtggagcgcgtgaacttcagccgcatgctcgagcagatcgcctttgagttccagccgctccttgcggaaaagaacctggagatcgacctgcagatcccgccggacgtccaggcggcgctggaccccaacaagatggagcgcgtgctggacaacctgctgcgcaacgccgcatactacgcaacgcccggcacgcgcatcctgctcgccctgcgcgcgcaggcggacggcgtgcaggtcctggtgcagaaccgcggcaagaccatccccaaggagaagctggaccgcatcttcgagcgcttcttccgcctggacgagtcgcggtcctcgaacacgggcggcgccgggctgggccttgccatcgccaaggagatcgtcgagcagcacggcggcaccatctcggccgcaagcgccgacggcgtcatctcctttaccgtctcccttccccagcccctgccgcagcccaaggcctgaccgtcagaaaatcgcaagaatttctccacaaaaccgcaagcctttggaaagaaagcgcgcaaacctttttcgccccgttcggctacaatgatcgtgtcgaacggggcgaaattcgtttttacagccttgcgccccgggaaaggagcgaaaaacatggcaaggccttctttcacggagcgctttccgtttcttcgtccgctgcgcgtgtttcagcggcggctcttcttctacctcgggatgcggctggacggccggcggtactgccgcgcgcacagcgcgcaggacctctcccacctcgtctacgcgtccgcctcgcccctctacaaccgggagacgggcttccccatgctctaccaggagaacaaggtccacaacctgcgccttgcggccaagaagctggacggcctgctcctgcggccgggggagaccttctccttctaccgcgcggtgcgcggcgcggaccgggacgagccctaccgcgacgggctgacggtcgtggacggccgcctgatcaccgcgccgggcggcggcatgtgccagatgagcaacctgctcttctggctcttcctccacgcgccgctgcgcgtcgtggagcgccacggccaccgcgtcaaggactttcccgacccgccgagcgacgcgccccgcggcgtggacgccacgctctacgagggctggctggacctcaaggtgctcaaccccacggagaccacctatgagatccgcctcgactttgcggacggcgcactcgtgggccgcctgctggccgaccgcgacgacggtttgaccctggaggtgcgcaacggcgaggtcgcctacgtgcgccggggcggcgagatctacgaggaggcggacgtcctgcgccgcgtcctggaccggcgcacgggcggctgcctgcgtgaggaaacgctctaccgcaacgtctgccgcgtgggctacgacctgcccgcgggcacgcccgtgcgggaggaacctttggaaggagggaaagagccatgtctcaactgaacgtcgtcgtgctctttggcggctgctcgccggagcacgaggtctccctgcaatccgccgcggcggtcctgcgcaacctggaccgcgagcggttctgccccctgcccgtgggcatctcccgcaagggagactggttcctcttttccgggagcgaggcggccatcgaggacggctcctggctctccctgccggagtgcgcgccctgcgcgctgctgccggaccgcagcgcccgcgccctgctcgtgcgcggcgcgcagggcgagcgcctgctgcccgtggacgcggtcttccccgtgctgcacggcgcaaacggcgaggacggcaccgtgcagggcctgatcgagcttacgggcatcccgctggccggctgcggcacgctcgcctcggccctgtgcatggacaagcaccgcgcgcacctgctggcctcccttgcgggcgtggccgtgccgcgcggggccgtcgtcgggcccgatgcgccccgcgccgaggcgctgcgcctcgcccgggagctgggctatcccctgttcgtcaagcccgtgcgcgcgggctcgtcctttggcatcacgcgcgtcgcgcaggaggcggacctgccccgcgcgctggagacggccctgcaatacgaccgcgaggccatcctggaggaagccgtgcccggcttcgaggtcggctgcgcggtcgtgggccggggcgcggacctgctgctgggcgaggtggacgaggtcgagctcgcctccggcttcttcgactatgaggagaagtacacgctcaagacctccgcgctgcacgtgcccgcgcgcctgtcccccgcggacgccgcgcgcgtcaaatcggcggccgcggccgtctaccgggcgctgggctgcgtaggctttgcgcgggtggacctgttctttacgcccgagggacggatcgtgttcaacgaggtcaacaccatccccggctttacggagcacagccgcttccccggcatgctgcgcgcggcgggctacgggttttcgcagatcctgacccgaattttggaggaggcgatgcgcgcatgaggcagatctccctttcccacgcggacctgtaccgcggggacctgatcctggtcaacgccgcgcacgcctgctgccccggcgaacccatccccctctcgcccgcgcacgagggcagccccgtgctgctggcccgccgcgcgtcgaccctgctgggcgcgctcatggccgagatccagggctgggaaggcatcgtgccggtgagcggctggcgctcccaaaacgagcagaagcgcatctacttcgactccctgcgggaaaacggcgaagccttcacgcgcgccttcgtcgcccggcccggccacagcgagcaccagacgggcctggccatcgaccttgggcgcaggcaggaggacgtggactttctctgcccggacttcccctgcgagggcgtctgccagcgctttttggagcgggcggcggactacggctttgtcctgcgctatcccgcgggcaaggaggcggtcacgggcatcgcgcacgagccgtggcacttccgcttcgtcggcgcgccgcacgcgggcttcctggcgcgggagggcctcgtcctggaggaatacatagacctgctgcgcgagcaccccgtgggccggccgctgcgcctttccttccgcggccaggcggtttgcgtctccttcctggacgcgcgcgcgctcgcgcaggcgcagctcctggcgccggagggcgtgccgctgggcgtctccggcaacaacgcggacggcttcatcctgacggaatggggggaggcgcatgtccggctcgccgcgcttcggggcgcttgaccgcttccggcccctggcggcgctgctggtcgtggcgctgcacacctatcccctggcggatgtgagccccgatgcggagttcctgctgacgcgggttctggcgcggctggcggtgcccttcttcctgatggcgacggggcagtttgcgctgctgcccctgctgcagccgggcggggcgcgccgcctgccccgcttcctgcgcaagacggggctgctctacggtgcgtgcatcctgctctacctgccgctggggatctacggcgggcagtacgccggccttacgcccctgtccgccgtgcgcctgttcctcttcgacggaacgtactaccacctctggtacttccccgccgcgctgctgggcgtgtgcctggcgctgctgctgcggcgggcgctggggcgcgccggggcgctgaccgcggcggcgctgctctacgccgcgggccttttcggggacagctactacggccttgccgcgcgcctgcccgtgctccaggccgggtatgcggtgctgttctccctctcttcctatacgcgcaacggcgtctttctcgtcccgctgttcctgctgctgggcgcagagctcgggggcggggcgctggcggtcccgcgccgcgcggcgggggcgggccttgcgctgtcgctcctgctcttcgcgggggaggcgctggcgctgcgcgccctcgcttggccccgacacgacagcatggcggtcttcctcgtccccgcggcgctgttcctctaccgcctgctgctgacctgcccttgcgcggagcggccggcgctgcggacgctctcgggccttgtgtacgtcctgcacccgctctgcatcgtgggggtgcgcggcgcggcgaaggtcctgcgcgcgacggacctcctcgtcgagaacaacctcgcgcacttcctggccgtggcggcgctgtcgttcgccctgtccggcgcgctgaccctcctgcgcctgcgcctgcgcgcgcacaaaaagcgcccggaccctcgtcgggcccgggcctgggtggaggtggacggcgcggcgctgcgcgaaaacgcgcgggcgctgcaatccctgctgccgccgggctgcgcgctcctgcccgcgctcaaggcggacgcctacggccacggcgcggccttcgccgtgcgggagctccggcgcgcgggcgtgcaggacttctgcgtggcgaccccgcaggagggcgcggccctgcgccgggcgggcgcgcggggcgagatcctggtcctaggcgctgtgccggaggcgctcctgccgctggcccggcgctggcgcctctcgctggccgcggcggacctggaccacgcgcggcgcctgagcgcctggggccgccccttgcgcgtgcacgtggccgtggacacggggatgcaccgcctgggcgcgcccgccggggacgccggcgcgctggcggagatcttccgcctgccgaacctgcgcatccggggcgtgttcacgcacctgtgcgcggccgacggcgcgagcgcgcgggaccgcgcctatacgcaggcgcagctgcgggccttccagggcgcgctcgaggcgcttgcggcgcggggcatcgccctgcccaagcgccatgccctggccagcgcaggggtcctcgcgcagcccgaatgcgcgggggactgggcgcgggtgggccttgcgctctacggggtgccgccggcctttgcgcgggcggcgggcgcggggctgcgcccggtgctctcgctcaaggcgcgcgtcgcgctggtgcgcacgctgcgcgccggggagtgcgcgggctacggcctggccttttccgccgcgcgggagagccgccttgccgtgctctccatcggctatgcggacggtctgccgcgcgcgctctcctgcggggtgggctgcgcgctggtgcgcggccggcgcgcgccgattgcggggcgcatctgcatggaccagacgctcctggacgtgacggacatcccgggcgtggccccgggcgacgaggtcgtgctcctgggcgagcaggccggcgcgcgcctgagcgcctgggacgtggccggggccgcgggcaccatccccaacgagatcctcagccgcctggggccgcgcctgccgcgcatcccggtctagcccagccccaggtccgcgcgcacggccgcgacaaggggcgcgatgctcgcgcggtcgcagaactccaccgccttgccataggtggccagcaggtcgcggtcctcctggcggaggctggcggggtccctgcgccggagcgaggcggccagcgccgccatcatcgcgcggtgcacgagggagaggcgcgcatagtcgatccccccgcggaaggagaagagcgcagcacgcccgcgcatctcctccgggagggcgcgctccacgcccgcccggatgtgcgcggcgttctgcgggtccgcggggtcggccaggccgcaggtgaagagatagattggcttttcccgaagccggtcgcggtttttgcgcaaaaagtcgatgccgctcaggcccccggcgtacagcccgccgccgaggaggagggccgagctggccgccgcctgcgcggggtccgcctgacgccggtccacgcaggggcagccgagctcctcggcgatccactcggcatagcgccgcgcgtgcccatagggagaggaatagacgagatagagattctgcatcgcgggttcctccgtttccgattggcgttttccgggtatgtatccagcataggagaaagggctttcctcctaaagtataccatgcggcgcgcacagttggaagaaaaagcgcttgcaaagcgcggccctgcgtggtatagtgtcgatgcaaaggcatttcgccttcctgacgggaagttcccgctgtgcgggttctgacggaaaggaggcgcgcgccgcctgtgcgctcgttttgcgcatggaaaacggctgcgtcctccccaagggtcgggaagggcacgcagctttttttgtcccccgaacgcgcggggacggaagggagggcaacatggtaagaagggtggccgtaatgggcgtcatcgtggaaaaagaggactcggtcgagcgcctcaacgcgctcctgcacgactttcgggagtacatcatcggccggatgggcattccctaccgtgcgcggggaatcaacatcatctccatcttcctggacgcgccgcaggacgcgatctcgtcccttgccggaaagatcgggaatctggacggcatcagcgtcaagaccgtctgctccaacgtgcagtacacggactagcgaaacgcccccgcaccgcaacacattctgacggaaagtgcacactgaccgcaagaaaggaagaaccaccatggcaatctacaaccccaagtccatgcacgcggacgaattcatcaacgacgaagagattcaggagacgctccgctacgcggaggagaacaagaacaacgtcgaactcatcgacagcctgctggaaaaggcccgcccccgccacaccgccaccggaacggtctgcgcagggctgacgcaccgggaggcctccgtgctgctggcctgcgagatccccgaaaaggtggagcagatgtataagctcgccgaggagatcaagctcgccttctacggcaaccgcatcgtgatgttcgcgccgctctacctctccaactactgcgtcaacggctgcgtctactgtccctaccacagcaagaacaagcacatcgcccgcatcaagctcagccaggaggacgtgcggcgcgaggtcatcgccctgcaggacatgggccacaagcgcctggccatcgaggccggcgaggacccggtccacaaccccatcgagtacatcctggagtgcatccgcaccatctactccatcaagcacaagaacggcgccatccgccgcgtgaacgtcaacatcgcggccaccaccgtcgaggaataccgcatgctcaaggaggccggcatcggcacctacatcctcttccaggagacctaccacaagaagagctatcttgagctgcaccccaccggccccaagcacgactacgactatcacaccgaggccatggaccgcgccatggccggcggcatcgacgacgtgggcctgggcgtcctcttcggcctggagaagtataagtacgagtttgccggcctgctcatgcacgccgagcacctggaggcggtgcacggcgtgggcccgcacaccatctccgtgccgcgcgtcaagcacgcggacgacatcgaccccaacgtctttgacaacggcctgtccgacgacatcttcgagaagatcatcgcctgcatccgcatcgccgtgccctataccggcatgatcatctccacccgcgaaaacgaggaggtccgccgcaaggtgctgcacctgggcatctcccagatcagcggcggctcgcgcacgtcggtcggcggctatgccgaggaggagcgcccgcacgactccgagcagttcgacgtctccgaccagcgcacgctggacgaggtcgtccgctggctgatggagatgaacttcatcccctccttctgcacggcctgctaccgcgagggccgcacgggcgaccgcttcatgtccctgtgcaagagcggccagatcctcaactgctgccaccccaacgcgctgatgaccctgaccgagtacctcgtggactacgccagccctgagacccgcgccgtgggcttcccgctcatcgagcgcgagctgcgcaacatccccaaggacaaggtccgccagatcgcgaccgagtacgtcgcggacatccagaattccaaccgccgcgacttccgcttctaaattcttcccctctcctgcggaagaggaaaatcgggcccgcccgtcgaaagaaacctttcgtcgggcgggccctttgcggcctctcccgcagcgggaacaagaaaagggagggatgccgatgtaccgcatcttcatcgtggaggacgatccgggccttgccgagggcatcgcccagatggtccgggcctggggcatggacgcgcgcatcgccggggacttccgccgcgtcgcgcaggagttcgccgagtaccagccgcacctcgcggttctggacatctccctgcccttcttcaacggctactattggtgccaggagatccgcaagttctccaaggtgcccctgctcttcctctcctcggccgcggacaacatgaacatcgtcatggccatgaacatgggcgcggacgactttgtggccaagccctttgacgcgggcgtgctcacggccaagatccaggcgctgctgcgccgggcctacgattttgccgagcagagccccctgctcgagcaccgcggcgcgcagctggacacgggcgacggcacgctccgctacaagggcgagagcattccgctgaccaagaacgagtttcgcatcctcctgaccctgatggagaaccgcggaaaggtcgtcagccgggagaagctcatggagcgcctgtgggccacggacagcttcgtggacgaaaacacgctcaccgtcaacgtcaaccgcctgcgccgcaagctggagggcgccggccttcccgacttcatcgcgaccaagttcggcgtcggctacatgctcgcccaggactcggaagggggaaacaaaccttgctgtacctaaagaaatacaggctgggaatcggcctgttttttctgttcgtgctgattttcttcgtcatctttgcgctctacggcctgccgcttggcgcggtgttctatccggcgctggtcttcctcgcgctcggcggggcgctggtcctcctggacatcgccgcgcagaagcgcaggcaccgcctccttgcgcgcatcgcgagcctgcccgcggcgctgatgggcgactttcccaaacccgcgtccctggcagaggccgactacctgcgcatcgtgcaggccctgcgccaggagcaggccgagaccctggaccgcacgaacctgcgctgccaggacatggtggactattacaccacctgggtccaccagatcaagacgcccatcgcctccatgcacctgctgctgcagggcgaggactccgacttttcccgccgcgtgggcgaggacctgttccgcatcgagcaatatgtcgaaatggtgctggccttcctgcgcctggacgccgagagcacggactacgtcctcgcgccctgcgacctggacgccgtcgtccgccaggcggtgcgccgcttctcctcccccttcatccgcaagggcatctccctgcgctacgagcccctgcgcgccacggccctgacggacgaaaagtggctgcaatttgcgctggagcaggtgctctccaacgccctgaagtacacgcccccgggcgggaccatcgccatagacctggaggcgccgctgaccctctgcgtgcgcgacacgggcatcggcatcgcgccggaggacctgccccgcgtctttgaaaagggcttcaccggctacaacggccgcacggacaagaaggccagcggcatcggcctgtacctctgccgccggattctgcgcgccctgaaccacgacatcgagatcaactccgcgcccggcgcggggaccgtcgtgcgcatccgcctgcagacgcgccagggccgcctggagtgatcccgcgccttacaggattgtaagaagtgggccgcattttgttcgccccttcgatggaatggctccgcgcgcctctgctacaatgggagcatccaaacgcaaggaggcaaggaacgcaatgagcatattggaagtcaagggcgtccgcaaggtctacgtgccgcgctttggcggcagccaggtcgaggcgctgaaaaacgtcaccttctcggtcgaggagggggaatacgtctccatcatgggcgagtccgggtccggaaagaccacgctgctcaacatcctggcggcgctggaccggcccactggcggcgtcgtgctgctggacggccaggacctgaccaagatccgcgaggaccgcgtggcggccttccgccgggactgcctgggcttcgtctttcaggagttcaacctgctggacaccttcacgatcgaggacaacatcctcctgccgctggtgctggccaacaagccctattcccagatgcagaagcgcctggccccgctggccgagcagctcgggatcacggacctgctcaaaaaatacccctacgagatctccggcgggcagaagcagcgcgcggcggtggcgcgggcgctgatcgcggggccgcgcctggtccttgcggacgagccgaccggcgcgctcgactcccgcgccacggacgagctcctgcgcctctttgagcaggtcaaccgcgccggccagacgatcctgatggtcacccactcggtcaaggccgccagccatgccggccgcgtgctcttcatcaaggacggcgaggtcttccaccagatctaccgcggcaacagcacgaacgaccagttctacgagaagatctcccacgcgctgacgctgttgacgaccacgggcgccccgctggaaggcggtgagcgccgatgaggggcctgtaccgccgcctggcctggtccggcatcgcgaagaaccgcaagttctacctgccgtatctgctgacctgcatcggcatgaccacgatgtactacatcatcgcgttcctgacggacaacgagatcctcctctccttccgcggcggggagatcatgcagacgatcctgatgctgggcacgttcgtcatcgcggtcttcgcgctgatcttcctgttctacacgaattccttcctgatccgccggcgaaagcgggaattcggcctgtacaacatcctgggcatgggcaagcgccacctggcgtgcgtggtgatctgggaggccgtgttcctggcgggaatctcgcttgcggcggggctgctgctgggaatcctgctgtccaagacggcggagctgggcatggtgcgcctggtcgcggcgcagacggactaccgcctgcgcatcgaggtccccgccatccgggagacgctcgcggtcttcggcgtcatccacctgctgatcctgctcaactccctgcgccaaatccacctgacgaaccccttggagctcctgcgcagcgagagcgcgggcgaaaagccgcccaaggccaactgggtcctggcgctgctgggcgcggtgctgctgggcggcgcctatgcgctggccgtctccatcgaggagccggtctccgcgctgctctggttcttcgtggcggtcatcatggtcatcctgggcacctatctgctcttcatcgcgggttcggtcgccctctgccgcctgctgcagaagaacaagcgctattactacaagacgaaccacttcgtctccgtctcctccatgctctaccgcatgaagcgcaacggcgcgggccttgcctccatctgcatcctgtgcacgatggtgctggtcatggtctcctccacggtctgcctctacatcggcgcggaggacagcctggtcgcgcgctacccgcgctccctcgtgttccgcgcgcgcatgggcggcctgggcgcgcaggaggccgaggccgcccagaccgtgcgcgactttgccctggcccaggccgagcagagcggccagaccgcgtccaacctgctcgactaccgcctggccgagggctcggtctacttccgcgggagcgaggcggacctcgccggcaccgtgccctacgacagcgccagcacgctctgggagctgcggctcgtgcccctggaggactacaaccgcgtcatgggccagaacgtcgccctcgctcccaaccaggccctgctctacaccacgcaggtcgcggactacgaccaggacgtggtcgcgctgcagagcggcgttacgctaacgatcgcggaccgcgtggacagcttcctgcccacgggcgacgacgtggccaacgtttcgcccgtgatgtacctgttcgtgccgaacttcgaggaggtcgtctccccgctgctccccctcaccaaccgcgagggcagcttcctgatggacatgaactggtacttcggctttgacctggacggcagcgaccaggcgcagatcgcgctcttttcggacatttcggccggattggaatcgctggacctctccgtggacggggacagctacttcaccgtgcgctgcgagtgccgggcggaccagcgcgaggggttcttcagcctctacggcggcctgttcttcctggggattctgctggggatcgtgttcctgtttgcggcggtcctgatgatctactacaagcagatctccgaggggtacgaggaccaggcccggtttgacatcatgcagcgcgtgggcatgacgcggcgggagatccgcaggagcatcaattcccagatcctgaccgtgttcttcctgccgctgctgacagcgggcgtgcacctggccttcgcctttccgctgatctacaagatgctgatcctcttcggcgtgatggacctgcacctgctgatcctgacgacggcgagctgctatctggtctttgccgtgctctacacggcggtctaccgcatcacgtccggcgcctattacggcatcgtgagcggcgcgcggtgacggcgcgccatcccgtttttgtaagacttggccaaaaacgccggggaagctcgtttgcataagggaagggaggaagagaacgtgaaacgattggcaaagcgggtcctgcgcgcggtgctcatgctgctcgcgctggcgctcgccgcggggcttgcggtgggcgcggtgttcgccgtgcgcggctacaacctctaccgccaggccgcagacgagaggcccctggagcagatggtcgccgagattcagcgccaggagacctacgtccccttcgaggacctgcccgacctctacgtggacgcggtcgtctccgtggaggataagcgcttctggtcgcacccgggcatcgaccccatcgccatctgccgggcgctgctctacgacatccggacgcagtccctggcccagggcggcagcaccatctcccagcagatcctcaagaacctctacttcacccaggagaagaagctggagcggaagtttgccgaggtcttcggcgccttcgcgctggagcggctctgcaccaaggaggagatcttcggcctctacgtcaacaccatctactttggcagcggctacgagggcatcgccgcggccgcgcaggggtacttcggcaaggaggtttcggccctggacgccgtggagtgcgtgatgctggccggcatccccaacgcgccctcggcctactcgccggacgcgagcccgagcctgacggcccagcgcaccgagcaggtcctcgagcgcatggtcgcctgcgggaccctcagcgagcgcgacgcgcaggctctcagcgagcagacggagcgccggctggggctgagctcctgaaccgcgcccgcaaacacagacttccatcattttttcggaaaaagatggaagtcttctttatgcggagttttcttgacgggttctgtcggagaatcgtataatagccttggcacacgaaatattccaccgaaagaggagaaggaaatgcaattcgtcatcgaacacctggaaaagcgctatgaaaagaaggaggttctgcgggacgcgagcttcgcctttgaaagcgggaagatctacggcctgctgggccgcaacggcgcgggcaagaccacgctgttcaactgcatcaaccgggacattcgctccgacggcggcagcttctacctcgtcggggacgacggcgcccggcgggagctccaggcgcaggacgtgggctatgtgctctccacgcccacggtgcccgagttcctcaccgcgcgggaattcctcaagttcttcctggagatcaacgaggggaagatccgcagcccgcagcccctggacgtctacttcgaccgcatgaacatcgcgcccgaggaccgcgacaagctcctgaaggactactcccacggcatgaagaacaagatgcagatgctcgtcaacctcatcgccgagcccacgctcttcctgctggacgagccgctgacctcgctggacgtcgtggtcgccgaggagatgaaggcgctgctccgccaccagaaggccgggcgcgtgaccatcttctccacgcacctgatggacctggcgctggacctgtgcgacgagatcgtgctgctcagccacggcgtcctctcgcgcgtggacaaggcggacctggacgaggagggcttcaaggagaagatcatcgccgccctgcaggcggaggggccgcagggcgcgcaggaggccggccatgaataagacgctgcgcctctccttttccctgcaaaacgcctaccgcgtcaacaccatcctctacgcgatcaagcagatcccgctgctcaagcgcctgctgcccgactccctctacgcctgcgcggggctgaagatcttcggccaggttctggccgtgctgtgggagatcgggacgttcttcctgggcaagttcctgtactttctgacgatggtcgtcggggtcggcgtcctctacgagcaggcgcccacggaggcggcctttgcgcacatcctgatcttcctgacgttcctgggcgcgtttttgaacacctacctgttcaaccccacgcgggataagtactacgccgtgatcctgctgcgcatggacgcccgggcctacgcgctgacgaactacttctacagcttggtcaaggtcgtggtgggttttctgccctttacgctgctgttcggcctgctggcgggcgcgccggtctggctctgcctgctcctgcccttctttgtcgcggggtgcaagctggcggttgcggccgcctccctctgggattacgagcgccggggcaacgcgcccaacgagaacaagctgagccggatcggctggagcatcggcggcgtgctgttccttgcggcctatgtgcccccggcgctgggctgggtgctgccgctgccggtctcggcgggcatcgtgctgctgggcatcctcgcgggcgcgctgagcctgcggcgcgtcgcgcgctttgcctactaccgccagatgatgcaggagatgctctcccagtccctgcagcaggtggacgcggccaagaccgcggcccgcagcgccacggccaaggccatcaccgcggacgcgcgcatcaccagccggcgcaagggcttcgaatacctgaacgacctgttcgtcaagcgccaccgcaagatcctctggcagagcgcgcagcggatcgcgctggtgtgcctgggtctgctggtgctcgcgctgctggcgctctatctgtacccggacgcgcgcagcgggatcaacgaggtgctgctctcgttcctgccgtacttcgtgttcatcctctacgcgatcaaccgcggcacgggctttacgcaggcgctgttcatgaactgcgaccggagcctgctgacctattccttctacaagcagccgggcatggtgctgcgcctgttcgcgatccgcctgcgcgggatcatcgcggtcaacctgctgcccgcggcggtgatcggcggcggccttgcgctgctgctctacgtctccggcgggacggacaacccgctcaactacgcggtgctgctcgtctccatcctgtgcatgagcgtgttcttctccgtgcactacctgacgatctactacctcctgcagccctacaacgcgggcacggagatcaagagcggcacctaccggctcgtgatggcggcgacctacctcgtctgcttcttcctgatgcagctgcgcatgtcgattctgctctttggggcgatgtgcatcgccttctgcgtgctctactgcattgcggcgtgcatcctggtgtacaaattcgcgccgcgcaccttccgcctgcgcgcgtaaggacaaaacgaagcgcgccccgcccccgaaaccggggacggagcgcgctttttctgcgctctttgcgcttatttcaggaaacccgcgacgatgcgcgcctcggcctcctcctcggtcaggcccagcgtacggagcttggcgatctgctcgcccgcgatcttgccgatggccgcctcgtggatgagggccgcgtcgccgtggttggcggtcagctccggcgcggcgtccacgcggccgttgccctcgatgatggcgtcgcactcggagtggcccgcgcagggcgcgttgcccacgatcttggagcgataggcctggtgcgagttgtcccgcgcaaccgagcgggagaccaggttcacgctcgagttttcgccgttcatctccacgacgaagtcggtctgcgcctcctgctccttctcggtcaggattctctcgcggatgatgaggtgcgcgtccttgccaaccacggccgaggtcttgcggaccgtggtatccacgccgcccagctgcagggagtccatctccaggctcgcgccctcctccaggtagatctcggtcaccgggtcgatggagcggatgcccagccccgtgccgacgcccacgtgcttttcctcgtagagcacgtgcgagcccttttccaggaagaagcggtggatgccgttgtgccgggccggctcgcccgtctgcacgtgcacgccgcagcccgccacgatcagaacgtccgcgccctcgccgatgtagaagtcgttgtagaccacgtcgtcgatgtcgccgtgcgtcacgcacgcggggatggacacgcgctcgccctttgtgccgggctgaacgcggatgacgaggccggggttgtcctccttgctgtcgatctggatgtgctcggtggagcggcgctccacgcagctgccgttttcgcggatggaataggcgtccgcgtagcccttgctgtcgtcatagtccgaaaccatggtcaaaagctgcttggtgatctcattcatggcactcgcctccgtaaagaacctcctgtttggggcagctgtcgcagctcttttcgccggagaggagcttgcccatgatctcctgcgccgggccctgcgcggtcacgcgcccgcccgcgatgacgacgatctcgtccgcgatggccaggatgcgctcctggtgggagatgatgaccatggacccgttgagcgtcttctgcaggtcctggaagacctcgatcaggttgttgaagctccaaaggtcgatgccggcctccggctcgtcaaagatggaaaggcgcgtgtgccgcgccagcaccgtcgccagctcaatccgcttgatctccccgcccgagagcgtggcgttgacctcgcggtcgatgtattcgcgcgcgcagagcccgacgcggctcaggtactcgcaggcctccgccttctggatcttgccgccggcggccagctccagcaggtccatgaccgtcagccccttaaagcgcaccggctgctggaaggcaaagctgatgcccaggcgcgcccgctgcgtgatgtccaggttcgttatgtcctgaccgtccagctcgatggagccggaatccggcttctccagtccgacgatcatcttggccagcgtcgtctttcccccgccgttggggccggtgaccacgacgagcttgtggtccggtatctccaagtcgatcccccgaaggactgcgtcgccgtcgggggccgcccattttacatcgcgcaatgtcaacacgcggcagcacctctttctcaaaacatgttctgtgcaattctgcccaggttttgccgcgcccgcggcgcggccggggcgcgcttcgccaccccttggcattatatcgcataaccaatcaatttggaaggtttttctcgtaaaatctccaagaagagcggttcccctccccttttatcatacccgcgcccgcgcgcagaaaaacaggcccggggcggttccccgccgtcccgggcctgttttcttcagagaaaaatgccgtcacttcctgggcgtctttcgccggagcaccacggccaccagcagcaccgtcaggcccgcgatgaccaccagcgcaatgaggaacacggcgcccgcggggatctggaggccgccgcccgcgctctccccgtccacggagtagtcggtctgcgccacgcccgtcaccgcctcgttcggggtgaggacggagaggtcgtccagggtcagcaccgagggggagaggatgttctgcccgctggtcgtggtcacgacgagcgaacccacggccgtaaagtccttggggaggttgaagaccacgacgttcgtatccggcacgagctcgccgtcctccaggaccgtgtcggtattgctgtccaagatgaggttgagccagggcgattccgccgcaaggtcccggggcgtgtactcgccgtcgtagccgaggctcgtcagcgcgatgaagtaggtgcagcccgcattcgccatctcttcgtagtagatgttggcgattccggagggcttgtagacgttgcagccctcggtgatgtcgggatagagctcggcgatctccggggagatgaggccgatgacgccgatgcgcacgccgtccacctcgaagatggcgtaagggtcaaagaggagctcgccgtcctgccggagccagttggcgcacagcagcgggaagtccgcgatcgcgctgagctcctgcaggcgctcgatgcccagggccgcgtcctcggtgccgatggccgcggcgtcgtacgttgcggcgcccatgagctttacggtcttgagcccgtcgccctcgagcgcgttgccgctgtcgagcagcagggtttcataggcgctgcgcgtgttgtccgcaagggaccgcagcagcgggtagccgatggagtcgccgctgcgctcccgcacgccgtgggtgtcgcccgtgtgcaggatggcaaaggtgccctcctgcgcggcggttgcggtgggggcggccgactcggtgggggccgccgactcggcgggcgcgctcgtcccggccgcgccttcggcctgcgcaggcgcgggggtctcgtctgcaaagaccgccgtgggcagcagcagaaggcacagcaggaggcagagaatcgctttcttcatggtccgtttcgtcctttcgcagtgttcgcaagttctctatcattatatcccatccggccgcagttgcaagtgaatgttttatgaatcgttccgcaaaccctccaaaaactcccaaaactgttaggacttcgtaaagggaagcgcgcgggcgaaactttttcctgcgcgctgcgtccaatgctgtggaaacacaaaaacctttggaaaggcggaggaacccaaatcatgaaaaactgcaaaaagcttctgctcctcgtgctggcgctttgcctggcgcttgcggccgtcggctgcgccccggcggaggaggccgcgcccgaagtcaacgtccccgtgcaggacatcgcggacgagctgctcgccatggaggaccagttcgcctccatgatggactttggcgaagaggtcgtctcggagatgtgcggcctggactactccctgctggaagaggcttccctcaacgacgcgatgatgaacgtccacgctcgcgttctctacatcgccaaggtcaaggacatcgcggacgtcgacaccgtcaaggaggccttccagaagcgcctggacctgctgcagcagacgtttgagacctacctgcccgaccagtacgagctggccaaggccggccagatcgtgagcaacggcaagtacgtgatgctcgtcgtctccacggattcgcaggcggtcgtggaccgcttcaacgagatcctggacgaggcggcggctgcggcctgaggcgcacagccggaaacccgatggggagcggagcggttccgctccttatttctaggaaaaaagggaaaggagggcgcgcgtggtcttttcgagcctgagctttttgacgctctttctgccgctgacgatcctgctctatttcgcggtgccgcggcggtttcggaacctgctgctgtttcttgcgagcctgatcttctacgcctggggcgagccggtctacatcgtgctgatgctcttttcctcggtcgtggactacagccacggcctgctgatggaaaagtttgacggccggccgggcgtgcggcgggcgctgctcatttcgtcggtcgtgatcaacctctcgctgctcggcttcttcaagtatgcggggctggtcgtctccacgctcaacgcggcgctctcgctctccatcccggtgccgagcgtggcgctgccggtgggcatctccttctacacgttccagaccatgtcctactccatcgacgtctaccgccgcaactgcccggcgcagcgcgacccgatcgccttcggctgctacgtgacgatgttcccgcagctcatcgccgggccgatcgtgcgctatgtggacgtcatgcgcgagatcaacgaccggcgcgagacgttcgagggcttttacctggggatccggcgcttcctcgtgggcctggccaagaagctgatcctggccaacggcgtggggatgctgtgggactcggtctcggcgcagccggccgcctccctgtccgcgctgagcgcgtggctcggggtgctggcctacgcgttccagatctactttgacttctccggctattcggatatggccatcggcatgggccggatgttcggcttccagtttccggagaacttccgctatccgtacgtctcgcggtccgtttcggatttctggcggcggtggcacatcacgctgtcgacctggttccgcgaatacctctacatccccttaggcggcaaccgcgtgtgcgtgccgcgcaacatctttaacctcgtggtcgtgtggatggccaccgggctttggcacggcgcgagctggaacttcctgctctggggcgcgtactttggcgccgtgctcatcgcggaaa

SEQ ID NO: 72 - DNA, 15956 bp, Unknown
  16S sequences of unknown bacteria
attgccctggatccactgccccaaaacgttgccgcccgcgccgaacccgccgagatctttgcccgcgcccgtatccagaagcaccgccttgcgctggccgtacagcatatcgtccacgctgagtcccaaatagtaatccgccgcggattcgtaggtgtccttgaatataccgtcggtgagcgtcacgtcgccgtaatcgaattcgagcagtttcacgcggttttccatgaggggattgtcgctcttttccttgctttcttcgggcgcgcagccgaccaagagggcggcgatcaacgcgcacgccagaaaaatcgctgtttttttcatgctttccctccgtagcggaagtacgcgcggtaaatttcccctttcgggtaatccatgtacggcgtgaacagcacgtcgctccccttcgctctatattgcagaggcccgatcttttccaactgcggcgcagcctcttttccgacgtcgagagcggatagcacttcgtcggcggaagacgcgctcgccaaggcgacgggtccgcagcaaagccccgcgactccctcgccgaaaacttccagcctgctccaaacaggcatcgtttccagatccagcgcgatctcgtcgccgtcggcaaatgcgcgctcgacgaatatccagccgtcgcggacagggcacttttcctcccgcccgttgatatgtacggaaaacgacgcggcgctttccggacggcggaaagcgatcttcctctttcccgcgcctttctccacgcagagcgtcacccgcccgccgcgcgggtattccgatttcagccgcacgcgcatgccgcagaagtccagcgacgagggaatatagagattgacgtacaagtcgtttccccgatgaaaatagacggaacgcagaagttcgttcataaggagcggccgcgtgcccgtgcagcacgtccaggtattttcgtgcaggtgcttgcaggcatggtcggtattcagatcggaataatactgcacgtgccccgcttcgtccatgggaatgctcgcaagcgtggcgttgtataaaagtttttcgggccagttgccgtacgcggcgtcgcccgtaacttccatgagccagtcgctcaggcgatacacggcgtacgaacagcactgcgtttcgaaactatcgtgaaaaaattccaacgcgttgatcatgcccgtgcggggcatcaaccattcgaggtgcggaccgtaaccgcccgtcatcaattcctgcttttcgcgcataaaccgataaaagttgacgatcgatttcaagtagtaaggatcttggctcttctgatacgcatacgccgccgaattgaaagaattcaaatggctgtacgaatgaaaataagcggtattctgccccgcgagcggggaataatcgaataaatttttaccctcgtaaaaaatatcccagaattgcgggtactcgaaaccctttgcaaaggcgcgcactttttccgcctcttcccgctcgttccgcaattctgcgatatcggcgtagcggtagagcgattcagaaatggtgtaccactctatttccgcgggcacaggcatggtaccgttatcgcccaaacgttttttcgccgcggtatagacgggggatcccatcgccatgcgtacgaaagactgcgccatggcgaacgcatcttcgttttcgcagtaaacatagcagtcgagaaaccccctcacgtatttttccagaaagtacatgaacaacccgtcgcccaactgtgcgtcgcgaccggtaacttcccgaagccccgcaacgagcgcgtccgccttgtctttgacttcctgccgtttcgtggcggcgtaaaagcgcgcgtatgcttgcagccactgccccaaaacgttcccgcccagtccgtaccaggtccccttttctccggcgagagtcttcgccgcgggcggattggcgataccgacgcgctttcgaagttcgaacagcatatcgtcgacggagatcgccatgtaatagcggtaacattcctcgtacgcttcgaaaaaggctccctcgcttacttttacgtccgcgtacccgaacgcgatgagtttgcccgcgggcttgtcgtaatcctgaaaatccatctttccctccgttggtcgtatttgaattatatcaacctttgatataatattatcacgcatagtttgctttgtcaatagcgattagaaaattttttaaaaaatattttatcgggaattgacgcgcaatttttaaatgttcattgacaaaataagccgttcaccttataatgaaagaaagcaaggagagagttcaatgcagtccacgaaaaccaactatgaaatgaagcaatataattttcagaccgtctttaagatcattcagcgatattcaagcatttcgcggcgcgaattgcagaatttatcctcattgagttgggggagcatctcttcgatcacggcagatatggtgagcaacgggctgatcatcgaaaaatcgcataaactgggatattcggggcgcacaccgaaacttctaaccatcaataaccaaaaaaacaggatcctaggcatcgatatcaatgtttcggctatcactttcgctctttgcgatctgggcggactggtcctgcaatcggagcgcgtacgtccgcaggagttgcataaaagttatattttatcactcattgatgaatatatcgctaaatatttcgccacatacgacgagatcatcatgatcgccttttccgtgcaggggcagatcgaccgcacggaaaatatatccgtttccatcgacaagatcgatggctgggaaaacgtgcctctgcgctccctgttcgcggaaaagtacggccgccccgtctacatattccacgatcccgactgtctgctcatatatacgctcgcaaaaatgcgcaattttaccgatgtgaacaactgcgtcgccctgcggctgagccccgacggcatcggcttttccgcgctcattgacgggaacatatacaagggcgcgggcgatactggcattgagatcgagcataccaccctcgttcccaacgggcaaaaatgcaagtgcggaagatcgggatgtttttacgcctactgtacgctcgaagggctttcccgccaatataagggcggcacatacgaagagtttctgtcgctcattcgtgcaagcgagacggacgaaacgagcctacgaatttttaaaaattattcttattatcttgccgtcgcggtgcagaacctcatcatgttgttcaatcccgaatatctctttctcaacggagaaatgacagaatataaaaaactgtttgaaaaagaattttatttgaaactgaataacaattatcacagccgcgtgttcttcaattccttcgatactgagcatccagccgtgggcgcggcgcttttggcggtcagccgcaatctcaacgaactgctcttccgagattgaaaaaagaggcatatgtgccgcaaagcacatatgcctcttttacgtcttcccgaagaaattttcgggatggatgacgtgttcgcccttgatatccgtttttttcagccgctcgtcctttaaaatggcggcgcgctggatcacgttgttgccgtagcgtttgcgcaggcggtctatggtgttttccaaccgctctgctttctgttcgcttaatatatccgtaaacagattcatctgctcgatcggccctataaaatcggaaaccgacacgctgacggcgcgcacgggataattccagggaaataccgcgcggaacagttcgtatgcgcagtcggcgatatcagtcgcggagcgcgacggcagggacatttttccctgcttggaataatgtacgagcgaagagtccgtcacgatcagatgcaccgtgcgggccttgctgaacgtgctttcccgaaggcgcgccgccaccgaatcggacaagagaagaatgagcatccgaacgtcctcgtcgtttttcagatcgcggtagttcgtcaggctattgccgatgctcttgatgttctgttcctcttccctttttacgacgggcgagcagtcgaggccgtttgcgaatacgtaaagatacctcccccatttgccaagccaatcggaaagcagcgcctcgccggtgttggcgagttgtccgatggtgtaaacgccgcgcctgttgagtttgtttttggtcgcccgaccgacgtacagcagttcttcgacgggcatgcgccatacgaggtcgcggtagttttcctcggtgatctccgtcaccgcgtcgggctttttcatgtcggaaccgagttttgcgaaaatcttattccaactcacgcccacgctgaccgtaatgccgatctcctttttcacggcggcgcgtatctcttcggcgatctttttcccgccgccgaacaggtttgccgattccgaaacgtcgagccagcactcgtcaatgccgaacgcctccacgcggtcggtgtagcgctcgtaaattttgcgcacttccttggatacgcgcagatatgctgtaaaatcggcggggatctcgacgacgttcgggcatttctgctttgcctgccaatacacgtcgcccgtgcggatgccgctttttttggcgataccgtttttggcgagcacaatgccgtgcctgtcctctttgctgccgcacacgacgacgggcgtttctttgagttcgggatgccgcagaatttccaccgaagcgtaaaaattgttgagatcgctgtgcaatatcgtcctcacaagcgttccctttccacgaaccagcgcaggccctcttcttcgaaatacagatacttttcccgcccgcccatcacgcaggtgtaacgcatgggcagcaccgcgctcacgcgcgcgggcgcgcggtcgataaattttattctgtcaatctcgaaacggctgccgttttcccagatcacggcgacggggcgcatccccccttccgcgggaaagcggacgagcgtttcgacataaattttctcgtattccataccattattgtatgaaactcttgattttatatcccgaatcgcgtacaataaaggtaagaggtggaatatgtgcggcagatttcaagtgaatatcgacgaacccgaactattggagatcttgaacgatctgcaaaaagaaggccgcgagccgcccgaactgggcgagatgtacccaacggaactcgcgcccgcgcttgctgcgagaaacggctccgttgcagcgggactgttccgctgggggtacgaaaagctcgacggcaagggcgtgctcatcaacgcgcgcgcggaaacggtgcgggaaaagcccctatttcggcgcgactttttcgagcggcgctgcgcggtccccgccagcgggtttttcgagtggtcgcccgacaagaagaaatattatttccggaaacaggcgggcgggcttttgtacctcggcggctttttcaaacgcagcggcggcgaagaaaaatttatcattctcaccaaagacgccacgccgcccgtatcgcagttccatcaccgtatccccgtactcgtggaaaaggacgcgctcggcgactggctgacagacgtatcctttgcctcggattacttatatcgggataaccccgtgcccctgatctattgaaataccccgttcggatctttccgaacggggtttaatcgtctttgaatttctttgcatattccgcgtcgatacgggcgaaatacgggataaagcatctgtaaaatccgcagctgttttcgtcgatatagggcgcgcggggggaagtatcctcaagaatttccgaaagacggtaatcgccgttgactttccagccctctaaaaagccgatgcggacggcgttcgtcggacaaaagaacgaacagcgcatgcacatatcgcagcggtgcccgaatttgatctttccccgatccagacggatattcttttcgggacagttccgaacgcacagcccgcagcggacgcatttttctttgtcgactttgtaaaaaaacgaattgacgcacccgccgatcttctgtacggacaccgccgcggaagcgacgttgtaaataaaattgctaccgatttccgatatttcgccccgttccagattgtcgatcatgatgcgggcgagtttttcgtccttgtccagaatctcacggacaaattccctgtcgaacgcaaagtgaatgttatacggcatgacgaaatgatattcgcccgcaaacgccgcgcctctccgcttcatgcgccttaaaagaatgcggctggacgcgttgttcatcgcaaacgtctcgccgctgtttttatagataaaaaacttctgtcccctttcgatttccagcgtattcacgtagcggttgaacggcaagggagaattgaagccgtagatcggatagccgaacccgatcagatcgtaaccctccgtatcggcgggcggcacgccccgctcgatctccacccgcgaacatatgtgtccgtgctcttctaacctcaaaatgagaaggtcggtcaaaaaccgcgtgttgtacgttcccgtatagtagacaaaaaggatcttcataacctgaccatgccgttttccgcgagaaattcgacgtgatcgcgcaccgtttctttgagcggacggggcgaataaccgaattcgctgacggcttttccgatgggaaattcggctttttcccgaatcgaagcgagcgccgcgcccgtgtacaacgggcgctttttgcgcgctttcgccgctaggcttaaaaacggaagtccgacgtacgccacccagagaggcagcgtggggagcatttttttgcctgtcatttcggaaacgacggcgaggctgtcgttgatggtatccggcttgttggcgaaaatataactttcgcctttcttcgctctttccacgacggcggggagcacttccgccacgtcgcggatatcgaaatcattgtaaccgccgcggatcgaggcgggcagacgcccctcgatataatcaatgaacatttgcgacatatggctgttgctgtaatccccgggccccagtacgcccgccaaaagcagcaggctggcgttcagcccgcgctcctttacggcgttcaagacgacggcgtccgcctcgctcttggcgcgggcgtatccctttctcgcacgcttgggacagggaatataattgctcaaatcttctttcagccgcagaccgcgcggcaacgcctcggtggaggagatatgcagaagttttttcgcgccgtgcgcgcagcaggcgtccgttacgttccgcgtgcccttgacggtcacgtcgtacagttcctttttagagccttcgccgatcgtgactttcgccaccgtatgaatgacgacaaagggaccttctccttcgaacaggcgttccacgtccgcacggtttgcgatatctccgaatacgaacgcgggtttttgttctttgaatacctgttccgctttttggtgactgcgggcaaacccaatgacgcggcaattctccgcaagcagttttttcgtcaaaacgttgcccacataacctgtgcagcccgttacgatatacgtgacgccgcgatccatatttctattgcctccccttttatgccgcaggttcgggttcgggcgcgggttcgggcgttttcagaacgccgccgttatcggctactttctgcgccaacgccgcgaaatccgggcatccgaacgtcttagccgcatccgaaaccgccgcatggaaagcgctgaaatccaccgcctgaccggggttgttgttggtcatggtgatattgccgcttgcgataaccaaattcgtgccgaaaaatttcatttgcaaattcaaatcgatattgacagattttaaaacgtatgtctgcgagcctgcaactttttcgcgcacgatctgtatagacaggccgccttccattccgagcaattttcctaaatcgacgttcaccccatatccgttttcatcgactgtgccggaaataatttcgccgatatcggctttaaacccgaaatttcccgccatgcttccgaccagatcaatgatcccctgcagcgattccatattcaaattgctggcaaacaacaactcttcggcaaaattattcatgaattccgaagtcgttatcgcgtgcgccgttacgacgggcgtttccaaactgatatgtttgtttttatccttgtcgtaaaccgtcgtctgcgttttggtgataacgaccaaaccgtttttaagaacgatctcactatgacctttgccatagataaatttgccatcattgatctcgagtcctacgcgcaggaatgccgcgccgttcgaatccacgccgatctgcaaattatattcggcgtcgataatgatattctcacccaaaatatttaacatgaaaccgcccgacaagtcgatacccgtagccttgttgtcggcggtggcgttaaagtcggcaagcaaccgagagaggaaggcgagatcggtgtaatcgccgaggggcgccgcgatcgtttcgaacgcagcatttttgaccgccccgatcgtaagcgcaagagttccgccgttgaccgacgcgttttccagcccgaccgaatgatcgccccaagcgtccgtttccgccgtaaaggccgcgcccacgcccgttgtaaacatagattgcagcacgatcggcgcgctctcctgcgtcagcgtcgccgcggaaaggatcccgcccagatcgaagccgaatacgtcgttcaaaatgtttatgagttccattcccgacatcatcaaatcgaacatggaaatcttgacgcggagtgccgtttccgcatcgagagaaacgagcgaataactcagatacagcacgtcgtccgcaaggatcgcgtgcacgaagtgcccgccgtcgggcgtgcgcgcattattttcgtcgcgtatcgccgcgcccgtgtcgtccgtcttataattctgcacgcaaacggcaacgtccgcctttacgggcacgatcccggactccgcgttttcgatattcgcgtctacgtgcacgtcctgcgcgtccgtcgcataatccgcggaccccgtcaatgccttcaggcttgaaaaatcggcaaggtctttggcaaacaaggtcatatccacggcgtcatccgcaatgacgggatcaaactgcaccttttcggaggaaggctccaccgttgcagagatctcctgcccgaacacggaaaggctcgcgtttatgtatttccattccaccttgccgtccgtttcgctgaacccgaacacgagaggaatatcgcccgtaccgagcggcagaacgcaggaaacggtgacgaggttgccctccttttccagaacgccgttttcgatggcggacacgatttcctcggaccccgtgccgaaatcgggcagcgcgccctgtaattcggaaaccgtcagtttggcgaccgccttgtcgtacatggcgtagagcacgtcgtctgtataaacgaattgcgtttgcggtgttttcaccagcaaacggctgagcgaggcctcgctcatttccaaacgggcaaacccttcgacgagactgcccgcaacgtccagttgaacggatagcgtggattttccgttgagtacgggaatgagcccctcgccgatataatccatggcggtcatctctttctcgccgtcgtccccctttgtgggcgccgaggcgtatttgctgaaataatcctcgtaagcggaaacgtccgccgacttttcgtcgtacgagaaagtaatttccgcctcgcccttgcaggacgccgtgatgcccattttcttggaggtatagttttcccgcgttctgacggaggaaaccgtccagtcggaaccgaacacgatggtcatggaaacgtcgtcgaactgcggttcttcgctcagatcccccatcgtcttcatctgttttttataataataggtcgcgtctgcgttgttcgcgccgacggacagagaaacggtcaactcgtacttgtcgccgtttttcacgggtttggcatccttggtcaatagcgtattttcgttgatgacgtaatcggaaaattcgctcgcccaaaggccgtatttcgcctcgtactgcgtttcgtcgagaatttccgaaggctcgcccgacgcccatttggtattgagcccgttccagtccgcaggtttattcgatgcggcggtgcgcacgaccacctttttctcgccgtagaatttctggagcgccttggaaggcgccaaagaagaactgctcgtgctgattgtagaggaaatgagaagcccgtccttataatccttgctgcccacgaccgtctgttttacgttgacgataccgagcgaagtcgcgttggcggtattgcggttttcgctgtgataatatttgcgcgaattgagtttgccgatgacgaacgcgatattgtcgagcgcgtcgtaatcttcgggagaaccgtccttgggcggcgtcttggtcacgctggggctttcggggcggtaaccctgcggtttatcggaacagccgcacaataccattgctccgatcgctaaaacaagtacgaccgccagaaaacatacggcgatccttctctttgatccagtgtaattcttattcatagttcatgtcactcctgtcatacaatcttatgacatttgtattataacgatttatgaacgatttgtcaaacgaattacgccgcagcggcattattgccgcgaaggaagttgcgcgtcgaggcgagcgggcgcctgtttttcacgttcgtatgaagcatagaagggctcgtcgctcagatcgagcgattttaaaaaaaccgtacagggctttttgcaacggaacaaaaattccgcctgtacgaagagatcgcgccgttcgggcggacagtcggtcacggacatatcgccggcgaatgcgcgcttaaattccacgcagtagcggcgcggctctttcgaaaggggcagaaaatccgccatattttccccttcgaggggcgcgaagcggaacacttcgccccgcgcgtcgcgcacggctatcccgtaaaaggaagcctcttccgaacacgataattccacggatagataatcgaaatcggaaagatgattgacgatacccgaaaggcagatattgggagatacgccgaaaaagaaataatctgcattggaaggctttgctttgatcttcaacccgccgcccgcgtgaaaaattttgacgggcgcgccgtagatcttgccgctttcccaacagggaacaaggcggcaggtgcccacgttgtatccgaaacagttttcgcgcacgaatttttcgcgcaagccccaatagggcggcgaaaaataataccccttgcgcacgctcccccgctcgctgcggtacggtaaaatcgcttcgcccgttttaaggcgcgcgttgcattcccgctgttcctgcataaaggcgtacgtcatatgcacgggcttattaacgtgcggagaagaaatgcggatgcagtcctttccctcggcgcgcgcttcagcgggataatatttgccgttttccccgcacacggtgaatccgtagagcgggccgcggcagatcccgctttccgcatcgtttacgcggcaaatgaaatgatcgccctcccgccgcacgttcccgatcgcgggaaactttttattttccgaaaggacgcggacgagcgcctcggcgacgggagccttgttgacgggatgaatgggatgataatagcagtccccgtcctcgacgagccagcgcggctccgcattataaataggcacggcaaaataattttcgagtttttcctgcaacagggaaatgctctcgttgacgtacagatacccgtatctgtcgccgtaggggtaatattcgggcgcgatctgcacggcggcaaagggaatacccccgaacaacttccgacagcgcgacacgatcttgataagttcccgcgcgtaaaactgcgcgtattcgtagtcataggcggaactttcgcccagataccagacgatcgctttgaatttcagcccttcgagcggcgcgatcttttcgttgtaaacgccgccgagttgggtaaaattacgctcgccgcatcggttgtacgcctcggcggacacatagcgccccgcgcgctttaaaaattccagcagttccccgtccccttccgcgtcctcgcgagggagataactttccacggaaagcccgcccatcgatgtatccacaaaacccacgggaatacgcgtcttttcgtacaggcggacggcggtcatcacgccgacggcggaaagcgaagagaacttttcgtcgcgctcggtcacgtattcgtagtcctttctaagatcgcaaaggggcgctacgggacgaaaaattttcgcggtatcgggcgcgtcctccgagagcgccaaggaggaaatgcggcagccgcgcgcacgcgcagtccattcttcgcgcccctccgccgcagacagcgcataggacatattcgactgccccattaaaagatagcagtccccgaaccgtatttcatcggcggcgatctcttcaccgccgcaaaccgcgcgcaaaacgtacggttcgtcgccgcccgcgaccgcctgcaattttacgcggaacgcaccgtccgccgcgctttcgcactcggcgcggcgcgattcttttcccgaaagttcgacgatcactttgccgcgcgcgccgaaaccccagacttccgtttccgcgttttgctgtaagatcatgcggctgcggaagacgcgcgcgaatcggaaattttccatttcagatcttctcctttgcgtaacgttgaaaaatataacagggcacggcggaccagccgtggcacagactgcctgcgagatggaagtcggctgcgccgccctccgtttcatacagcgtcgtgtcgccgcacgtgaccatgccgccgaaagttttttcgatatcgcgaagcacgaaaccgagattttccgtatccgctttcaaaagcgcctcgtacgcccagatcttgttactcaggctgagcgacgtgagcgtcgcgtcttcgagcaattccccgaaaggacgcattcccgcgggaacgcagcccgtcatgaccgccagcgcctgcggcaactgcgcgaatccccgtttttgcccgttttccgaaaccgtcgagaacgcgccgcgtcccgcgtcgaaaaattcgcgcacgatcgcatatttcagcgcggaaatttcttttccgtacgccgcatttgcgcaaagcgccgcagtcttttgcagcgcatagagatagagcaggttcaggcaactgtcgtagcgcggcgcgagcggctcgcctcggaagatcgcgccgccgtccagatcgtccttccactcgtaaaaattccagtacggcgtttccgcaaagacgggaacaagtcccctttcttctctgcgcctttcaaaagcgcccaaaattgcgtgcacggtcggcatcatctcttccaaaaacgctttgtcttcggtaaattcgtaattttcgacgacggcaaagacaaaatacaggctgaacgagggaatcgtcacccccacgcgcgcgggaaagcacagttccaacagcccgtcttcacgaagccccttcgacatcagccgcagattcgactgcgcgtacaaaggatcgtcaaacacaaaatagccgaaaagcatctgattgcggctgtccatcgcgtacagagcctgttcgcgccagggacagtcctcgtaatgctcgtgcatgcagttttccagcgtgcgcacgccgttttcatagatcttgcggtacagtccgtcgcggatgtcggtatgtttccgctttgcggggtagcggcaggcgagaacgcggcaatcgtacaaattcgcgcgctcgcaaagaaaatacagttgcagatagcggagccccagccgccgcagattgccccgccacacgttgcggccgcggtgcgcgcggtaggtaaacgcaaaatttctgccgtcgatataggaacgcacccgcagatcgtcgaggtgttccccgaacgctgcgatcacgtcgcagtcgcacggcacttcgaaatccaggcagacgaatcccgcagtttcctctcccatatccgcgagcgcgtacacgccgtcgcccgcgccctgtaaacggtaaccgttcccggagggcagcggacagcgcggcgcaaacgtatttcccatttcgtccaaagcaatatggcgcaaataggcgttcgccgcagtttcggcggcggtcggcatcgtccgtttcaatacaaagtcgccctgcgaaacgagcaccgcgccgcggcactcttcgaatacaagacgcttattggggcggggaaaaagttcgcatgatttttcgacggcaacgctcttcgaaaagccctccgtccaatcgtcctctttcgtggaatcgtacaaaaaagaaaatccgagttgcgggctgatcttctccatcggtccgctccgatagcagagatcttcgcgggaaagtatgtgttcgccgctgtacgcgacgattcggccgaggctttcgatttcgaacaaaagtcccgcctgttcgcggcgataggtgctcgtgtcctctcccacgtatcggcagcggacggcgagcgtattttcgccctctttgcagacaacgccgacgtcgaattcgtcgtagatcttataatgcggatagtcgggatactgccccgcatagacaaaatgcccgtttacgtacgcctcgtaatcggaatcagcgctgatacgcagtttcgcgtccttttccgttacaataaactttacgataaagtccgcatactggttcgccttgcattctttcagccatatccatttgcttttggaaaaaactttgttcatcggagatcctcccgcttgtatttcttaccattctttctcgctgaccgcgcgaagcattgcgaaatatttttcgtcgggcacatagtccggaatgctgtttccgctgccaagtgcataaccgcctcgcaaagatgcccgttcaagcatctttttacagcgcgcaacaatttcattttccgaagccgtaatcagataattcacgtcgataccgcccaaaaccgccattttacccgcaaactgctcatacgcctgctcaacgggtatgatattatcctcataactgtggcgcgcatcgtagccgagggcgagaagatcatcaaagatcatggaataatttccgcaggaatgcaggatcgccggcttttgggcattgtgaatgacttctacaatacgcttatgccaagggaatacaaattctttgagatcggcgggcgagagcattgtctgggtattgaacccccagtcatcattggaaatcagcgcgcctacgctgtcatatgcagcgcaacggcgataatattccacaagtccgctgccgatcctctcgaaaacgtcgccgaccagttcccgatcgtcgtacagcatcatgcacagattatcgaatccgaccagagaaatgcagttttccagcaccccgccaggccccatgacgacgactttcatgccgcgcggaagatccgtcgctattctttgcaatgcggaatagtcgcacgccgcggcatccatccacggataacggtcaaaggatatgcgatcaacgatgcaatgccccgcattcagcgaaaccgtcgctttttcttgcgattcgccattggaaaaccagtattcgctgcctcgcacagtcgcataatcgtagccgtaatattcgaatgaacgcaccattgtccgcatgatcgcatagggcgtggaaacgtcgtatttttccttacatgcgcggcggtacagacgttcgttgagataaaattcgaacaataccggacgggaaggcaatccttttccgagaactttcaaaagttccttaaaatccgccatcgacatcctccattttttaaacttactttaaaaatattatatcaccaccccgcaagtctgtcaatctgtttttaaaaattgcaaataacatttaaaataaatcgtttgccgcaaaaaataagcccgctcgattgaaacgagcgggcttgcgctttttaaattactttctgggattcttgatattcgcctgcgccgcggacagtcttg

SEQ ID NO: 73 - DNA, 7818 bp, Unknown
  16S sequences of unknown bacteria
gtaccacttcccaaaaggctcccctgtgtaaggggagctgtcagcgaagctgactgagggattgttccatcctgctctcagctttgcccgcaatggttttaccgcccgtttttcgcggccagatccttggccatgcagcagttcttgtactttttgccgctgccgcaggggcagggatcgttgttgccaattttgtgcgcgccgcgcgcgggcgctttggcctggggcgcgccgccgcccgatgtcatggtgggggtggccacttccttgcgctccacgcggcgcgcgggcgcggcggaatagagcaggcggatggtgtcctcctggatcaggcgcaccatttcctcgaacatttcgtagccctcgagcttgtattccaccaccggatcgcggttggcgtaagcgcgcaggccgatgccctcgcgcagttgatccatggcgtcgatgtggtccatccagcggcggtcgaccgagcgcaacagcaggatgcgctccacttcgcgcatgtccatgccgttttccacgaacagcgcctcgcgctgggcgtagatcttctggctctcctcttccagcgcggcgatgaagccctcgatggtctgctgcttgagcgcgtcgaacacggccttcgtctgcccgggcagcaggcacaggcgctccagttcgccgcccaggcccgcgatgtcccaactggcgtcgttggcggcgtccgggcagaagcgcttgacgtgctcctcgatcaccgcgtggcgcatatcggcgatgcgctggcgcatgtcgccgccctcgatcacctcgcggcgctggcggtagatcacctcgcgctgctggttcatcacgtcgtcgtatttcaaaacgttgcggcgcatgtcgtagtagcggctttcgatgcgcttctgcgcgttctcgatctgcttggcgaggatgccgtattccagcgcgtcggtctcgttcatcttgccgctggcgagcatcttttcgatcatgggccgcacgcggtcggaaccgaacaggcgcatgagatcgtcttccagcgagatgaagaactgcgaggaaccggggtcgccctggcggcccgcgcggccgcgcaactggttatcgatgcggcgggattcgtgccgctcggtgccgatgatgtgcaggccgcccagcttgatgacttcctcgtgctccgcgtcggtttccttcttgtagcccgacagcagctcctggaacaccttgcgcgcttccttcacctcgtcgggcacgttttccgcgtggccgatggcttcctcgatgagctcgtcctcatagccgcggcgcttcatttcgctcttggccaaaaattccgggttgccgcccagcagaatgtcggtgccgcggccggccatgttcgtggaaatggtcacggcgcccttcttgcccgcctgggccacgatttccgcctcgcgctcgtggaacttcgcgttgagcaccacgtgcttgatgccccggcgttccagcattttggagaccagctcgctcttttccaccgaaaccgtgcccaccaggatgggctggcccgtggcgtggcggcgctccacttcggccaccacggcggcgtacttgcccttttcgttgaggtatacgctatccaccatgtcgttgcggatcatggggcggttggtggggatggtcaccacgtccaaccggtagatgccctggaattcctcttcttccgtcttggccgtaccggtcatgccggaaagcttattgtacatgcggaagaggttctggtaggtgatggtggccagcgtgcggttttcgcgctccaccttcacgtgttccttggcctcgatggcctggtgcacgccgtcggaaaagcggcggccgttcatgatgcggcccgtgaactcgtccacgatcagcacctggccgtccttcaccacgtagtccacgtcgcgtttcatgaggaaattggcgcgcagggccaccagaatgtggtggtgcagctcgttgttttcgggcgcggaaaggttgtccaccccgaaatgcgcctcggcctttttggcgccctcctcggtgaggttgatggtcttgtccttttcctccatcgtgaagtcttcttcgcgcttcagatgggcgacaaagcgatccacgcgcgcgtacatgtccgtggatttttccccggggccggagatgatcagcggcgtgcgcgcctcgtcgatcagaatggagtccacttcgtccacaatggcgaaattcagcccgcgctgcacgaggttttccttgcgcacggccatgttgtcgcgcaggtagtcgaagccgatctcgctgttggtgccataggtgatgtccgcgcgataggcggcctgcttgagcgcgggatccatgccgttgagcaccaggcccacgctcatgcccaggaagcggtagatgttgcccatccactcggaatggtatttcgccaggtaatcgttcacggtcacgacgtgcacgcccttgcccgtgagcgcgttgaggtacgcgggcaagcaggcggtgatggttttgccctcgccggtgcgcatctcggcgatgcggccctggtgcaaaacgatgccgccgatcatctgcacggggaaagggcgctggccaatggcgcgcaccgcgccttcgcgcaccacggcgtaggcctcaggcagcaaatcgtccagcgattcgccgcgagatacgcgttcgcggaacagttgggtctgcccgcgcagctcctcgtccgtcatcttttgatatttcggctccagcgcgtcgatggcgtcgaccgttttgcgcagcttcttgatctccttatcgttcgacccgccgagcagtttcttgaaaaattccaaacctctgtcctccatcagtccttaagtcgccccattatagcacattcccgcgcgcggcgcaagcacgggaaggttccgtttgcgttgcgccgcgcgcgggcgaatcttatggcgccatattcagcatggaatccacgtccggcacgtttacatagctctccggcaccgtgcctacgatgatggattcggcgatggggatggtcgatgtcacctggatggtatccgtgcccgtggggatgacgatgcgcatggtggtggtggcctccagcgaaatctcgtgccgcgtctggttgatgcccgcggattcgaatttggtcacaaagcgcgtggtcaccgagccgaccggcaccacgctcacgcggatgtccggccccatgccgctgaacaggctgatgcccagcgccgatcccagcggcaattccacgccctggtcttccagctcgcccaggttgcgctgcgcggccagcgccgcggcgctggccaggtcgttcatcttcatggtgttggccaccagcatggcgatttgcccgttttcatcggggatggccgtcaccagcgcgtcgtaggaaaggttttcgtccatcacctcgtccaccgcctggttgatggcttccaccgccagctgcttggcgcgcgcctcgctcatggccaccagcagcggcgtcaggttgcgaaaggcgatcatcaccagcacgcccgccagaatgaccaggcccagggatatgtataacagccggatcttgagcatccgcaggaaaaaccgcttcaccaagaataacaccctcttgcgctgtgtcctggtgtatcctattcgcgcgcgggggaatcggtgcggcggcaaaagcctgttggaatcgttcgcagttgacatttctgagggggtgttgtataatggtatttggttagtttggattaacctatgacaacatttctttccaccggtggcttgagattatctgcaagtgtatgccagaaaaggaagagcggctatggaatacaagataaagcagtactggaagcccattgtatccgtgattttttatattgcagttgcgacggtagcggctaaatttgtgccgcacaattcgatggaggatatatacgacggaaacatcctgctgcaaatccggcacgattttttgcaaatgctgttgatcgcgccatttgctttcgcgtattgcaggggcggacaacctcgtgcacaagaggcgggaataacaaagaagttctttagcgctattgtgtgcgtggcctctgccctggtggcagtgggcgtggcgctgcggcatgcgtctttttataccctgtacgcttttttctattatctactggtggtggcatgcggcgaagaacttgttttcagagggtatctattcgaaaggctttatgcggaaagctctttttgtatggctgtgctggtcagcggccttctatacggcttggcgcatggcattttttcttttgccgttcttcgcgcctcatggtgggagattttcagcaatatcggcgggggaatcgttggcacggcattttatgcatttttattcaaacaaaccggcacgattgccgtgccggttctggttcactgggcattggacttttgcggatatattttctgagggataggctgggatttcccggtgtgtcgtagaaagatcccagttattgcacggggccgttttccaggaacactcggcggatggcttcgagatagccgtagccatacaggtcgtccggctcgaggtagctggtttccgtccattcgttccagctgttgatggtcaccagcgggggctggttcgggtggctgtccacatagtcgcgcgccaggaggagcgcgcgctcgatcttttcgggcgtgcaatcgcgcatcacgccggggcggaaggcgtgaaagcgggggttgttgtcccagcccacggaaacgtgcgggaaataggggaaggggaagcgcttttccagccgcgcccactcggccttcacttccggcagcagatcggcataatcgcggtccacattggaaaggaaatgcacgaattggtagtgcgtggcgctgtcgaagcccagcgaatggaattcctcggcccgcacgcctttgccgccatccacgccgctcacgttggtcacggcgtcgttccacatggtgaattgcaggtgcagcccgggcaggccatcctgcacgcaggcctcgcggaaccagtccagcgcgcggcgcgccgcgtccacgccgcccaggcccttcacgagcttgggaatgtcgtaaatcatgaacacgggcttgccgtcgatggtgtagtagttcggcagatggaagtatttttcgatcacccgccgcatggcgcgctggaattccgcaaaatccacgccgccatcccagatgagcgcgcccaaatcgtcgctggtgcgcttatcccacagggacaccgcgtcgtggttggcccacatgagatagaatttcatctggccgttgtttttggccttgaggaagccgtcgtttaagcagttttccaggaaggggcggcggtcgtaccagtaccagtcgtagatgaacacgttcacgccgtggtccacggccgcctggatctccatttccatcacatagggatccgcctcgttcacatagccccacaggggcttgcgcggccactggtggccggggaacttggccacggcggatctcaccgattgccactcgcccatgccttcgggccagaagatgcgcgtgcgcggctcgtcgccggtgtaggcgggccagatataggccgccacgtcataatgctttttcatgcgattgtcctcctcgaaaatgggatttgcgccgtcaagcgcccaacctttgcgccgggccgtggccggggcagaagagaaagccggggtatgcccggcgcaaaaattcgcgcgtttccttcgccagggcgggctgcgaatccacgccggtcatcaggaagggtgcgaggcggttgaattcctgctgctccggcgaaaaccccttgatattgacgtaaatgtccccgctgaacaccagcttcagcgccgcgcaaacgatcacggtttcgcccgtcacgtggccgccgttgccctcgtaaaaatcgaacgtccacggcccgaaagcccgcgatccaatccacgaaagcaaagcgccgtcccgcttttcccccacgacggcgcaacggccggcttcgggcggaacgtattgggaaatgattttgctcagcgcgcaatagggggcgtgcagcgggttctgctcgcggaaattgggctttccctcgcgctcggcggcaaagttggcgtagcagttccggctcatgcaaacttcatcgaactggttcaaaaggccggcgtgatcgacgtccgcgtgggtgagaaaggcgcgcttgcgcctgcgcgcgaatccgggaaagagcgcggaaagcagcgcgcgcatttcgtccgcgtagcaggcgaagccgctgtcgataaagagtagctcatccccatattccagcacataggcattgctgccgcagggcggctcgatggttgtgagcgtgagggaggcggcgagcggctcggcgctcacgcgcgcgcggaaacgctcgcccctgtgatccaccacaaagcgggcgaaacgccggatgtaatcaaaggtttgcagcggggatttgccctgctcatccagaatttgcatcagccggttggcgtggatgagcacggtgttggtttcctcctgcgacaggcccaggatctggcgcatggtgttggcgaatgtgatgtaaaacacggcgccgtccagcaggcggccggtgacttcgtaatcgaggatgtgaatttcgcaaatgcgggaaatctcctcgattaggcgctggatttcgcgcgcatcctcgatcaataggcccattttgaagttctggtaggcagtgccgttttcctgggagctgatgtaggaaatgttgacgcggtggcggcttagcacttccaacacaggcgtgaccgagccgggatggtcggcaagcttcagctcgatcatcaggatttgcttgcgcgcctcctgcgcatccgccagataaccgcattctgccaggcgtccggcgatctgcgcatgctgctccgccccggcggaaacttcgatgaacagcgtgtgcgtgtccacggctttgttgtagttcacgcgcacgatgtttccgccggcggcggcgatggctttgctggcgcgcaaaaacgcgcccgccttatcgggcatgcgggtgatgtacgtcttgcgcatggcggctattccttcccggattcctgcaggcggaacgcccatttgcagcagcaggtatcgtccgccacgtcgggatagcagctgaggcattcgcaggcaatgcgctcgtcgatggcccgggcaaagccggcgtattccaccagtcccacgctcttgcaggggtgccagggcatgcccttgcgctcccgcgcggtttgcacgcggcattttttcatggtgtagatcagcgcgccgtccgcgtattccgcggtggcttcgttcaggttggcgtaaaagcgcaggctcagcgccttttccagcccttccagcccgggatgctccccgaggcccaggaacgccttcaggcgtttggcttcgatggccgtaaagcgctcccaagcctggccgtcgtggtacatcgcggcgtccatgccctcggtgcgttcgatggactggaaccagacgccgtccagcgccagccagtttttggcgtagatatcgatcagttcgaggagctcttcccggctcaacttgtccagcgccgcgtttttgcccatagcgttgcctcccgcgttttgtttttgccattatagcacggggcgctttaagatacaaggtcagcgcgcggcacgatggcctcctcagcctgtcaaaaaacctaagggagagcgagagggacggagcttcgccgccgccagtggcggaaacaggcgaattgtggaacgaagccctttcgcggtacaatcgtccccggcggcgtgtacggcggggacg

SEQ ID NO: 74 - DNA, 3302 bp, Unknown
  16S sequences of unknown bacteria
tatttcatcttttttctttctcaaataaagtatctccttctggttattttttctaaaacattaaaagggttagttcttcaccgataaaataccgtatttactaaacaaacgcacaaacaccggtctgtgctgcttgagattctttggtaatcgtcccacctcaaaataaaggcgaacaatcttcttgagttctggttcacaaagttggttcatctgtaacatacctcgtttcctcctaagattatatcttattaggtcggtgtgttacaactatagtttagcataacgctttttctctctcttgacaatatgatatgctttatgtacaataggggacaatggtggattcggaaagtataaaacaacaaaacattcaaacgaaaggagtcatggtttctaacacaatcaattgatatctatcattgcaacattttaatttaattatttattgaacttaatgtgaaaacaaaatgaatctaacttttaacatttgaggtataaatgaagttgttggaatacgttataaacttatagcaaatcccggttacattgttcttattgcattatcggattaatctcaatacatcttcacagtaacacaaaatgtatctgtacacacgatatctcatcacatgataacgcgagagactttgctaataacaatctaaacattgtgagcccaacattcattttcatttattcccaaaagttatatcgtcacaggaactttaataggctctcatgacgaaacccacatcaatgatagtatttgcaatgcataacgaatccctcattataaccaaaaacttatttttttatggaggtacttatgaaaaacctatcaaacaaattcaatacggttataacattgttattattaactacaattttatgttctagcagttctcaggcagtatcagcagaatttgatagaaacaaactagttgacagtaactcatggacaaagatggcatctgccaaaaagtcaaccagctacaattactgcgcaatatatttaagaaaaatgttggatgctaataaaagtgaaaataataactatgtaaacctgtatgcacgaatgagccaaaatcaaaccacagttatcgaaaaacaagtggcaggttatggggaatacagcaaaggtgtacaattgcttgtcaaaggaaaaaaatctatttatctcttaaaaaaggattatcgcactaagggcgaacagattaacatattcctaaaaggtcataatccaaaatacgattgctatgcaaacggaacatggaatatcgaccgtgcaaatttggaatactaggtcccatagctatataaaaaacaaattaacatacggattaaagtgtcaaaaggatactttttatagctgtcacacacatattggtgttgattttctctaaaaagactttttggcactctaatcctatatgaaagctcagcaggcactcagtgtatgaacaggtggaacgaaggaagttagtacaagatacaatgactgtcatacacttctggctctgttttgtgaggtaaatatttaaagaaaatcctgaaaatcaatgatttagggcttgacattataggaaggagattacaatgaaaaaaagacttatcttatttggattggttgtgtgcatgtgtatctgtactggcattttatgtaagcaaacacttgcaaaatcagcattccagcccggcatgactgcatcggaatgccaaaaaatgcgagtgactttcagaaaacaagatatcatcggttatcctacgagaaagaatacggattcttggattgatactttgaaggaaaaccgttctaaaaaaaatataggtcatatctacgatgactatgataatgttggcgtatttgagacgatggaagactttcgtatgtattctacagtaagtcagggcaaattaaaattattaaaaagtataaaaggcactgaaggcttacaagaagggcacattatcgatgctatgttgtatatcagctactcacccaagaaaaaaggttctaacatttatcaatcttgtgacgcatttcctgttcttcaaaagggagaagtctatctttttgtttataacaaaatacctggaaaaaagacaaaaaaggtcatggaaagtaacggagcaaagctcccggaaaaatatatggtcgagatcggcaatcttgcaaatgatcacttgccattgacgaatacaaggaacgacgccataatcgaaccaaaggaacaatatacgctggacgaattggcaaaatacgattttttttctggtagtaaaaaactattggacgaatggtataagacaaaagatgcaattttgactcattatgttggagaaaattattgggaattgcagggataaccaaaaacaagaaacggaggattcatatatgaataataaacataaagcaggcatctggcgcacctatcactgcgaattatatcgattatttcacaaaagaagtttttggctggcatttatactattgtttttgtacgctgcgtctcaatatatgtattacgccctctttgtcatacagggaaaaatagtagaaccatttgaagcaagcgcatatttcatcggtttttatcagatgtattctaaataccaaccaatttattttaaggtatttccactgctcttagcacttccttgtatttccgcatggtatgaagatacaatcagaaataaaacggccagcctcatcatgcaaaagacttcaccattgcgctatttgctagccaaagcgatggcttattttactggaaatatggtaatggtattcctttgctatgcaggcaatcttctagcctgcgcactgacattcgggcagaattattcgactgtgtacggtgagcgttatagtgaattttactatctgggcttgatgtcaaataaaccgatgcctttcatgggttattatgcaacacatacttttgcgtatttgttgattttttcgctggtgctcgctgtttttagcggcatatgcggtgtatttgcttatgcctgtactttatggctaaacagaacatttgcattagtctttgtgttgctgtatggcatgttttattttacaacccgatacgcaaaatttatcaaaggctttgatatcaattatgttttatgtgtaggaaatcaatggggacccggatttggcaaaatatttatattacttaatgctgcattactggcaagttctttattgttaattttattaaggcgtgcaaaaggagtgaaaatgatattttgaaaaggaaaatactattattggttgtgattgcgatatttttggc

SEQ ID NO: 75 - DNA, 32759 bp, Unknown
  16S sequences of unknown bacteria
gcagcatcgtagttcaaggaagggtcactggcaaccatacggccgaacaaagcaatatcaatggctggaaattcttttaatgcatttttataaagagatttctctttttcttccgaaaccgccagttgagcaagcgcctctgcctgtgaatcgctgataaaaaacaatgcgtccgtgactgtatcattgtctttcagctttaatcctgctaattttaaagcttctgcagctaactttcctgcttttttctcatcgacatcaggattatgttgcagaattttggaagcaatcatatctaccacacgttttgtacgtgttccaacgtcttttttctcaaaaatgtcagaaaacatagcacgcatagcatgtttccacgattgactggaaacccttgctctggtagccccgccgtatacggctgtttttggacttcccgtatcatcgcggttgacacaactgggtggtacggtttgcagtacgtgtatatctacgtaaaaatttttcttattcatttgaatcttcctttcctgtttctgttgtttttcttctatagaaatcctgtccccatcttaatcgaacctgggacctgtaatcctcgttttgatacaagtataaatctttggccaactcgggataatccaaaggaattccctctgaacgaagcagctgtatcatccctctgaggtggtgggcaagttcttgtatatcggcagaagttgccaatacattaaatcgcctttgaatgcgtgttttatcatcttcaccatgtatcaaacaagccactgcctttcccagaccgttttcttgccgatacatagattccttctgcaaatctttgccctgttgatgaagcgcaaacaacgtcagtgcaatataaacagcccattgtgcatgggttggcacaccgcttctgcttaacatttcttcgggtaaatcctgtaaaaacagttcccaaagctccggaatatctcccggggttgtcccgattcccctgcgtaaatttgccaaagatgcctttacagctccgtctgaagacgaatttacaatacgctttaaccgatattccacaaaatgacctacattttgcgttttactggacattctcattcctcctatttcaatgattccttcagataatatgaaaatttattgtatacttcaggcgcacaataatgatttgtcagttcttttcctttgattttttctgtcaccattctgccaacaaaagcggctgttcccgcattttctaccaattcttctcccaaagcagcggcagttttccaaacataagtgagccattgagattgcagatgatttctttcctctacagtttgactggggtccaatacggacagccatttgcgaaaaggaagatccaaacggtgataaaactcttcttttgcacggtagcttgcggcatctccttcatcgccacctgcggattttaccaaatctctggccaatctgccgacaatattcgctatttggtcacatcgttgaatttcatctaatgcaagctgtttccaagtttctcctgcctctgttaacagctccgcataaaatgtaagagaatcgctgaattcatcggttacaaaaaagtctttatccccgtattggacagaagcaatgctgaaacatatcatttgatgtttatccaacaattctaccttctgtaactgattcatccaagtcacaactcccggcagatgctttgtatcattttgttctacgatagaagcaaaatcacgccacatctgtttgctggaatcatgacgctttggttggtattgtcctgtagattttcctctttccataataggcttccaaacggtcattgtttcattgaaggcattttctctggagaaaaaatctcctcccaataatctgtagcccgttaccttatgattgttcctctccaacaacaatcgtctggactgtaaggtaagcagtgcggcaggattatccggaatggtaatttcaactcgttctccttcccgtgcctttggaagctcccatgcaggtacattcggttcccaaggttcataatcctcttttagaagtaccaaattcagcatcagtgtttcaaataatgtttttcccttagcagtaatcagacctaattttccaagccaccccgcacctggagaaggcaaattttttccttttggttttgcagacgtatcgtcatatccgtttacatataacaaccatcttgcagcttccgcataggaaatctcagttttatcctttcctgttcgcggcggaaaaagacgtatcttgttgctgctttccgacagctctccaattagcttggccgcggaatattccgttcccttggcagcagacaaagcctgcccaaacggacgttccggatgaaacagccaaaacttttcatgttgtgtatgcaaatacgctttgattggctctattggaaaacagtttgcattccacaatgctccccaacggtccaatgcatggtctgtctcttctataggtgcatcctctccatgttcatccacacgggaaaagacagtatgcaatactgccagcaataagcgaagtaccgctacattctgcgttgcaagttcacctgccaaatctgtgtaaagatgcgcttgttcgaacactgttattaaagaaacttcatcaatggttccatcccttttcatcacttttatccaaggttcgtccaatagattaaattcacattcccggttccccatgttcttcctcctttccatacctgagaccttcttcttgtgtatacatgatatgaaatccacatagttctgcactgtatgcttcattcaacaatagtaccaattctccttttatccaaaatgattcctgccattccggaatcatttgactgttcatacgttctaactcttcaatggttctgtccaaatttttaccaacacaaaacgctctgggcaagttcattctttgacgcgcaatttgcctgcattcttcttctgacggaacatgatttgcaggaacaacgacacctccattttgccaaggtaaaaaggaaatttgtccgtcttttcttagcatcatcaccaaaacactgatagaagcatctccgtctcgtactgttgcctgtgccctttcctcattgtcgggcaaatccgtacttagcaaatctgaaatcacattcaaattagcatatcgttttgagagactgggttttggtatggaataaaccttcgctttttccttttggctgtctatgtgcctgcaataatcgctccatgcctgccgggcaatttcgtctaactctgatgtatcctgcggttcctgataagtatcctgcactaacattggtatatcctgtggtaatgtaatagaatttggcagtaaacgtttggtttgcagtaacagccaatctccatatacaaaacgggaaccttcttctaacgtttctgtgtttgcacccaatacggcacaacaaggttgggttacgtttgcaggacgcttgcgagtatgacggtgtaatcgtcccaatcgctgcagcaacaaatccattggacacaaatctgtgatgagaaaatcaaaatcaatatccaaagactgctccaaaacttgagtacctaccacaatcaaatgattacgtgtatcaggtgtagatttcttacccaaacgctgtaacaatacatgttctttttgagcacggtcaggcatcaaaaaatgagaatgaaacactaaaatttccgtatcaagcagtattcccttcagtttatctgctaaattttgagctctgcgcacagtatttacaatgactcccgcacagcccccttccgatagcgcttgttttaaacactctgcaattgcttcgtcagaaatgcacttgaccgaaacggttttggaaggtgtatccacggcaatggcttgctgtttgacggtttccccatctgtccacgttaatatgggatacgctctgctaacaggcaattcgtcatctttcaacttttttcgccccagatacgcactgataaattccaagcgtcgtttttcaggaagcgttgcggaaagcagaatcacaggaacaccatatcttccaagccacatcagtgctctgtctaagtatgtgttcatgtacgcatcgaaggcatggcactcgtccacaatcacgatttttcctgctaaacctaagtgacgcagcatgacatgtttttgttttaatgccgccattaacaattggtctactgtaccaatgacaaaatcagaaagcaatgcttgcttccgcccttcaaaccactgatgtgctaccaatccggaggaactcatatcctccgcaaggtgagaagtaccatgaaacaacgcttgatattgctcattgagttctgccataccatgtgccaatcgaatggaatgcagggtatcttccgactgttccatcgcccactgctccaaccgtggaaaaatgccattggcagtggcctgggtaggcaatccaaaaaataatcctgcactgcctgttttagcggtcaacacttctgccgcagccaatgccgcttctgtttttcctacacccatttgtgcttctaaaatcagtatgccgggctgtacagcatcttcagctacctttatcattgtcttttgaacctcgttgggtaaaaatccaaaacgactttgaaattgagcatcatccataaaaaagcaagaaggcatccataggtccggtaaatgcaatgtttcccaagccttttgtgctctatactcaacggaactatccactccgttatcatctatatcaatcaagggaaaataattggtattgctggcaatccagtcagccataatcagaagtcctgttaacaacatctgtgcccccatatccaactgcggcaattcttctacagatgtgtatcccgatgtttccaaagaaaattggagccattcctgtctgactgcctcccaaagctttccttgttcactgtcttttcctttacagccgtagtaattctcttcatagtaccgtgtttgattttctacatcatacttgattccctgtggttttccatgatgtgctcctactaccaccgctacagactgagggcaatcaaagtctaataaaattgcttctcctgccaaagcatggggagatttgctcgctgataacaaggaattcattccgtacaataataaaccagagtgttcgatacgtgttctcaattctggaaactgttccgatattcccgattgaaacaccggcgttaacttgccaatatcatgggtcaaagccagaaatgtacatagatttaaaaaatcttcttggctcatttcggaatccgccgcatgtaccacagaggcaggaagccatgtaaccacgagcttacgaatgatatttgcggtatctgcaaaatgtacccatgccggcaaccactgcaatgtgtttttttgagttgattttgccgcaaggctttgcagcgcaggtgaaaattgcgagtaagctgcttttatccataaagacataaggttctccaccctcttttagaaacttttaattttctctcattttaccacatattacctgtaaaataaagccttttatagtaaatcaaccaaaataattccacaatttatttttaaatctatttattgttaatatatctcacaatataattgttttcgaattatcataaaacaaacatatatagaggaaaaggacaaaattcctattttgctatatctcccttaaccggtttcagcctccgttgtgaaagttacagttgaacaactaaaatctccgtacactccctaaaaaaggtcccttaaatgcattagttattataaataaaaaagacttagaacagaatttttattttctgttatgagccttactttataaattttttcttgattaagatatacctcagttccttttcaaaaacaattctgatagttccccatcatcaatattcaaaatataagtaaaaaatccgctatgatgactattcatcatagcggattcagaaataaaagaaaacgaccatttcttttgtatctataaaagtatgtaatatgagaaccttgataaaacaaatactattgaatcaacattgcatctccaaatgaaaaaaagcgatatttttccttcacagcaacttcatatgcgtgcatagtatgttgatacccggctaaagcacaaaccaacataatcaaagtactttccggcaagtgaaaatttgtgattaaaccgtccaatacctgaaattgatagcccggataaatgaaaatatctgtccaaccttcactttctttgatacaaccttctttttttgcaacagattctaaggtacggcagctggttgttccaacggcaatcacccgtccaccctttgcttttgtttccagaatcaaatctgctgtttcttttggcatttcataatgttcagagtgcatgatatgttcttctaccttttctacactgacaggacgaaaagtacctaacccgacatgcaaagtcacgtatccaaaacgaacgcccttttcttccagcttcttcatgagttccggtgtaaaatgcaagcctgccgtaggcgctgcagcagaccccaattctttggaatataccgtctggtatctctcctgattttctaatttctctgtaatgtaaggaggcagcggcatttgaccgatttgctctaacaaagcataaaaattcccctgataatgaaaacgaaccaatctctttccatcttccaaaatttccagcacctgagcttccagcaagccttctccaaacacaaaccatgtgccgggctgtgccttccttcccggttttgcaagcacttcccatacatcttgttctttttgtgtcagcaataaaaattctatgtgaccgccggtatcttttttgcttccgtaaattcttgcaggcagaacacgggaatcgtttacaatcaaacagtccccgggctgtaaatattctgtgatatcataaaaatggcggtgctccagttctccgcttgttttgttcatcaccaacaagcgagaagagtctctcggctccaccggagtttgcgcaatcaattcttttggtaaatcgtagtaaaaatccttggtttccatacgttagaaaccctcctgtattaagttcatattcataaattttttctcacgtaaaatttattataaactattataaatcatttgacaatcgcagtttctgatgttatgatgttggtaagtttaaaagaaagatagaggtgcggcatttataagtaccaagcgtgaaactgcccaagtttatgagcgtttgcaaaaggaactgtcgccgaagagtttgaaagtgggtcatttcaactctgggtgctgagagaatatctctgcaactgtcatcatgcatgtatgatgttgcgctatctgttatcctaatatgataaatggataaagacacagtagaagcataatatacctgcatgatgatcggttttttgaaaaccgatcttttttgttaccattttattctttagtattttggaggaaccaacatgaaacagtacaaagtaggcattattggggcaacaggtatggttggccaacgttttgcaacattattggaaaaccatccatggtttaccgtaacaacagtagcggcaagcgcacgctctgccggaaaacgttacgaagatgccgttggaagccgctgggctatgaaaacaccaatgcctgctgctatgaaagacatgattgtatacgacgcaactgctgacattgacaaaattacctctcaagtagattttgtattctgtgcagttgacatgaaaaaggatgaaattcgtgcattggaagaagcatacgcaaaagcggaatgccccgtgatttccaacaatagtgcgcatcgcggcacaccagatgtaccaatgattattcctgaaatcaacgacgaccacgctgagattatccacgcacagcgcagacgccttggtacaaaacgtggatttattgcagtaaaatccaactgttctctgcaaagctatgtgcctgctattcatgcaatcaaagatttgggcattacaaaagtgctcgcctgcacctatcaagcaatttccggtgccggcaaaacatttgaaactatgcctgaaattttagataatgttatcccttacattggcggtgaggaagaaaaatccgaacaagaaccaatgaaaatctggggccacattgaaggcgaccaaattgtaaacgcaacttctccaagcgttaccgcacaatgcctgcgtgtacctgtatctgacggacacacagctgctgtattcgcttcttttgataaaaaaatcccaatggaagaaatcattcaaaaatgggaatcctatcgtggtgcagcacaagaattggaattgcccagcgcaccaaagcaattccttcactacttccatgaaaatgaccgtccgcaagcaaaattggaccgcaatttagaaaacggtatggcagtttctattggtcgtttgcgtccggactcacagtatgatattaaatttgtttgtttatctcataatacattgcgcggtgcagcaggcggcgctgtattaatggcagaattactttgtgccaaaggatatcttgattgatacaatcacatgagatgacattgacttaggaggtttttaccatgaaaaaagagattttcaccggatccggtgttgctattattacccctatgaaccaagacggttctatcaactatgcagaactggaaaaactgattgaattccagattcaaaacggcactgacgcaatcatcacttgtggcactacaggcgaatctgctaccatgtcacatgaggaacactgtgaagtcattagatttaccattgaaaaagtaaacaaacgtgtacctgtcattgcaggtaccggcagcaatgacactgcttatgccattgagctgtctcaagaagcagaaaaactgggtgcagacgctttgctggtagtaacaccatactacaacaaagcatctcaacatggtctgataaaacactttaccgcaattgccgacagtgtatccattcctatgattttatacaatatcccttccagaacaggatgtctgattaagcccgaaacttacgcagagctttgcaaacatccaaatattgtagcaacaaaagaagcaacaggagatattactctgattgcaaaagttgctgcactttgcggagatgaactggctatttattcaggtaacgacgaccagacattaccgattctctctttgggcggaaaaggaatcatttcagttatcgcaaatatttgtccacaactatcacatgatatctgtgcaaagtactttgcaggagatattgcagaaagccgtaaattatttttagaacatttggaattaatggacgccatgtttatggacgttaacccaattgtcatcaaagaagctgccaatttaatgggatttgactgcggttcctgccgtatgccgctttgcgacatgacagaacaagaccacgcaaaactggtagccattatgaaaaaataccatttaatctaaataaaaatataagacggatggaaacgcgctgtatccagacagcgcctttaaagtgaaaggcatggaaagagcaaatgaaacgtattattttaagcggagccaatggtgcaatgggacacgaaatcgctgcatgcatcaataatcgggatgattgcaaaattgttgcaggtttagatattaacaccaatgtatacagcgattttcccatttataataatgcagatgaattaacatgtggagcagatgtgattattgatttttcccatgtttctgttttaacaccacttttggcatacgcaaccaaggaacgcattcctgtggtactctgtacaacaggatatacagaatctcaagtaaacgaattaaaagaggcatcaaaacaaattccggtattttattcccgcaatatgtcgttggggattaacttattgattgaacttgccaaaaaagctgccgttattttgggcgaccaattcgatatagagattatcgaaaagcatcacaacaaaaaaattgatgcccccagcggaactgcactgatgattgcagacggcatttgtgaagtattggaccgtaccatgcattatgaatatgaccgacattctcagcgcaaaaaacgtgataaaaatgaaattggtttacatgcagtcagaggcggtaccattgtaggtgaacatgaagtattgtttgcaggacatcatgaaacactttctctgacccatgtggcccaatcaaaagaagtgtttgcaacaggttctattaatgcagcaatgtttctggcaggcaaacctgcaggactgtacgatatgtctgatttaattaatgagtaagaacaaaaaaggaggcttttgctttatgacaaacattacttccagtatggatattacattggttacgttacaaaactgtccttctgatttaaccgtaattcatcaaatttttgataaagcggctgagctgggtatcgacattgatatgatttcattagcgccttcccaaagcgcaatgtcttccctatcatttaccatgtcggaccacgacctgccaaagctgttgacattctccagccacctgcacaatgagcttggagtaaaaacagttatcagcagcggcaacagcaagattattgttgcagatgaagcgatgaaaaatcaaccgggatttgccagcaaaatatttggcgctgccgcaaatgcaaaaacagatatccgtatgataaccactgcagaaacagaaatttctctattggtgccggcatctgatcatgaaacaactgtctccgccattgaagaagtcattgcataaacccaatgattttgataacaccacgaaaaaacgaggtacacaatattgtgcacctcgtttttttgtttataatatttttatgtgaacgatataaccacttactattttattcttaattgacaatgaagagtagcaataatactgtggtaaactctttgatataacaaacacatattgaatctattttctcgaataatgtctgaaaactatccctatttcttaccacattatgataatgttactacttttattttaccaaaatgcttttctaaagttgcaatttcttgatgcaatgttttcttttatcttcaaatacacatacaacctggaatttaggaaaactattttatatcaagtttcttctgcattatcatatttttcaaaaatacgccatgacgttccacctgttgttctttgaccaactgatagttcctgtcccgaaaaaacggataggcagtgatggaagcatgcgtcacaatcgttacataattctgctctgccacatacagttccagtctgtccataattgcagttgcaattccccttcgctgatattctgcatgcacataaagtctgtctaaaaaatttccgttcaaatcaccaaagccaacaataataccgttcatttctgctaccaatgttttatggtgaatcaacgataaatcccaagcaatcgggtcaatcttattattgtttgcccacgcttctatttgttcctgtgtataatctctccggttgattctatgcaccgtttcataaaacaatgaaagaatggcttgacaatcgtcactatgataagaccttattctcatatgtgctccttacaaacagcgtcagaaaaaccgaaaatataatccaatcgatacaatctatttatggtaacggccatgattttgtatctgaaatgcacggtaaatttgctcgcaaagcattacccttgccaattgatgcggaaacgtcatacgtgacatggaaagctgcagcgttccgctttgtttgactttatcgcacaaaccgtgggaacttccaatgacaaaactaactgcactgacaccattcaaagccaatgtaccaagatgctgtgccaaggccggagaatctatttgctttccttcaatgcataaaggaatcagcgtgctgcctgcagccaattggagtatcttctccccttctgctttcaacgcctgctgaatttgtgtttctgatggctgttcaggcagtttatgctctgccacttctatgatacgaaacttacagaatgcgcccaaacgtttttgatattcttcacacgcttgtgtccagtagcgttccttcaacttccccacacaaatgcaatttatcgtcagcatagttactccttaaaatagaatggttccgtgttttgtgttttctcttggtgcaatatcaatttcatagtcaagaccgcgcttgagtccttccattgtcaacgagcacaaagaggtttgcagtgcaatgtcaggcgtattgttttcgtgacttaaatgcgccaacaaaaaacgagccgttcccatttttgccagtttgggcaaaatatcggcacaggctgtattggataagtgtccgtaatcggaaataatacgctgctttaagatataaggataattacctgttttcagcataccgacatcgtgattggattccaatacaacaaaatcgctgcccgccaaattatgatatacttgctctgtcatatagcctaaatcggttgcaaacgacaatgtgcggtcatccgcagttgtaatatgaaacccaattccctccgcgcagtcatgcaatgtaggaaaggatgaaatccacatacccgcacattcaattcctctgccgtctaccagctctgccggaacatctgcattcagctgctgcgattcttccaacgcttgcaacgtaccttgagaagaaaatacaggtattttatatttggaagtaaatacacggagtcccttgatgtggtccgtatgttcatgagtcagaaatatcgccttaatcgctccaatcggaatatcacatgcagacagcatttcttgtatttgttttgcactgcggccaatatcaattaaaataccggcatctgcagagccaacaaaataactgttgccgctgcttccactaaataatgggcaaattctggccatatttctcctccattgcttttgtacttcttttagtgaatctcaagtggaaactgtaattcgattgcttttaaaagagcatgattaaaaatcgtaataaaatcagctccgtcgctggtgataaaataattggcaaggtccgttatctcttcactgataggaacttcccacggtggttcttttgacaagtcatctatatcccaaatgatttgatgcggttttaaatttttgagttctgctgtaataacactcaactcttctctggcttgctctgcatgttcaggcaataaatagccttgatatacctcattcataatgacaggaaagcggcttccccattttctatattctaaatgatatgacactgttgaaaaaaacgaatgaaggaaatccgcgcttccaattggaaaaaagaaatattgtacttgaaaccctaccatgacacccacctgatttctgtctcgcagtaattatcagtgatagcacgaaagaacctatcgcattgtacgacaggctctttctgcatattattatcaaatttcagcaaatatcgtttgcagcttacattgcctttggctgtgtatcttcaggcgtgtgaattcgtttgatatctgctcctaatttttgtaatttttcgacgatgtcttcataaccgcgctcaatgtgacgaatttcttcaatttggcttacaccctttgcacataaagcagcaattactactgccgcacctgcacgtaaatcagttgcttttacaggcgctgcatttaaatggtccacgccttcaatcacggctaatttaccgtctactgagaattgtgcgcccatacggcgtaattcttccacatagcggaaacgactatcccaaacactttccgtaataatgctggtaccatgtgcaattgcaagcaaaacggaaatttgtggttgcatatctgttggaaagccggggtgcggcattgtttttacattgcatttttgcaattgtccttcgcgtttaatatgaatggaatcgtcaaactcttcgacaatcacacccatttcctccagttttgcagaaatagattccaaatgctttggaatcacattttcaaccactgcatcgccgccagttgctgcaatagccaccatgtaagtaccggcttcaatttggtcaggaataatagaatatgtagtaccgtgtaaatggtctacaccataaattttaattacatcggtacctgctcctcttatatctgcgcccatggaacttaagaagtttgcaaggtctacaatatgaggctctttggctgcattttcaatgacagtcaaaccttttgcttttacggcagccaacataatattaatggtagcgcctacagacactacgtccatataaacattgttacctgtaagttcttgtgcttgtacatctaccataccgccatccaaactgtaggaagctcctaaggcagaaaagcctttcaaatgctggtcaataggtcttacaccaaaatcacagccgcccggcatggaaaccacagcatgatgaaaacggcccaataaggagccaagcagataataagaccctctcatatgtcttgcaagctcataagaagcaatatgagagtgaattggtctgggatctatttcaattgtagatttattgattcttttaatgactgcacccatatcatgaataatatgaagcatatcgtttacgtcagtaatattcggtacattttctatacggcaaacttcgtctgataaaattgccgccggtataatagcaatggcagcatttttagcaccactaattgtaacagtaccctttagtggtttgccgcctgtaactacatatttatccaatgagacacgccccaatcgttgtgttatgttccaacttgaacattctatatatcatttatctgaaaaacataatcttcgtaaaatatgaaaaaaacatctccattgataataatacattgacagaaaaaagtcaatctctcacaaaaatttattcgcaacattgtgaaaaactgcaaagaatctgacattatcctatgctattgtaggacttatcaaaagaatggacaaaaaattaggaatcaatcctatttcctaccggatagatgtttgtctttcttatataaacatcataccacaaaataaaaaaagttttgcagaaagactgcaaaacttttgtaaaattaaggtgttacgtaatttaacgggtcaacatgagttccgttttcaatcacttcaaagtgtaaatgtgcaccaaaagagttgccggtattgcctaccaaagcaatcggttgtcctttgaatactttctctccggcctgtacaagtaatttgcttgtatggccatataacgtttttcttccgttgccatgattgataataacatataacccgtagccggagttgtccatttgagccaactctacagtaccggcatctgccgctacaatggtttcaccgtaagtatttccgtttgcaatgtcaataccattgtgatgtgtaccccatctgaaagaaaaaggactgctaatggtatgaacggttggaaccggccaagttagtgtaccgctgctttcgcccggcacactgccgtccggcggagttttggtaccttcaatcacaacttttgttacaggttcttgtgttacagtggtagaaacattggaacgttccgcttctttgccattgatataagttacagtatcaacacaagttgctttaccgttctcaccttctgtaactaccttggaataagtgttgtatttggtatcatctgtttgtacttctgtttcaaattcaacatctttttcatatgtttcttcttttacaacagaaatgttcaaaatggatttttttacaatcacacttaatttatctccattttgcagcggagaagatacatttggattcaacgcttttaattcattggcagtagtaccaaatttttcagccaaagaatcccatgtatcaccctcagcaactgtataacccataggtttgttggaaaggcctgttaattgtgctttgatagaatcagcagattctatactggaaacagggtaaatgtctgttttggtttgaatatcgtcttcaaatgaaattgattcatatgtttcaggcgcattgttattgagcaaatcctgtagcatattgtctaaatcgacagcattttcaacagctccaatgaaattgccatttacgtaaaggccaacagcttctttgtaggtaccggtgcttttttcagccaatacatctgtgcttaccgtagtaagttttttcgtatcggatgatgaagcggtagcaactatttgttttggctgtatcattaaagtgtcggaagcattttcagccataagctgattcattacttcaaacggttccccgtaaacaatttgtctttcttgtgcggatgcactgacaccgtttgcagactgcatagcaaaaccaaaagaaacagttaatgctgcaactcccaatgccggagcaattacatgtaatgcatattttgcaattttcttatgaaaactgcctgtatgttgagttccttctgcaatgcactctgcttgtactgcaaagtgagcaagcaccttttgaatggttgcagagtataacttctttgttaattgaaacatggattggcaaatgcctttccaaatttgatgcattcgtttcagtcctgagctatgttccattctcccttgattggattcagaacgtttaaactgaaaaagtttaatagtgaatcttcctctcgttacgaattaaattgttacattcgtgtaatctttctctgtgtatactactataaaaattacaaatttgcaaccttttttccgaacgattagaaaattatgtgaactttgcttataaattattcgtattttagctgttccactgtccaatttgcaatataaggaaggaattcttttgcttgattttttgcatcttctaaatcgtgttccaaataatttccgcattccacggctgtatttcccggaatttctccctcataattggcaatatctgtcatgattctttgaattaaagcaatggcgtcttccggtttcatgtctcttaccaaaaagtaaaaaccggttcggcatcccataggaccaaaataaataattttgtgctcatattcggaattgcgggaaatggtagcaaataaatgctcaatggtatgcatggaagcggtcggtaaaaacggaggtacatttggttttttcatgcggatatcataagtaacaatatcatcatcaattctggaagtataaatacccggctgtaattttgtatggtctacgcaaaaacttggaattcttttcataatgtcataactcctttttctgattcattaataaatgtttggactgctcaactgccaattcaaacaaatccatataactttctgtacggtcagcggtatcctctatcggccattgccactgggcatgatacgtattggcataatcgtaagcatctccttcattgatgcctctgaaataactggataaacgtcttttatactctttacctcgttccatacgttcaaaaaagctttttttcaacgtagaacggtcgttgagcataccacaagtttttcttgcgtcttctgttgcctgcaacaaaacagacaattcttgtttttcgtcaaataaaatattcagcaaatagcagtataatgaagctacctcaagctgtaccgcttcatcctttggaaatatttgtttcatatcaaactctatgggcaattgacccttcaaatagcgcaacagaataatatccaaagaagtttctatcttatttctcagcgacagctcttgctcttttgggtacgcttgtttgagcatatgcaatccatattgaataaaaggctctgtctctgctttcaacacagcacggcattccaatccaaaacgataacaacgcaagacaggagtatcttttttctgccgatagtcgtcaatggctttcaaaatggtggataactccaagctatcaaaccgttctgtataagattttaacataatgcctgactgccaaaacaagaaacgatgaaaggttaaaaattcatacccttgcacaccccataaaaaagcgttttgattccactcttttatgctttgagaaacagcatattcacctatttgctccccatataaatgttggcatactaatgtaaacaaatactgtccctcctttgccctataagtgtagcataaaaaagaaaaataggaaacctttatacataaaaatgaaaataagaatttgtatctctattggtaaaccatagtaattcttttcattgattttctttttttaaccttcccctcctgaattcctcatattttgaagggatacaccactttttaaacagatggataaacttttcatgtttcctttataaagaaaaactgctacttatatttttatcatagatactccccataatcataacataattgtgaaatatctgattgcctttttgagatttttgtatccataatattcaaatttcaccctttcttcgcagtttccaatcaaacagatatcatgcaggtattacaaacatttctcctatctacatggtgctggtatcatgtaattatatccaacaaggacatttgtaattgcaaacctcatttgaacaataaggtatatagtattattaacatcatttttgccatttgaagacctcggaaataagtgcgtttcaggcactctaaagcgtaacatggcttcgcaaccatatttttgtgacaaatgacaagttgtatgatttgatagttactttactttttgttcggctttcttttcatcctcaacagcctaatgaaatcatggaataaagaagtatccaccggctcaaacatgatccatttaccatcatggtaaatttgagcttcgtcatatatttcttgaacttcttttgaataattttctctatctgtttcaaattttaaccgttcgtcttttcctaagacaatcataaaacccacacaattttctcttgcatataatgcacacagagttttaccgccccggcgatatttatattcatatttccatgctttgccacctgtactccacaaacaatccatatcatagttttcatcaataacagcacataactaattccatatatcgtagagagatttcccaaccaaatccgtcattttttcttcattcggtatcatatcaagcatattcgtcctactatctatacaattctcattattgtaccaacgccatcatatcgtcctgcggcggacaagtcagctctatccgatgaccggttacgggatgcacaaataacactttggaacagcacagcgcttgtctgccaatgccatttaagtgaccaccatacatatcgtcacctgcaagaggatgacctatgtgagaaaaatgcacacgaatttgatgtgtccgccctgtttccagacgaatttgcagcaaagtatgatgattggtaccccctaccactttccaatgagtaaccgcacgctgaccgtccttggcaacttctctttgaatggtatacccttctttcaaacgaatgggaacatctatggttccttccccttttaaaacaccttcacacacagccgtatattctttttcaatggatttactgagtactgcagccgcatagccatgttttgcaattacaatcaaacctgatgtgtctttatccaaacgatatacgggatgaaatcccaattttacaccatggatttgataatggtaaaataaagcgtttgccaaactgtctctgtcatgacctgctgttggatagataggcatactccaatctttgttgattacgatgatatcgtcatcctcatacacaatagaaagcggcagcggaacagcctcaatatccttttcgatatcaggcaaattgacgcatactacatctcctgtttttagcaaatcattggctcttccatgttctccgttgatggtcaatcccattttgacacgtttttgctttgtaagcagtcttgcggataagttgcagtatccccttaaaaatactttcagttttgattgttcccattcttttggtactgtaaatgtcaatgctctcattgtaatatacctctgcaataaaaaaggtgacagctttgctgtcacccttatgataaaacgggccttattttacttctacagtccaatgcatggtatcttcaatattaccccattgaattcctgttaaagtgtcatataagcgttgtgaaatctcaccaattttgccgttgttaatctccattacatggtcatcccattttaactggccaatcggagaaataacagcagctgttcctgtaccgaatgcttctttcagctgtccgttttgataagcgtcgtaaatttcctgaatttcaattggacgttcggatacgttcaatccccaagattctaaaatctcaatggcggacattctggtaacgccgggtaaaatggagccttgcaaagcaggagttacaacctcatcaccaatcacaaagaatacattcatggttcctacttcttccacatatttgcgttccacaccatccagccataacacctgggtatatttttgttcttccgcttcatcttgtgcttttaaagaagctgcatagttaccgcctgttttagcataacccataccgccacgaacagcacgtacgtatttgctttccacataaattttaaccggattcaaaccttccggataataagcgccaaccggagaacaaatcaccataaacataagatgtttgcccggatgtacaccaacatgtgcgtctgtagcaaaaataaagggacgaatatataaggaagtaccttctgcggttggaatccaatctttttcaatagataccaatttttcaatacattttaatgcaaatgcttcatctatttttggaatacacaaacgctcattggatacattcaggcgggccatatttttctcaggacggaataacagcacgcgtccgtccttggctcggtatgctttcatgccttcaaatacagtttgtccatagtgcaaacacatagcggaaggatccagttcaattggtccgtaagggacaatacgagcatcatgccatccttgaccttcatcataattcatgacaaacatgtggtctgtaaaaatagaaccaaaaccaagttttgtttcatctgttggttttgcctttggttgttttgtaagttcaactttgatttcctgcattgggaaagaccttctttcactttattctattttattgtaccaccaaatgacctcactttcaagcggcagtgcaaaaaatatagtgaatatagctaaaaatttctcaatccttttggatatctattctttaagcgtcccgcagaacattttccaaaaccggtcagcacaccttccactgcaattcctgtaaatcctttcagatgattcggtactgcaatttcttccccttttaaaaattgtttgagcgccgggtcatcattggcaaaagaaagcacttgatacaattcttccggttttgccgccataaacagaccgtgtgccggctcaattcgattggtctttccttctcccagcgggacacccgcacgcaatacacccaaaccgtccaactgcggcaatctgttaggaagtaacaaaaactgttcttttacttgcagtatttcatgttcccacggttctttcataatagagttcaacagttcctcagctaattttacatcttgtttttgttttggagtaaataatttgggatggtttggattctctttgactctgcgtagttttgcaacaaaatgtccgtctcctccgtccataggataaatacgtcttgttttttctaaaccaatgcccgggcgtccgaaggtaacatcgctgtttaccaattcaaattctggatgacgttccaaaaaagcagatacggtatcctcgttttcttctttggaaaaagtgcaagtagagtacaccaagattccattttcttttaccgcttgtgcagcggaatccaaaatcgcagcttgccgtaccgcacatgtctttacatgttccaaactccaatctgtaacggcttgctcatctcttcggaacatcccctctcccgaacatggggcatctaccagtaccttgtcgaaaaatccggctaatttgctgcataagacatcaggatgacacgaagataccactgcgtttcgcacgcccagccgttctatattggacagtaaaacattggcacgatttttgacgatttcattggaccataaaagaccttttccgtccaatagccctgcaatttgagtagattttccgccgggtgccgcacaaaggtccaatataatttcacccggtttgggattgagaacagttacagcggaagcagcggaaggttcttgagaataaaatgctcccgcatgatgcaagggcagtataccaaccttggcttcttcctcttcaatatagtatgaaagtggagaaaaaggggacggtgataatgtaaaaggtaaatttttttccaaaatgtcccaagtgcattttagaggatttaaacgtactccctttttagatggtctggaatagctttctaaaaacgcaggataatcatcttgtaaaagctgttccattttatttaaaaaatcgattggtaaatttatcaaaaatatcaactccagaacatttactcgtataaagcagagaaaaatgagacataatactgataagggggtgaattctcatggataaacaaaacgctcaaaacagaaaaaacacaactcatgaaaactgcggccattctcaagacgctcaaaacacaaccacacaaactcaaactcaaaaacaaaataaaaacaatcaaaacgctcaaaatagaaaaaatcaaaatcacagcaactaactgttagcaataccttttagaaaatcgttggatttgaaccacaaatccaacggttttcttttttcacattaaataacgaaatattttttgatgtcttctgggaaaaaattacataaaaacagacaaatattaaaagagaactcccaaaaccagcaactgactttcaaaatttcatcttctttaaaactttatgaaatactcagcgaaactgacttatcattggtttaactttcatggaatacatgaaataacgctttacaacgattggatattgcatattttgtcaactcggtattttgcaatatatcaaaaccatgaatacctccccttatttccgataattcaaccggtatgttaaactctcttaatacttgggcataattttttccttcatcataaagggaatcaaactcactaatttcaataaacgcaggtggtaaacctccaaaatctttcgctaatattgggctcgcatattcttctttatccgttactccatctcttaaatataattcccacattttcttactcatactactattccataaagggccgtatttgtatctaatagctgtatctgttttcattcttttatcaatcactggataaattaataactggaaacataataaaatgtgatgatctttgcaccaatgcgtacatgacgcagccaatgctccaccagcactatctccgcctactgcaattctatccttatcgatatttaaattttcagcattttcccatacatattccattgcatcacagcaatcataaaatggggtaggaaatggatagccatcacaagttctataatgtacaaaaacaactgtacattttgcaaataaagcatatttcattacaattttatgaatataggcttcatctttaagaaaaaaaccaccccatgaaaataaaccaagcatggctgtttttcattcatatccttcgctttataaatagataaatttatttctgcgttatcacgagttttaatcttcttactttctcgaataagattactaggtacattcggcaaatttttgtatgctaataatttatttcctaactttacagtatgagtattaataaccgcaccattaatagctactttgttaaataaaccataccccttcgcaagtggatatttcctatttctatgaatacaccatgcactacctaatactaatgctcctaaaattgctaatttctttttcataggataacccctctattacctttatgagttctattttatacattattctacaaaattctacaaatctatacttacggcttttttcataaacaaatatattactaaaatttagatcgtgatttcttttctaataatctaaatttaaaaccaaaaaagttctttacattcaggatgcaaagaacttaaaaagagcttattcctttcgctttctgtttttgatgatatctttcagcgtcttttcttcttttccgttttctttaaagccttcaccattaatctggcccgcatctcctatgataataaaagcgtcaatgtcaatttctttaatcaactgtgttaaacgatacacttcatacttacgaactgcacaaagcaacacatctccctctttgcccgtataagcgccttttgattttaaaatggtcacacctctggacatttggctgataattgcctgtgaaatttcctggcttttttgcgacataataaacagcatttttcctgtgccgatatctgtgccatacaatacagcgtcaatcaaacgtgttgccacaaaaatgacaattaccgcatacatagcgctttccacacttttaaatacaattgctgagatgacaaccacacacaggtcaatgaacatcattaatcttcccattgagaaatggggaaaacgtcttcccagcaatctggctgccgtatccgttcctcctgtggtaccaccgcgaataaagataagcgccaaacccgcgccctccgttacgcccgcaaaaatagcaaccaacatttgatccccttgatacggagggataaacatagcgattacgtcaatggaaatcgaagttaaaataatcgcaaaaatggtttttaccaccagcttatagcctaattccacaatcgcccaaataatcaaaggcgcatttaaaatcaaagccatggtaccaaccggcgtatggatcaatgaatttaaaatgatagaaatacccgttacgccgccgggagcaatttggtttggttcagaaaacacagaaaccgagataccgtataaaataccgcccaatgtaaaacataaaatatctaaaaaaatattttttgcaatatttcgtttgttttgtaattccattaccatatcaccttcttcttacagtcaaggataccatatgaaatatacacagatatggttcccttgtgttacttgcaatcagtgttagtgtatgacaatacaatcaaattaacacgacttttcacaaataattgaaaatagttgccgcaatctatcaatttcaccttttaaatataaataaccaaacatcgcttcaaatcctgtggctgcgtggtaatcggcaggttccgcattttttggaatagaagtattggcatttcttcctcttttaaaaaccgctatctcttcttctgttaaaattggcatgagcagttccataaactttgcctgcgcctgacaacgcacctgcgccactgcattttgatgcaattttttaacaggacagttggcaaggcacaccaaacgctctctcacaaataattcaaacgccgcgtctccaacaaacgccaatgtcagaggacttagttgtttcgggtcacacgcttcattaaataaccgttccatacttcctccaactattcaacaaaatcaaattccaaatcatacaggcttacggtatcgccttcctcaattcctgcgttgcgcagtgcatcaattacgcccgaatgaatcaaaacgcgctggaagtattgcaaagattcatagtcgtcaaaatctatggttttcataatggcaagcagccattctccttcaaccacatagatatcaccttgttttgtaacctctacgtgatgctttccaatttcatcaattggctttacaggagctgcttccggttcaaaatgacgaaccggaggaagtttactcaatttttcttcaatacttttcagcacagggtccacaccgtaacgaattgctgccataatcggataaaattcatacccttgctctgttacaaatttctcaaattctgcaatttgttcatccgttgccaagtctgctttgtttcctaccacaatcatagggcgctgagccaattcaggattgaatttttgaagctcctgattaatcacgttgaaatcttcttttgggtctcttccctcactgcctgaaatatctaccacatgtaccagcatgcggcagcgttccacgtgacgaagaaattggtgccccaagccaacaccttcccaagcgccttcaatcagcccaggaatatccgcaatgacaaaagaattgccttcttccattcgaactacgcctaaaacgggagtcaatgtggtaaaatggtaatttgcaatatttggttttgcttcactgaccacagaaataaatgtggatttaccaacattgggatagccaaccaaacctacatccgcaagcagtttcaattccaaaataacttccatgctttcgccgggaattccaggttttgcaaagcgaggcgtttgtcttgtgggggttgcaaaatgagcatttccccagccgcctttaccgccttttagtattacttgtggttcaggcgtggaaaggtctgctacaatgcgtcctgtttctgcttctttgattaaagtcccctgtggaactttaatcaccaaatcttctgcattttttccgttacagcggttttttcttccattttcgccgtttggagccaaatattttcttttatagcggaagtcagccagagtagacaaattggtatccacctggaagacaatattaccgccgcggccgccgtcaccgccgtcaggtcctcctgcggcaacatatttttctctatgaaaggcaactgcgccgttaccgccgtcacctgccttgattttaatttttgcaacatcaataaacatcgttttctaaccgccgtttctccatatctgatggaacaattttcttcttatcgtttgttatattgattctaacaccaaacaaacaaaactgcaatgtataaatacctgatagaaaataaagatttttaatcatagtatgaacaaaataacataaaaaaacccgggaacaagtcccaggttcttcaaacaattttaaaaataaaattattgctcaacagcgtaaacgctaacttttttacggtcacgaccataacgttcaaattttactttgccgtcaaccaaagcaaacagagaatcatcggaacctctgcctacgttctcgcctggatgaatgtgtgtaccacgttgttttacaagaatgttacctgcaagaacaaattgaccgtctgcacgttttacaccaagacgtttagactcggaatcacggccgttttttgtggaacccataccttttttatgagcgaacaattgaatgttaatctttagcattacttacacctccaaataattgacttgaatacgatccggatactgctcctcaattccaattaaatgaagcttgagacctgtgagcaaatcgcgacagcgaagtgcatcaccagcagcaactttcacaaacatcataccgtcttccacagcaacttctgtgtccgcttttatgatttctgttatggtatttgccgtcatatatgctacagatgaaactgctgcacatacaatatcctcacccgggtcagcataacctgcatgaccttccatcacaaagccaactaagttaccggaagcttccgataaaaagcgtacaaaaatcattacgcgttaatagcggaaatttcaacctttgtatatggttgtctgtggcccattttacgtttagaaccttttttcggtctgtaagtgaacactgtgatttttttacccttaccgtttttcaatactttacctgtaacggaagcaccttctacgtaaggagtaccaatcttcaaaccgttctcaccaccaagtgcaaccacttggaatttaacctcggaattttcttcttgtgcaagcttttctacataaatgacatcgccattttgtactttatattgcttgccgcctgtttcaatcactgcaaacatgaatctaaggccctgccttttctataatctcgctattatcaggtgggaatatccgcttaaaacccgtaatatgcggcttatcaataatagcacaaatatacaagcttgtcaacaaaatatacgtgttttatgaaagtttgtatggtcctcttatttttttctggaagcaaggtattccgccaattctttcaagtattgtgtgtcaccctgaaaggcttccaaagcatgaacagccgtttgtgtcagctgctgtaccaatgcctttgcctgcttcatgcccaatatagaaacatatgtgcttttatcgttggcaacatcgctccctacctgcttaccaagtgttgccgtatctccttcgatatccaaaatatcatctacaatctggaacgccaatccaatagcgtcagcatattcccgtgctgcctgcagctctttttcactgccgccgccaagcacacatcccatttgtacacaggctgaaatcagagctcctgtttttccctcatccatcttacgcagggtttccagtgaaatttgttttccttcggatagtaaatcaatcacctgtccgcctaccattccgtcagcgccgattgctttacctaagattcccgctgcggatgccgcacgctgagcgcctgcttttgcaatcgattcctcgcttaacatcacttcaaatgcaagcgcctgcaatgcatctcctgcaagcagagccatattctccccatatactttatgattggaaggctttcctctgcgcatatcgtcgttgtccatacatggcaaatcgtcatgaatcaaagaataggtgtgtaccatttctactgcgcaggcaaacggcattgcagcttcttgactgccgccgcacaagcggttaaactccaacaccaaaatgggacgaatgcgtttgcctccgtctaataagctatacgtcatagattgtaccaatcgctcttgtaaaccacctgttttaggtaaataatattttaatgcggtttctatttgattgcagtattgttcggttaaattactcatcgtcttccccactttcagctttcccttgttccaaagcagtcatctgggtaattttctgctctgctttatttaatttgtcatagcagaaagatgccaattccgtacctttttcaaataattttaacgattcatccagtgaagtttctccgctttccagctttactacgatttcatttaactgattcatagcggtttcaaatgacatatttttattcattgcatttcacctcatctaccgtacaatccaatacaccatctgatagtgtaaccgttatctgctgacctgtgcagacttgtgctgtactttttatggtttgttgatttttatcttgtgtaatagcataaccgcgggacaatacctgtaaaggactaagtgtatgcagttgtccgcttaatttactcaagcgatgtgcttctgcctctgttttacgcttcattgccacagaaagctgttccgtataacggtccagcctcattgtttccatagccactcttgtttgcggagtttgaaaagatttcgaagcaactaatctatgtaattgttcatggtaatttctcatacgcgcccgaatcaaatgtgtcaatgtaaattgataggaacgcagcgtgtcttttaactccagttggtcaggaacagccaattcagccgccgctgacggggtggccgcacgacaatctgcaacaaagtcgcatatagtaacatccgtttcgtgtcccacagccgaaataatcggaatagaggaagcggcaacggcacgggcaactttctcttcattaaatgcccataaatcttccatagaaccgccgcctctgcctacaatcagtacatccactgcttttttccggttaaacaattcaatggcctgcaccacttgttccgcagcgccttctccctgtacttttacagggcaaaggatcaattctgccaaagggtatcgacgtgccataatctgctgaatatcatgaatcactgcgcccgtcggagaagtaatgacacccactttatttggaaactcaggaagcggctgttttttattggtgtcaaacaaaccttctgctgccagtttttcttttaactgttcgtaagccaaattcaatgcacccagcccgtccggctgcatatcttcgatataaagctgatattgaccgctttgttcgtacaaagatacccttccgcgtaccaacaccttcataccgtctttcggttcaaagcgcaagcggcttgcgtaggaggaaaacataaccgctttgatgacacatttttcatccttcaaagacaaatataaatgtcccgaacgataatgatttgtaaaattagaaacctcgccgctgacaaacaccctgttgagggaagggtctccatccagcaaagattttacatacatattcaactgtgaaatggttaaaacagatggtgcattcatttacaattgaccttctttcatagcagttaatactgcaatacccgctgcgttatccgcagaatattccggcggtgcaaaacaagcgccgtacttgtttgtcagcgcctgacgaatgatgctgtttgacatcacgccgcctgcaaacagcaacggcaattttccgtacgtctgcaataacgtttgcgaagcataatccaaagctgccaaaatagaatctaaacaaaagcgtgcaatttcttcctttggatgtcctgtttccaataattttttacattgattttcaatgcctgacagagaaaaatcctgtccttttacggatgcttttactttacacggctgctcccattgtaatgccagttgctctaactctttccctgcgggaaaggaaagtcccagcattactcctacacggtctacggcttgtcctccttttaaatccagtgaacaagaaacgatttccgcggtaaagatacgctctttatcgggacgaaccaacacagcttctgtggttccgcctgacacatgaaatgcaatcaaagggtgagacagcaaatccaaacggcctgcgccatataatgccgctccaatatgcccgctttgatgagaaaacgagtataacgggataccatgtgtttttgcaacggctcttgcaatacctgctcctactgaaaaacacggcatatacgaaccttcagcatctctgggttttacagaaactcccactgctttgggcacatagtcatccttccataacgcatccaataaatccggaatttgttgtgtatggtgaaaaacggcgtcactttgccgtaatcccaattctccctgtttcacgggaagtaattttttctgttgtaccacacttttatccgtctcatggagcacagccgtggaagttgtgtaattgctggtatcaattcctaaatatacattacgcattttgcggctccagctcttttgcaacggaacccaacacgccattgataaacggtgcgtcttcactgccgccgtattttttcgccaaatccactacctcattgatagaaacactcagtggaatgtctttttcatatatcatttcataaatggccagtctgagcaaagccaatgatacacgggataaacgactcattttccagccgtgaatgttttgcgctattttttcatcaatgactgcctcattatcctgtacgcctgtcgctactttttccgcaaacgcagaaagcaccaaatctctggactcccctgcattttctacaatttgtgcgatggtatcgttgttaatggtacgctcaaaaataagaataaacgcctgttctctttggtcgcgcctgttcatacatttcctcctataataaaaggccatccactttgtggatggtctttgtttcattcattctttttccaataatccacgtatgaattataacataagagaaattgctttgcaatttctaacaaataattgttataacgttctcttaacagccaaaattctaaatattgaaagaaattcctttcaatattgattttgtgcctgttataacactttcatactgtaacagaaattagcgttaattggaaagcgcacctgataaaatatcaaaaagacaacctaaacccaaatgtacgaatcgcttattttgaaacaatggtaattttgtcagcagatattttcgcctgtgcaaccacaatatctttaatggcaattgcatcggctgatgcaaattcaccgtctttttgcactaccacattgcatgctccgttttgaataaatgctacacagtccacaaaacctttggattttaccagattttcaatattggtctcagtaacaatattttgtgaaatttctgctgcctgattggccgcttctgtttttgtattttcatctgcagtggtatcatcgagcactttttgcaccagttcctgagaagcgtctctggatttctgacgttccaatctggcctgtgcaaaatatgtatttacatctgtattcgctcctgtattggccgcttctgaagaagcctctgatgcaatgtttcctgaaacggcacttgacacagcctccgatactgccgatgacggtgaagaatccacagaaccgtttaccagctgtgcggcccccagttctttgtctgaaacactggtacctgcatccacaatctgactgtttcctccaaactgccaattt

SEQ ID NO: 76 - DNA, 2039 bp, Unknown
  16S sequences of unknown bacteria
atagacaaagaaaacatttttcaggatccgggcagagaaagcagcgggacaggccataaatgcttgttccgctctctatatcgtaataatcggcagtagcgcaaatgcagacatatagaccggtcagaggtttaggagcttttctcttgactgattatcggcacaccgatataataagagcggtgatgtatatgacgatccaacagatactacgggaaaagaatctctcccgctaccaactctctaagaaaagcggtgtgccttgggcaacgctggcggacatctgctccggcaagacaacgctctcccgatgcagtgccggtacactcatgaagctgtcctccacactgggcatcccgatggagcagctcattacactgaccgtggagaaaccgcaaatgcatgccggcaaaccaactgaccgaacctatctggaaaaggctctgcccgccagtctggataaagcgcttcgtgagtacattcagggcgaaaaagacaaggtgtcttatatggactgcctgtggggagaattgtatagtgcaatcaactccaatcaatggagcaatgccatcacgcaggagcaggcagactatctccgtgcaaaatatttataagggggtgagaacctatgactgattttaccaactgcccagtcaaccgcttccgcgcctatggcggagccaacggtaataaaattaatatcacctatcaaggacacagttatatgctcaagtttccgccaaagcccagcaggaattgggatatgagttacagcaacggctgtatcagcgaatatgtcgcctgtcatatctttgaaatgttgggctttcggacgcaggaaacactcctcggaaactatacggacaaccgcggcaaaacaaagctggtagttgcctgtcgggattttacagaggacggaaaacggctcatcgagtttgcccatctgaaaaacacctgcatcgacagtgaacagaacggttacggaaaagagctgtcctctattctggaagccatcgaggagcagaatatttatcccaccgatgagctgcggcaatttttctgggacatgtttattgcggatgcgttccttggaaacttcgaccggcacaacggtaactggggtttcctggtggatgaggaaaagcagcaggcagagttagcgccgatctatgattgcggttcctgcctgtacccgcagcttgatttggaacggatgaaaactgtgctgcaagacgaagcggaaatcgaccagcgcatctataccttcccaacttcctctatcgaaaaaggcgggaaaaagatatcttatttcgattacatctcctcactgaagaatccagattgcaatgaggcgctcaagcgtgtctgttcaagaatcgacctcgatgcgatccatgactttctcgaaggtgtccctgaactgctgccaatccagcgtgaattctatctgaccatgctgaccgagcgcaaagagaagattttggattacagcttggaacttttgatggtgcaggagcagcatacctcaccgacgctgggaatgtaaaaccgaacactcaactcagggagccgcgccaattggcgcggctccctttttgcgtccatggtttgtatgggattcaaagaaacggaatggcttatattttaggatatccggcatgaacatgaaaacgatttttaagtgtgtgaatcgcacagaaaaaaactaaaaaaattgctgaagaacggcgataagtagaggaatgttagaattatccctcatgaagctgttggatggtataaaacttgtatttgccggcttaaaagatacgccgcgataaacaaagaaaaaatttaataaaacagggtgtgcaaaacatgtttttctccgcgataagtggagggattttttaaggcatttagcaaggggcaattatcaatcggaccgaaaggggtgacgcctatgggctgcgttgcagcttccgtcaacaaacatcaaaaattacaaaggaggaatccaatgcaagaatccacattcaccaactatgaccagctgccgc

SEQ ID NO: 77 - DNA, 19029 bp, Unknown
  16S sequences of unknown bacteria
gcgacaatcaatggaaactgacggtcaaaacaaaggttttgacccataaaatcgagattttaactcgattttatataattgcatttgctaatgcaattattcagtagacattaattaaattgatatgtaatgacaaacggacgccttgggggcgtccgtttgtgttgtgcgggttgccgattatggataatcagcagccgcagccgcagttattgtcacagccgttgtttccgcagccgccgaagccgcagccgccgcagcaaacgaggatgagcacaagtataagaatccaggtacagctgtttccgccaaagcaattgttacacattgaaaagacctccttttttctgtcttcatcacatactatgcaggctccttcaaatgtgttacgtgctaatgcggctatctgatcttattccacagcttataatatgtaccctttttcaaaagcaactcctcatgcgtgccgatttcctcgattccgtcatctccgagaaccactattctgtcataatccttaacggtggtaaggcgatgtgcaatcgtgagggtggtgcggttatgcgctaatttttcaaggctttcgctcacaagtatttcactttcgttatcaagcgcgcttgtggcttcgtccaaaatcagcacagggggatttttcaaaaatacgcgggctattgagattcgctgcttttgtccgcccgaaagcttgactccgcgttcgccgacatatgtatcgtagccgtccggcaggcgtgatataaattcgtctgctcccgcaagcaccgcagcagctttgatttcctccgcggacgcattttccttgccgtaagcaatattttcactcaccgttccgctgaacaggtaaacatcctgctggactatgcctatcgctccgcgcaggcttgacagcgtaacatctctgacatcctgaccgtcaataagcaccgtgccgccgcttacatccataaacctcggcacaaggctgcaaagcgtggtttttccgccgcccgatgtgcccacaagcgccagccgctcgcccgcatttattttcaggctgatgtgctctaaaacctcgtcactgtcttcctcgtatttgaagcttacgtccttaaaatcaatctcaccgcggtcgcagataagcgcccgggcatcaggcttttccgtgatttcaacaggggagtccataatctcgaagaagcgctcgattccggtcattccgcgctggaactgctctgcaaattcaactatacggcgtattgtcgcaatgagggtggagacataaaggacataggcgacaagcgctcccggagtaattttaccgtaaagcacaaaaagtccgccgccgagaatcaccacaatatacataagaccgtcgaaaagatgcgttgccgcagaaaaaagtgccattgtcttgtaggtagcctttttaatgctttcaaattttttgttgccgatattgaatttttcctgctcggctttttcggcggaaaaagcctttaccacacgctcaccgagaagactgtcctcaatctgtgcgttaagctcacctatctgaacgcgctggtttctgaaggcactgcgcatttttttattgagatgcgccgaaactacaaccataagcggcacgcacaggaaaattataagcgtgagcggaacactgtaggtgcaaagtacagtaaagctgacggttatttttaaaaacgcgatgaaaaattcctccgggcaatggtgagaaaattcagtcacctcaaacaggtcgtttgtaatgcgccccattatctgcccgattttcgtgtttgaatagtaattgtgtccgagcgtcagtaagtgagcgaatgcgtcacggcgcatatgggtttctatgtaaacgcccattacatgccccatatccgccatgtaatactgcgccgccgcgtcaataagccgcagaataagatatatgaacgccattttcaaaataagacccgcagtaagtgaggaaatatcgttcattgccgtatcggttattgttcggagtatctgcggcagcaccaaatcgcaaacgcaggtgagggaagcgcagagcaaatctatcgcaaccgttttcttataagccaacagatatggcataaagcgtttgaacagaccttttttagttttttccacggaaatcatcctttcggtaaaattgtaaaaaaacacttccgaacaccgcatgctgatcggaagatgaaggttttataattgaaaattaaaatcccgcacttaatgcacgggattttggtgccgctgaccggacttgaaccggtacggtatcgctaccgagggattttaagtcccttgtgtctgcctattccaccacagcggcatatcataaataatataatattttaaatgatttgtcaagtgatttttgctgtttgccgatgttttattttcacagcaccggattttgggagatttttattcccgtacccgaaaaagccagggattaggtgtataccgaaactattaaggctctttacctcgactattgacaaagagccttgaaaatgacataggggcggtgttgagttttgtgcatttatctgttctttgcccaggaaaccggagcgagggctattataatcggaaaaatttcgagtctgccgagcagcattccgaaggagagcacgatttttgcaaacgccgagtagcctccgaagccaccagcaggacctaccgcgccgaagcccgggcctacattattaaagcaggtgaccgcggcggttaagttggtttcaaaatcaaatggctcaaagcttaaagccaaaaaaatcacaaacaggcagacaaagtatattagaaaataattgctgacgcccttacgggtgtgaccgtccacagttttgccctcaaagcttaaggaggataccgagcgcggatggagcattcgcttgacctcgttgcttataagcttgaaaagcagaactattcgagacaccttaatgccgcctgcggtagatcccgcgcatccacctataaacataagaataaaaagaatattctttgaaaaattcggccagaggttgaagtctgccgtggcatagccggtggttgaaataaccgaagccacctgaaatgcagcagtacgaaccgtttgctcaagcccgccgaacaaatgccttatattccatgctataagagcggcggaggagaggattattccgaaatatgccaaaagctcggtacttgtaaccactgccttgaatttctttaaaagcattaaataataaaggttaaagtttacgccgaacagtatcataaaggcggttattacccattgaatgtagggagagtagcttgcaagactgtcccgctttaaaccgaagccgcccgtacccgccgttccgaaggtatgcagcaggctttcaaaaaagctcataccgccgaacagcagcataaccgtttcaataacggtcataacaatgtaaataaggtaaaggataagcgcggtgtcctttattcgcggcaccaatttacctaccgtggggcccggtatttccgcccttaaaatgtgtatggggcgttcggaaacattcggcagtattgccataacgaaaacgattattcccataccgccgacccagtgggtaaagctgcgccaaaaaagtgctccgtgggaaagcatctcaacatcgggtataacagacgagccggtggtggtaaagccgctgacgatttcaaaaaatgcgtcggcataggaggtgacggcaccggcgagcacaagcggcacggcaccgaccaaggacagcattatccaggtaaaggctactattataaagccttccttagcataaataacatgggttttcggctttaaaaaaagcttcggcagcagtccgagcaaaaggcttatcgccgccgatatcaaaaaagcaatcagggtttgtttttcgccgtaaagcatacctactgccgccggtaaaagcagcagcgccgcctcaacccgcagcacaagccccactgagttaataatcattctgcgattcatgggcggttacctttgcctttccacgatttcggaaagctcatttaagcgccttcccgcagagataataaccactcggtcaccggggcgaatcatatcgtcacctgtcgggattatcgattttctgccgcggattattcccgcaatcagtatattcggcttggtgggaagctccttaaacggaatatttattatgctgcaatcggcgctcaccttgaattcaagcgcttcggcattgccgttcataagcttgtaaagcgtttccaccttactgccgagcgagttttcaagtgctcttgcatactgcacagcaacatttgctatcgttttcatcggggaagcaatagtgtctattccgagtctggtagccgtgcccgtaaattcggggcggtttattttggcaattaccttcggtacattctgctgcagtgcaaaatacgaaagcagtatgttttcttcatcaagacccgtaagagccgcaaaggcgtcaacactgcgaatgccctcttcaagcagcagctcctggtgcgccgcgtcgccgtttataatgaccgccccgggcagaatgtcgctgaattccttgcacctttctctgtcggagtcgataattttgaccgcgttgcctcccgcaatcagcagccttgaaaggtaataggaggttcgtgtggcaccgagcatcataaccgtgcgcgcctgcttttgcagaagccccagctttttgagaagccgcggtatgtctgtcgatgcggcggttatgccgatcttatccccgcttttaagcacaaaattaccatcgggtatataaagctcgcccccgcgttcaacagcgcagataagaaaattgtcgggatgttttttgcggagctccgtaagactcacgccgtcaagcggtgtgttttcctttaaaaccaactccaccatttcaaagtttccgcgggaaaaggtctcaaccttaacggcagacggcagctttaaaacattgaaaagctcccttgcgacaaactgctcgggatttatggtcattgaaatatcaagctctttttttataaaggcaaggcttttatcgttatattcgggaccgcggatacgcgcaattgtgtgcgctgttcccatacgctttgcaagaaagcagcttaacatgttgaattcgtcagagcctgtgaccgctatcataagctcgcatttattcgccccggcctcaagcagcgcatctgaatctgttccgttgccgcagagggtcataacatcgtaaatatttgaaagctccgaaaccacatcggggtcattatccatagcaatgatttcgtgcccctcagataaaaacgattctattatggtgcatcccaccttgccgcagccgacaacaataattctcataatctatcccttaaaaacaacaatttatcagcaaagctcttttgctaaagcgtctatttttgcgcagctttcatcattaagagccgatgttacggtgacggtcgtgtcggtaaaggttatatttctgcttttttcaaatgcggcgcgtattttttttgcggctatgggcgcccacgagccgttttcaataagtcctattgtgcggttctgataattgcgttcacacagggcgtcgacaaaatgcttcataaatggaaaaacatcgccgttatatgtggtggacgccagcaccagcttgccgtaacggaaggcgtcctcaaccgcctccgccggatcgcacagcgcaaggttattcattgcaaccttggggcagccgagagccttcagctgctctgccagccgctctgcagccttttcggtgttgccgtaaaccgaggcataggcaatgcaaacgccctcgctttccaccccgtaggaagaccatgtgttataaagccctatataatagcctaaattttcattcagcacaggtccgtgcagagggcagatcctttcaatgtcaagcgcggcagcctttttaagcagcgcctgtacctgcgcgccgtatttgccgactatgccgaagtaatatcttctcgcctcgcacgcccagtcctcaccagtgtcaagcgtgccgaatttgccgaaggcgtcggctgaaaacagcgtcttatccttatcaacataggtgaccgtgacctcgggccagtgtaccattggcgcaaaaataaatttcaattcgcgttcgccgagctttaaggtgtcgccgtcatttatcacgagcctgtttttgcaaagatccttgccgaaaaagttatccatcatggtaaatgccttggaatttgcaacaacggcagtctcggggtattcggctaaaaaatctgcaaggcaggcggaatgatcgggttccatatgctgaaccacaatataatcgggctttttgtccccgagcagcttttttatgtttgcaagccattcggcggaaaaatgcttatcgaccgaatccataaccgctgttttttcgtcggctattatatatgagttgtacgccatgccgttcggcacatggtattgcccctcaaaaagctgtatgtcataatcgtttacgcctatataatgtattccgtgttcaagtgtcattttaaaacgcttcctttcttatttggtgattttttcggtattttcttcttcttcttctgcaccggtgcttccgtcctctacggtgacactgtcaaagccgccggtaaacatatcgcggtcataagcgtcgtcgtcgctgtaatcgccgagcttcacaacgcggcgtataagcatgatcacaagaatcaccgcgccgatgatcagcactgctatgcctataactattattttggcgtttgaggaaagcgagccgaagcgcgatatgaagccgccgctttttggctcctctgcatttgtatcggtgagcttgaattcggggctgcgttgcagcacgccctcggcactgtcatagcggtaaaagccgaagcccctatcaaaaaagcagtaggtgtagtaaaaatccgaaaggctttcatccggacttttgtaggcagtaatatcaaaatcgcctatttttacgcttgaagggtaaaagccgtcgggaacggatttatcttcgggtatatcggcaaatatatatgtattattgccgaaggttgcatattttaattttttgaaagtttctccgtcagcctctaaaatatagggcaggtagctttcactgttttcacccttcaggtagtaaacggtgaaattagcgtccgtatcctgcgcaacggcaacctctgcgccgttgtgcttggcggttgtggatttaaagccgttcggcagcttaaagccggaaagatcggttgccaacaaatattttacaccatctataaccgtgcttttttcggactcgtcggtattatccccgggttcggtctcgccgtcgagttcctccccctcctttaagcgggttataactattgtgtaggttttctgtgtgccgttttgcgccgtgacggttacggtgcgtgtatttttacctaccgcaagcgcctccttaccgccgacggcaacggtcgctttgccgtcggttgcggttgcaaatactttgcaggaggtaacctcatatttaaccttggcggtgtagcttgttctgccggaggagaaagccggactcagcgttccctcacttaaggataacgatttcagcgttgcaacaccgggctttgccgcatcggaaaccgtaagggtggcggaagctccgatattgtattcaccgtcaccgtatgcgcctccgcttacatttatcggtgaagagcctgcggtttttgcggcaaatgtaaatttgtaagtgccctttgtctcaccgctgtgagtgggcgctgcctttactacgccgcctccgccgtttgctgcgcaatcggcgcttttatattccagcacactttgattataggaaacggaaaaatccgctccgtacattttaaagcctgcattaaccgttacggtaattgttacattttgccctaccgtcggtttttgcggattgaaggatataaccgtgcttgcggctgatgaaggaatagctgccgccgatataatgagcgttattgccgcaatcaacaaagccgcctttttaaatatttttttcataatcagtctccgttcttataatattgcgaaaaacagtaatcaggcaagcgtcttgattcccaaaatgtgcatctgcacattcgcaaggtctctgccgtttattttaccgtcagagtttgtatcggctcttgtaaaggcttcgcccgaaaaagcctttatacccaaaatatgcatctgcacattcgcaaggtctctgccgtttacaattccgtcgccgtttgtatctccgggtatggtttttacgggcggcgtgctgccgccgatcgtcagcgtgcagtcggtcgttgcttcgacgaaaattttgtaattatttatgtagccggactgtgatttaactggcagaacgaccgtgttcgcgccctttttaagcttgaatgacgccgcacctgcatatgaagcgcccgagggcacggtataggcgatattggtgttgcccgtaacccttaagctgtattcatatacaaagtcagtcatggaataggtaggagtaagcccgggggcggaaagcgttttgaaataatagttgttcaggttgttgttttccttcggcataacggtcgcgccgcctgtgttcttataaaccggaatcgaaaagcttacaacggatgatttgtccgaggtgtatgccgacgacaatattttaccctttgaagacgcgtcgtgtatcgctcccgcgtattcatgccatattctgttcggatttttaatgttgaaatccatatagtaatatgtattttgtccggcctttatgtatccgtcgctgcagaactccgcgccgcctatgattgctttttcacgcgtgtcccagccgtgttccttggcataggtcagcgcttttactattttttccgtgtcgttattgccggtcgcgtttatattgaaataattgtaatagccttcaaagccggggtatttgcctgatataaaggatgaattcccgttattcctgcctatttcctgcaatatttttgaagccataacataggggctgtaagaggtctcccgtgccgccttcattatgtaagacacatattcgtttgtatcaaggaaggtgccctttacgatcttgcggactcccgcttctgtttgctttgacgggtcgtagccctgcagcataaaggaaaacacagtatccgagcctaaaaagttgcgcggatccatataatattttattacctcgcgtgacgcgacataccagtttccgtcatgtgcgacccatgtgttttttgtgtaatcatatgcgccgagacccatcgaaagcagggacttataatttgttcttataagctttctcgtgatttcaagctgcaccgcctcatcaagcgttaaatttacattgtcggcatggaacgaccagttcggataaaccgtgtgcagcgccttcagcgcattatgatagcttgacgggaaagccttaagctgcgcgtcaaaatcactgtcggcggtctgtttgattatctgtacatattccgaaaacaggtatcccgtaactccgttgtaggttacattataccataaattgccgtcgggatcgcgcttttcgccgtttacggttaccgtggcatatgatatgccttccataattaccttgctttgcgtccccgcgtccgcacgcattcgtacgcccgtcgcgttgacatatccgatcttggttgccgccgaggttgcgattccacagccgagcaccgttattgctgcaattacaaacgataaaattacacaggaaaatctgcgcagtcggcccataacagtctcctttttcataacattaaaataaccgatcatacatcgtatattatataattttcgacctgttatgtcaatattttcgggcttaaaaatgttaaaatgccgttaaacttgttcaaaaactgttcataatcgcatgaaattgccgaactatactgtaatcaacgggaaaggagcggtgaaaatgtttcagacagtattcaagcgctacgaaaaaaaatatattattgacggcgggcagtacgaagaggttaaaaattatttgacctacaacgccgtgccggacgaatacgccaaaagccgcgtttgcagcctttattacgatacgcctgataacagcctgatacgcgcgtctcttgataaaccgatatataaagaaaagctgcggctgcgcagctacggagtgccgaccgccgataaactctgctttttagagcttaaaaagaaatacaagggtattgtttttaaaagaagaataagcgctccgtatacggatataaaaagctatatggcaggcgaagacaacggaattgaaaacagtcagattttaaaggaaattgattatttcaggcggttttacggctgcttaaagcccgcggcggacattttttacgaccgcgaggcgttttatgaccgaaccgacagcagcgtgcgcttaacctttgacagcaatgttttggcgcgcgggtgggatttagagcttgaaaacggcatttacggcgagcgggtgcttgaaaacgggctgtatattttagaggtcaagacatcgggcgctatgcctatgtggattgcggaaatgctgaacgagcttaaaatttatcccatatccttctcgaaatacggcacggcgtacaaaaacggactgctgacgcgtgaaaacaaaaaaataataacattgggaggcgaatactgtgcttgacagtatattttcaacagtaataacaaacggaataaccccgggagcctttgcggcgtgcaccttggtgtcattacttgcggggccggtgctctcactcagccacatgtttaaaaacagctgctcaaaaagctttgccgtggctgttgcgctgctgccatttacggtacaggcggtaataatgcttgtaaacggaaacctcggtacgggcgtagcggttgcgggtgcgttttcattggtgcgttttcgctcagcccccggcagcgcaaaggaaattatcggcgttttcacggcaatggcggcagggcttgcctgcggtgtgggttatataggcgtggcaataattttcactgccttaatttgcagcgcgaatataatttacaccctgagccgcttcggcgagcagcccgataatgtgcgcgagcttaaagtaaccatacccgaggatcttaatttcaccggcgtttttgacgatatttttgaaaagcttacggtatcgcataagctgcgccgtgttaaaacctcgaatatgggcagtctttatcagctgacctacatcttagagcttaaaaaccccgaatgtgaaaaagaacttattgacgaaatgcggtgcagaaacggcaatcttgatattgtgagcaactgccgcgccaccgttacagaggagctgtgatgacttatgaaaaaaacagttatatctgttttgattttatgcgcctgcctgctgctttcctcctgcgggaagaaaaacacggcaagcggaacaaataatataagcaatatgtcggcagtgaccgaaatatccaccgacgatatggattttgaattttcaaataatgacacgacatacgattatgacgaatcggaagccaaaacggtagccgacagcgaaaagacagtcaaaataactgccgagggcacttatgttgtaagcggcgagcatgagagcattaccgtatcctctcccgataccgcaaaggtgcgcataatcttaaaaaccgcgaccgtctccaatacgtcgggacccgcgatttatatagaaaaagcggataaggtatttataaccgcctgcgagggcacggtaaataccctgtccgacggaacatcgtacacgggtgattttaaggatacaaatattgacggcgcaatattcagcaaaacagacctgaccctgaacggcgagggcacgcttaatattacaggcaactgcaaatgcggcgtcgtgtcaaaggacgaccttataatatgcgggctgaacctgaccgttaaaagcaacggatgtgcgcttgagggcaagaactgcgtgaagattaaagacgcgtcgataactgtatcggcaggcggcgacggaatacgctccacaaacaccgaaaagtcaaacaagggctttgtgtatattgaaacggggaatatggatataacctcgggcaacgacggcatacaggcggctaccgttttaaaggctgctaacggaggtattaaaataaccgcgggcggcggagctgccgatacaaaacaaaattccggcggcagaaatatgcagggcttcggcggcagcacccaaacgaccgatgacaaagaaagcacaaagggcttaaaagcgggctcgcttatattaattgacgagggcgactttgaagtaagctcaaaggaagattcattccattcaaacggcgatattgaaattaacggcggcagctttaccgccgccgcgggggaggacggctttcacgccgataataaccttattataaacggcggcagcataaccgtaagccaatcatacgagggcttagagggtcaaaaggtaacggtaacggacggcaatattgatataaccgcaaacgatgacggaattaacgccgcaggctcgtcctcaagctcatcaacaggcggaagacccggcggcggcgattcaaacgcgatcatcacaatcggcggcggatatatagttgttaacgcctcgggtgacggaatcgattcaaacggaaacattgtaataagcggcgctacgctgctagtgagcggtcctgccgataacggcaacggcgcgttcgattatggcggcgaggcgactgtcagcggcagcacggtaatactttgcggcggctcgggtatggcgcagggcttttcggataaatcggagcaggcttcgtttatgtatacgctcgacagcagtgcgtctgccggcagcagcgttgctctgaccgatgaaaagggcaatgttttggcctcgtttattcccgcaaagcagtataataatgtggtaataagcaccccgtcccttaaaaacggcagcagctataagctggttataggcggcacggtgtcgggagcggataaaaacggctttgcatcttcgggcagcgtttcctccgcagtgcagacgcttgatattaagctgacgggcactaccaccaccatcggcagcggcggaatgtcgggcggtaatatgggcggcggcaacaaaggcagattcgggggcggtcaggcgccggatatgaacggcggcgcacccggagacacgaacggagataacggcggcactccgcccgataagccgaacggcaggatgaacaattcacagtaaatgcatagctgcacggaacggcaatatagagttgtcggtgaatggcggttttgattcgttttatactctccgaaggggaggtgatcaaaacggacgacagcattaacggaagaatcagcacgcttgaggcaaacgaccgaaatatatttcatcagcttgatgaaataaaaagtgatgtcagggatatacgacgactgacagcggcggtggaaaaggtggcgctgcagaccgaaaacaccgcaaataaggtcaacagtatagataagcggctcgccttcgtggagcaaaccccctgcgaggatatgaaatattacaaaagaattataatcggctgcatcatcaccggaattatcggaacggttttaggcgctgtggcggcgcttatattaagatgactgtgcgaacccccgaagcgctcaaactcttcgggggtttttaagcatttattcgtgaaaattttcttttacctattgacaaagtaggaaatgggtgatataatactaccaacatatcagattggtaggtaaaaaagatatggaaaagcttacaaacaattttgaggctcttgtaagagcaaatttccgtttcgggcgaatgtgccgatgttgatactcacgaacagcttatgcatttacgaaagggaaatctgaaataaacaattataaatttgaaacacttcagcttcacgtggggcaggaaagccgaacccatcttatcacggcgtggtatttaccgaagcctgcggaaatcttgcttatattttaaagcttcgccccacactgatgagagatcagggagcaaccatctctccgtttaattcctttctgcttctccaaggacttgaaacgctctcactccgtgcggaaaggcatcttgaaaacggcttcaaaaagatttaaaggagataattgttatgtcaaaaatatatacatctgcggatcagcttataggaagaacaccgttacttgaactcgcgcatattgaaaagaaatacggcttaaaagcaaaaatactcgcaaagcttgaatattttaacccggcaggctcggttaaggacagaattgccaaggcaatgattgacgaagccgaaaagagcgggaaattgaaagccgattcggttataatagagccgacctcgggtaatacaggtataggtcttgcggcggttgccgcagcacgcggatacagaattataattgtaatgcccgaaaccatgtcggttgagcgccgccagcttatgaaggcatacggtgcggagcttgtgctgaccgaaggcgcaaagggtatgaagggcgctattgcaagggcggaggaattaagcaaagaaattccgaacagctttattccggggcagtttgtaaaccctgccaaccccaatgcgcattttgagaccacaggtcccgagatatatgccgataccgacggtgaggttgatatatttgtagccggtgtcggaacgggcggcacggttacgggcgtaggtcagtatcttaagtccaaaaatccgaaggtaaaggtagttgcggttgagccggcaagctctgcggtgctttcgggcaagccctcgggtgcgcataaaattcagggcatcggcgcaggctttgtgccggatgtgcttgatactgcggtttacgatgaaattatccccgttgaaaatgaagacgcgttttctaccggcaaagaaataggtaaaaacgagggtgtgcttgtcggtatttcctcgggggcggcagtgcacgcagcaatagaactggcaaaacgccccgaaaacgagggaaagaccatagtagtgcttctgcccgataccggggacagatatctttccaccccgctttttgcggaataagccatgacagtatcaacaaagggaagatatgcgctgcgtgtaatggtcgacttggcagagcatgcctcgggggattttatcccgctgagggcggttgccgaacggcagaatatatcgcagaaatatcttgaagccataatgtcaagcctttcaaaggcgggtcttgttgagggtgcgcacggtaagggcggcggctaccgcctttgccgcgcccccgaggaatacagcgtgcgtgaaattctggaggttaccgagggcgatttagccccggtcgcctgccttaaggatgatgccgttccctgcgaaacggcagatcactgtcgtactatttccatgtggcgcgagctttataaaacgcttaataatttctttgattcctacacagtcgccgatttactgcccggcggcgataacggaagctggataatataattttaaaaccgacgtttatttgcgtcggtttttcttgtatatgcagacaatcggtgttattatatatgtaatgaagccgccgctttttgcggcagccccattcttcaaaatcggtccgtgcaatgcagtagacaatacaaccagggtgcaatgcttttttgaagaaacggtgcagttatcggcactgccccgctccgctcacaatacgtcggtattcctcggtcgggcgccgcgccgctaagcagcaccgtttttttacaaaatcttcgacccatagcgagaaaatttttttgtttatgaagtcgaggagtgcaggaatactgacgtattttaaatgacgagacaatataaacggacaaattttccgctatgggaagcattgtaacctggttgtattgtctaagccgttgcccgaaaccgaggacaacagcttactcacatttgcatcagcaccgagcgcttttttatcaggcgctgttttgtatgttttccgttgctgtccgttattatggtatgcggaaaacaaaaggtaatacattataaatattggaaagataaaaaatgaattacaccgaaacattaaattacatacactctctcggaaattttaaattacccgcagggcttgaaagaattaccgccgctttgtcggcgctgtcgtgcccgcaaaataaatttgaagcaatacatattgccggaacaaacggcaaaggctcggtttctgctatgcttgcgaaaatttttgaaacggcgggctttaaaacggggctttatatttctccttatataatagattttcgcgagcgcatacaaataaacggtaattttatatccgaggacgatttggttaaatattcgcaaagggtgaaaaataccgaaattgcgctttcagaatttgaatttataaccgcggcggcattttcatattttgcggctgaaaagtgcgatattgtaatagccgaaacaggtctcggcggcagactggacgccaccaacactcttgagagggtgcgcgccgcggtcattactaaagtggggcttgatcattcggcaattctgggtgatacggtggagaaaatagcagcggaaaagtgcggcataataaagaattttcccacgatcgtttcggcaaatcagaaaaacgaggttatgaccgtcatcaaaaaatacaccgaaaattatgctgtgcccgatatttcccgccttaaggttttgaagtgcgacggcagcggcactacatatatatataaggaaaaagagttttctctgtcgctttgcggggaatatcagatcgaaaattcgctcacggcaatagagactgtagcgtttagcgggtttgatattccgtatgaaacggtgaaaaaagcgctcgccacaaccttttttccggcacgagctgaaattatcagccgtgagccgcttaccgtgcttgacggagcgcataatcccgacggcgccgaggcgctctgcaaaattatgaaaaaatacggcggacgaataaccgcggtcatcggtatgatgagggataaggattatgaaacggttttaaaacggactttaccgtattgcaaatcggctgttgcagtaacggtggaaaatatgccgcgctcgcttggcgcaggaaaattagccgcgactgcaaataaatattgcccgtgtaccgcggcggaaaattatgacgcggcaattgaaagctcccgcttatcggcgggcgatgatccggttttcgtcttcggttcactttatcttgcgggcgggatcagagaaaaattaaaaaaattttatagttgattactatttacgacattttttttaaggacaagcctttattatatatgtaaggcttgttttttattttcggaggtgaactatatgtcggttgaaatcagagcaagcggcgaaacggtaactgcgtatctgtcaggtgaacttgaccaccataccgcacgggcaatgcgtgaggcgatagataacgcggtggagcttaatatgccgtcaaggctggtacttaactttaaaaacatcagctttatggatagctcgggcataggtcttgtcatgggtcgctacagaaccctatctaaaaccggagcggagctggtaataagcgaaactccgccgcagatatataaagtaatgaaattggcagggcttgaacgcctggcaagattggaaagtaggtaataaaaatgacggtaaacaataaatttatgatgaatgtgtcggcaaaatcggcgaatgaaagctttgcaagggcatgcatatcggcgttcgcagcacagcttgacccgacgcttgaagaggtaaacgacataaaaaccgccgtgagcgaggctgttacaaattgcattgttcacgcgtacagggaaaaaatcggaaaaatttacataacaggtgagctgcttgaaggaaacataataagaattaaaattcgtgataccggctgcggcatagaaaatgtggaaaaagcaatggagccgctctacaccacggtgggcggcgaacgggcgggactcggcttcgccgttatgcaaagctttatggattctgtcaaggtgcgctcgaaggtcggaaatggaacgaccattgttatgcagaaaaaaatcagcaggcgctacggcataaatgcttaagcaaaaaaccgaccgcgagcttttcatcgaaaataatctgggacttgtacgcgcattgtgcgttcgtttttcggggcgcggaatcgagtatgacgatctgtaccaggcgggctgtatggggcttgttaaagcaaccgatgcattcgacagcgaacgcgggctttgcttttcaacctacgccgtaccggtgataatgggtgaaatgcgcagactgtttcgcgacggcggggcggtaaaggtttcaagaagtgtaaaggagctcggaatgaaaatatcccgcgaaaggcagaaactcgaacaaaaattatgtcgcgaaccgactgttaaggagctggctttgtcgctcggcgtttctcccgaggaggttgccgaggctgtgtgtgcaacgcagccgacggtatctcttacttgcgatgacgacggtgagattaccgaaaccgatctgccggtaatgagcgccgaggacgaaatctccgacaggctgctgatcaattccgcactcgcaaaattgaacgaggaagaaaaaaggctggtaatgtatcggtattttaattcccttacccaaagtaaaacggcagaaaaaatgtcaatgacccaggtgcaggtttcacgcgcagaaaaaaagattcttgcaaaattgcgggaaatattgaagtgaattctacgcaaatatgtatatcgacgtcgcaaaaacacaagatatagtggaaaatgtcacttttaaaaaaacttttaaaaaaagataaaaaaagtgttgacaaaggggaggggttgtgg

SEQ ID NO: 78 - DNA, 4125 bp, Unknown
  16S sequences of unknown bacteria
tgccgcgttccttggcgatcatcttgccgccggtcgcagcgatcaagatcggaagcagataagtgagcatatacggctgtatcgatgccagctgctcattaggcagccagccgtcggcgataaataatgcggtgatgaatccccaggcaatgaacgcgccgatgttaggcatgaccattgcggatagaaattttccaaacttctgaagtgctgttttcatatgatatcctctccagagaatgccggggtgccgctccatcagccatagccgctagtaaacagctacgcccagctcctcacatttctctttaaacgcttgcggaagttcattgtcacagatcacagcgtgcgcatcctgaagctgacagatcgtatacgttccccgttgaccgatcttggaggagtccatcagcacgatgatctttttcgtgcgtgcgatgaccgtgcgcttgagcagtgcgtcctccagcgattcacaagtaaatcctgtctcttgatcaaatcgggtcacgccgataaaggcaatatcaaaattgaccttctgcaggctttgtatcgcttcgctgccattgacgctcaggctgcggcaattcacgcttcctccgaccagtgagatatgtgactgttccagccgtgccatctcaatggcacatgtcagtccgctggtaaagaacatatccggctgatccttgaggatatgcgcaagcatggtcgtagtgctgccagaatcaaagaatatggtccggtttgcctccacgaatgccagcgcctttttcgcgatcacgcgctttgcttcggtattgcgaacgaatcgctttttcagcacatcatcattgccgaccacctgatcgatagatttcgcaccgccatggatgcggaccagctgtctgttctgatccagcactttcagatcggtccgcaaggtcatttccgataccgatgggaaccgttccttaagctgcgcaaaagtgacgctttcccgttcattgacaaatgcgacgatctcgctgcgtctttgttccattacttccattctgttcatgctcctttcaccttgtcgtgttaattcttattatacacgaggcgttcggagttgaacaaatcattcactgataaaatgagccagcagatactcctctgcttctgggcaccacagccctttatgcgcatcgacgatatctgccaatgcggcaaagcgcggatcatccttacctttgtcacgcagctcgctcaacgcggtcagcggcatgttgagatgtgtgtagatcagcttttttccgcctgggatcttaggcaggttcagcgtcgtttccgccgcggaatccagtccgccgatatgcgtcaccatgactgcaggatcgatgcgtttctccgcggtaagacgcagtgactcgatcatatcctcggtattgcctccggtcgtgcccatgacatgtgtagagttgtaatgcacatcatagaaattcatcttagcgctgaattgcttatccgtcggtccggcaaagaaattcaggcagccatctcgaccgaggacagcgctggacagttctaccactgaggcgatcggcgcataacagaatacatcgtcaaagccatctcccccgctgatctcgcgcaggctggcagccggatcatccatatcagcagtattgacaaaatacagctcgatgccctctgcagccgcttcttcgatcggaaacagatgcttcgcgcgatccagacgttcctgattgatgtctgtcacgacgatcatgcccggacgtctgtcgcagtgcagcgcataagtcagcgcgcccagtcccatcggcccggcgccagcaaggatcgcgagctttccgccctcacggatgcccatctcatgatggtatacccccatcttcgtgtgataggcggcatggaatgcgccgatgctgcaggacatcggctctgccagcgatgcttcataatatgctcgtcccttatattccagcaggcagcccaattccatcacttcaggcggaatgatgcaatacgtggtgtcgccgccgaagaactcataggaatagcccgggctccacatcgttcctttataattcagggccggctgcaatgtgaacttcatgcccggcttgaaccgatcctggtgcttctttcctaccttgatgatgtctcctgccatctcatgtcccatgatggcaggatgatccgccacatcttcatgcacgcgcttgtgcgcggtgcccaggatggcacatttgtaggtggacatacaaacgctgtcggatactacttttaccaggatctcatcatccttgatctcgggcaactcgaattcttccagccgcaggtcgttcgctccatgtaatctgactgctttagctttcatttcaaaaactcctttctgtatataattgttgaatcaaaagcttcaaccatataatatcacgatttttcgctctgtcaactgttattccaaaaattattgtttgactttcaacaatgttggtgctatgctgatgatgaagaggccaacatcgtggcataggaggaagaacatgatttatacggtaacgttcaatccatcgctcgactacatcatccgggtgaatgatttcagcactggcaccatcaataagacgacttttgaaaagcttctccctggcggaaaaggaatcaatgtatccatcgtccttgctaacctgggtcatgaaagcaccgccctgggctttgcagccggatttaccggagaagagatcgaagctcggctgaagcaattcggatgcggcatcgatttcatcaaagttcaagacgggctttcacgaatcaacgtcaagatgaaatcacaagaagaaacagagatcaacggacaaggaccgcgaatcaatgaaggagagctggaaacgctgtttgctaagatcgacgctatccgcgatgaagacatgctcgtgatttccggcagcatccccgcttctctgccagacgatatgtatgagcgcatcatgaagcgcatgcaaggcaagcgcacacgtgtgatcgtagatgcagccggcagtttgatgatgaaggtgctgcaattccacccattcctgatcaagccgaaccatcatgagctgggcgatctgtttggcgtaaagctcaccacgccgcaggaggtcatcccttatgcccgcaagctgcaaaagctgggcgcacgcaacgtgctggtctccatggccaaggccggcgccgtgctgctggatgagcatggccaaacgcacatgagcccggcgccgcaaggcacgctggtcaactctgtaggtgcaggcgactccatggtcgctggtttcctatccggctatctcgaatcagatggggaccatgcatatgcgctgcgaaaagggatcgccgccggcagcgccagtgcattctctgaagatcttgccactgccagggaggtcagcatgctgctcagccgcatgaatgcctcctgatcagcttaaacacacacaggccgcacgatcgacatgcggcttttccgttattcaatattcttaaaaaaattcaaaaaaatcctttatttgacatcaatttttgcatttttcaacgcattatttatactttttagccattttctttgcagccatcttacaaaaatgttatactgcttttcggtcaaaatgaggtgaacagaatgaatcttttagagaaacatggcaggaagatcgcgctggcgctctgcttcgcgacatgcattcccgtcatctccaccgtttacgcctacgaagcacagccgggatggcatggcgaaggcgctgagcgatactatgttctcgaaacgaccagggaacaggccacaggatggctgaagctggacgaagggacatattacttcaacgagaccggcgaaatgatgaccggatggcagaccatcggcgatttccgttattattttgatgcagatggaaagatggccgccggcgaacggaccattgacgaaaccgactggtatttccaggaagacggccgtctgctgagcggatggcaagacgataccctgtatgatgcgcacggctatctgatcacatcccgtttcatcaccacagaagagggcaccctctatgtggatgcggacggcagaaaggtgagcggatggcagaccatcgacgg

SEQ ID NO: 79 - DNA, 11139 bp, Unknown
  16S sequences of unknown bacteria
gttactgagataatccacagctggaatttagtttttcatttaagtatcactgaagtaacgagaatgcgacgcgccattattcatttagctggctgttccataaagtttctaatttttgtctgctgctcatgcgtacttcccattctattccctattcatcactgctcctatacataatctatattctttattgtccattactatcaacagcatccaaaagaaatccatggcccaatagcctttgataacccttgaagttctggaccgtctcctatattctgtaattttttagcttcctccaattctgaaataacttcttctgcaatattctgacatataatcatttctattactcctttcacataattaatctgtagtcatatgaattcttacttgaaacatcacttcatcataatcaaaatttatttccccttggtatttctctactatatgttttacactttctataccatacccatgtgcacttgtatccgtttttgtcgttacaaatttcatttttcttttcataggtacagccgtactcgtgtttttcaacaataacaaaaacatattgtttatttgactcaaatgtaattttattgatcttctgtcttctggacattttatggttgcctcaatcgcattatctaataaatttccaagtaacacaacaaagtcttcttccagaatcggaatactgcttaattttgcttgtagttgaaaatctatcttatattcttctatgtagacattcttcatgttgattataaaatccaacgatgaaaggcctgtccataaacgatgtttttctgattgcatttctccgcaactcttttttataaaatcacgtgctcgctctaaatctccattttccagacattctccaatatactgcattcgatgcttttcatcatgcacaagacatcgattctgttcatatgctttacgtagctcttgatattgctgttcaatcgcactgttacgcacactcaataatctttgctccgcaagcattgacttcttaaacaaagtaatcaatagcacaaaaataacaaatgccataatcactgctattgatgcaataatctgagccgcatgaacattaattcggttcgtccctattatatctgtaaaatagtataaaatcacatttatgaaaataaccatagaaagcacaatccacctatgtacattcaatatttcagctaaaatatcataaatggaaaaactttttactagtataaaaataaatgcataaacaattattggaaacagtactgcagaatatgtatgcatcccaccattgcgattcattatcagcattgtctgatgttctgctgcaccttcataaaacataaacgcacatttcacaatttgaattacaacaaggtaaagaacctcccacagatatgcttgaaaaaatttgcatctactatattttttataaaaaaatggaagcatcatattcgctgtccacaccatcggaagcgaaatatagccaagccaataattccatgcaagtattccaatcatcgtaaagaactcaaaagtcaatagtaccctgttaataccctttctataaaattctggtattaagcactgcttaattatcacttgtctgtatacaaataacaaagctaaccagagactcacaaaaagatatttcaaaccagtagaccagacatctacaaaattgtgaagaataataatccatatttcaaaatgtagtatcccttcattcaccacctccttccatccccactcatcttctgcccggcgtggaaatgctttcgaaaaaatccagataccaagccctgtctcaattatgatcccaagtgtgtttaaccctaatatcatcatccctaacaccgccagtattctgctatttttcgtttcacttctgttacccgctggatccccaccggaagcttcgaaccgtcccgcatatacaggacatgatccttcatcttcatgacatgcctgatattgacaatgaagcctttctcaatgaagagaaactcctcagaatccagctcttcaaacagctcactcagcgatttccgcacacggccttcacctcttttatgaatcagcaccgtatattttccgtcttttttcagatagtaaatatcatcatagctgattttttcgatgttgccttttttctcgatgacgtaatatttttcctcacgctccatcaaccctggcagaagtgcatcgtaggctgctgtcaacttgtccaccagcacttctttcggtatgtatcgataggtattgacttcgtaagcctctactgcataatcaatgaaattcgttgcaaaaatgatgactggatccggatacagcattcgaatacctctggctgcatcaaggccattcctgcccggcatttcgacatccagtacataaatatcgaatttcttttcctccagttcacagagcagccactctgcgtcctgaaaaagctcgatcctgcattcctgtcctttcctgcgaaaatattcctccgtgatacgcttttctttatccagatacatttgctcatcgtctacgattgcaatggatatcattcgccgttcctccctcattttttctcatttgattctgcaaaagtataaaaccggaaattgctcacatcataaaagtagcttccctgctcctctataatcagttcataagcatccggtatctcatcgtcacttcctgcaaagcgatgatatgtgtacagataccgtcctttctgatgcccggacaccttagctatgatgtcatcgacgacttcatgaatgctcatcgggttttcctttgtcggacgccatctaccgatcatgctgcgcacctgcgcccttgtcagctgaatctttctgccaccaaaaccggcatccggtcgaaatgcctcctgatcctcgcctaacgtttccagggcggtacgaatctcttccatctccggattcaatgaatttccggtattcacataggcctgtaaatgcagccgtatcaattccagaagctttttatctccggtattttggtaccatccgagaatcatatgcagcgatgaccggagcgtttccgcaagagatatttcccgataatgcagtgtccacatagaatacatcataacacatatttccttatacttgttatcttttatatccaatttcttctctcacctcctaactgcgcatatttgtgtaccgccagagcttgtcatgcgtttaacattttttatgtgaccgagtcaagcagatattcgcaattcgcttcgctacttgctcataaccgaatagctgcgttgcagcttattcggttaaactacgcataaggagtacacatatgaatatgagaaaaaacattggtttacgtctgagccaggcacgaaaggcgaagggattgactcaggaacagcttgcagaactggcatccttttcggtcagcgaaatcagtcgtattgaaaccggacgcgcagaaacaccgcttaccacgttgcagaaactctgtgatgtcctgcagatcgggcttgattttctgctctatgactgctttccggataaaactggttttacgaatcctaccattcagcagatcatggaactgctctcatctgcatcggaagaagagcagaaggcttgccttgaaattatcaagcaagttcacaagctatcggataaaaatataacatcttaagagaatggaaacgtcaactgtccgtcaacttggacgaagtgtccgtctttcacatttcaacaggcacaaaaactctggggatcgctcagagtttttttcatcactataattttcttttctacaaatctctttttgctttcacatcctgtatttataatttttttcttctcgtggtttacaaatgccagttttccctctctttatatgatgaatcgccggtgattcaacaacaaaataaatttgaaaggggaaatgaattatggcaacagcacagcagattatcaatgaagcactgaaatatgaaggagaaggtggaagcagattccagaatgcggcaggtatgccggggcagccatggtgcgccatgttcgtatggtatgtcttcaaacaggtcggtgcatccagtctttactgcggtgggcaggggatctgctctgtagagggcatttacagctattataccggacagagccttttctctcaggatccgaaaccgggcgatctggtactttatgactgggctaatactactggcagattcaatcatgtaggtattgtcatcagtgccgatgcaaactatatttacacgattgaaggaaataccactggtggccttgtggcaagaagacagcgtgcaagaaacagtgaaatcatcggttactgccatccgaagtattctggaacaaccggaggaaacaccggtggtggaactacaggcggcggcactactacgactcatccgacgctctcttctggttctaccggaagcgaagtaaaactgatgcagcagaaattaatgatgctcggctacaactgcggtacatccggcgctgacggtgacttcggcagcggcacgctgacagctgtgaaaaacttccagtctgcaaatggcctgactgtagatggtatcgtcggagcaaacacacatgcaaagctggacgcaaagtataatgcactgaatgtcttcactgccacctgtaacctggagggactgaaggtacgtaccggtgacagcacaagctatgcaatcttctccgcttatccatctctgaaaaagggcgaaaaggttaaggttgcaagagtcacatccaacaactggtactttgccctcgtcggtgagcgatatgtcgcatacatggctgcgaagtatatgaagaagggctgatttagccagctctgacaatttcctgcttttattgagcagaagatttatcagtagatcggcttttcctatcgcataaaaaacgattctcactacaaaagaagtcctctgagttttttgctcagaggactttttcatgacaagaattatttttctatatttacatacagagcagttaagattaccggctgttcggatccaaggcatcccgcagggcatcaccgatgaagttgatggccatgacgaggatgacgatcagcgtgccagccggtatccagagccatggctgcttggtgagcacagtcagggactgagcaccgttgagcatgttgccgaggctggaggtcggcggctgtacgccgaggccaaggaagcttaaggctgcctcatcgagcatggaaagtgcgagcacggaggtcgcgtacacaaggatcggcgccacggtattcggcaggatctcggaaaagagtatgtggcgcaccggcattccggcgatgaggttgccctttacaaagttcgtctcgcgcaggctgagcacgttgccgcgcacaaggcgggcgatacccggccagtcgacgaagccgagaatcaaaatgatgttccagaggccgggacggaagatcgctgccgccacgagcacgagcaggatgtatgggaaggacatgaccatatccgtaaaacgcatgatgagcatgtctgcgatccctccaaagtagcctgcgatcagcccgagcacgacgccgatcaccgtcgagatcagagtcgccagtgcgccgacgagcaatgaaatccgcatcgcatacagcagacggcttaagacatctcttccgatctggtctgtgccaagccagttctgcaatgtcggcgctccgctgaagggaccgacgatcgcattcggatcatatggcgcaatccatggagcaagcagcgctgctccgacgagcgccacgagcacaatgaaactgactaaagcaagccgatgcttgcgaaaacgccgaaacacagtctgcaggtagctctcgttgactgcggcctgcgttttcttttttccggcttcccgggtggtttttttctgcatagtttttctcctgttcaggtttttgctggcggatgtttcgctagcaggccgcagactcgcttgtaaagtgagtctgcggctgatgggcgttccgcccatcccaaaacggaaatccagagctgaccaaataaatttgctcagctctttcttcccgttttgctgccagcgaaactgttaatcaagctgtatcgtcggatctacgagggcatagaggatatcggtcacaaggttcgctgccagcacaacgatcgcggagagcaggcagacgcccatgatcaccgggtagtcgcgtgcggtgatcgcgctcattgtcatcaggccgaggccaggccaggaaaagacctgctcaatgatgactgccccgccaaagagcaccggaatctccataccgatcaccgtcacgatcggaacgagtgcgtttcgcagcgcatgcttgttgatgacgcggaaacggccgatcccctttgcccttgcggtgcgcagataatcctgctgcaaaatctcaagcacagcgcttcggatgtagcggatgttgctgcccgccatggaaaaggcgagcacaagcaccggcatgatcatatgcgccgcaatatccttcacacctcccgacgagccgagcgtcgtcataccgctcgacggcagccatccaagctttaccgtaaacacatagatcagaagcagggagaggaagaatcccggaatgctgcttccgaggaaggaagccgtcacgactgcataatctcccttctcatactggtgaattgcactgtaaataccggccggaaccgccagtatcaggctggcgatcagagaaacgcccatcagaagcagtgtcggcccaagatggcttgcaatcatctcgctgactgcctgcgaggacttgatggaatagccaaggttgccatgcaaaagctgccccagccagacaaagtactggacataaaatggtttatccaatccaagcgcgatcttctttgcctccagcgcagcctgtgagacacgcggcccctgcatcatttccagcggagagcctgccatacacatgatcgcgtagtcaatgaccgtaatgccgatcagcaccggaatcgcgatcaggattcgctttataatatatttatacatcgctgcgccctcctttttgatctgtcaaagccccggcagctgcagccctggcttccccaatcctttgccgcttagcctcagccattaccgggcaggccacaagatgccccggacatccggcaagctccagaagctctggcacctgctttgcacactccggcgtcgcatgcgggcagcgcgggtgaaaccggcagcccatcggcggattcgcactgtcaccgatctctccggcaagaaattccttcctgcgatccttttcctccggatccggaaccggaactgcctcgatcagcgcctgcgtatacggatgcaccggatggcggaagatctccttcgcctctccgatctccacgatttttccaagatacatgactgcgatccgatcactgacataattgaccgcgccgagcccgtgcccgacaaaaagcagcgtcagatgcagctccttttgcaggctcttcagcagattcaggatctgtgcctgaattgatacgtccaaggcggataccggctcatcacagacgataaatttcggattcagggaaagagcctttgcgatcccgatccgctgacgctgtccgccggaaaactcatgcggataccgtgccagcacgtgctttggcaatccgaccatatcaagcagccgttccagatccttctcaatggtcgcctttgtcgatatatgatggtacagcatcggctgggaaagaatttcataaatatgcttgcgcggattcagggaagaatacggatcctgaaaaaccatctgcagctgtgtgcggatctgatgcatttccctgcttttcaaagccgatatatcgcttccctgataataaatttttccttccgtcggcgtctccagcccgacgagctgccgtccgatcgtcgacttgccgcagccggattctccgacgaggccgagcgtctctccttctgtgatcgaaaagctgacatcatcgaccgcatggatatttcccgtcacatgggtgataatcccacccttgatcggataatatttcttcaggtgatcgacctgaatcagaggtgtcttctcactcaccggcgctgccccctttctcctcacaaaccgatgtttccggtcgctgagacttctgcttttctgactcatccgctctctcccaccggttcttcatcacgatacaccgggccgtatgctccgcccccatcacataatcctcctgcggctgctcacagcgcgggcatgcgtaagcacagcggtctgcgaaccggcaccctgtgatgtcatcgtagctctccggcacaatgcccggaatcgatacaagctgccggtcggcatcgtcgcggatcgtcggcacggtatccagcaatgcctgcgtgtacggatgtgccggatggtgaaacagctctttagacggcgcccgctcgatcatctgtccggcatacattacgagtacccggtccgccatgtttgccacgactccgatgtcatgtgtgatcagaatcatcgccatcccggtctcctgctgcagctctttgagcagattcataatctgtgcctgaatcgtcacatccagcgccgtcgtcggctcatcagcgatcaaaaggcgcggattgcaggcaagcgccattgcaatcatcacgcgctggcgcatacctccggaaagggtatgcggatattttttcatgatcgcatgcggatccggcatgccgacccgggcaagcagcgactctgcccgcactgcggcttccttttttgacagatgcatatggatgcggatgctctccatcatctggctcccgatcgtaaataccgggttcagggacgtcagcggatcctgaaaaatcatcgtgagctcattgccacgaatctgatccagctccttttccgacatcgtaagcagctccttgccgtcaaacagtaccgatccgtcaatgaccgagcccccacggcccagaagccccataatggacaaagaggtcacgctctttccacagccggactctccgacaatgctgacgacctcgccctcatccacatgaaagcttacatgatctacgctgacggtcgtcccgtaatcgcccgtgaacgcggtcgtcaggttttttacttcaagtaaatgcgacatttgtattccctttctgtctgctttgcgtaaagcggatctgtcatggttataacgcaggaaaaatccctgtccacgccagaaggcgaagacacggattttcctgatctgtatgatgtgatgataccagggtcaaaaggtattttactgtgcgatatcccagttctgcacatcattgaagaagccatatgcgctcggctctgcacctgtcaggcggttgcttactgcgccaagagcactgatgacataagcggagaacatcggcacatcttcctgtacctttttatcaacgacagagtacaggcccttgatctcctcgatatcactcgtctgctgtgtcccaccaagcgcttccttcacggagtcgtcggtatatccggtccagcttccctcaccgctaagcagccagtctacatccggatacggatcaaccggtgcgtaggtatactgtactgccatgatatcataatccgtgctgcccgcaacggtcatcagcgtcgccagatccacggtcgtcacttctacattgatgccgactgccgcccactctgccacaagcacctgtgcaccatttacaaaagtgctgtcgccggagttcacatagaaacgaagtgtctgggaaccgtcccatccggcctcggccagaagctccttcgccttctccggatcatacggagtcggctcgatggaatcgtcaaagaacgggcttgcggaagagaggaagccgtctacgacctctccatgtcccttcagcagctgctctacgagctggttccggtcgatggcatacagaagtgcctgacgtactctcgcatccggaatgtttgcggtctggataaatgcggactggttcgtgatcggaagaccgtataccgtctttacgttgtccagagactcgatgctctcgtaatcctcctgcgggatcgcagtcatcgtatgatgtgtgatgtcgatctcaccggactgcaggccggagtatatctggctgccctctacgatcttgaggttcagcttgccgatcttcggtgcgcctttccagtaatctgcatttgcttcataagaaacatagtggtccgtatcataatcggtcaggaaatacggtccgctgatcacatccggatgattgaaccagtcaagggtcatcagctcttcatcggaataatcagcaagtacgtgcttcggcagtgtatggatgtaacgcccatacgtattctcaaaagtcgtcagcgccatcggagacttcgcagtaaaggtgatcgtcttgtcatctacgaccttgataccatcgatcgaagcagcgccctcctcggtaaatccatcatcgccaatgccttcaaatgcatagagcatcatcgttgtgttattcacaaccgggctcgccagacgcaggatcgtaaactccacgtcctcggctgtcaccggagtcccgtctgaccacgtcgccgcatcatcaatgtgcacggtaaaggtctggttgtcctcagtcgtcacagaatccgccagcatcggctggaaattcagctccggatccagctccacgagcggaaggaactgcaggtccgccgcatacttattgatctcggtctgatccatcatcaggggattcactccgccaagagaatcggtcacgccgatattcacgatcttatctgcgccgtcctccgctgcaaatacgccaagccctgcggacgatgccgccatcagtgtggcaagcgcaacaccggttaccttttgcataagctttttcatagttctcctccttttgcgtccggctgcacccggcgctttgcttcaagcggctaatctccgcttttcctaccatctctatatgttttatatgatttggttaatttattttagtataccacagttcaaatgtcaaatacatttttcagaaaaaattaaagaatttcttttcgtacttttatataaattatatatgtctttttgactatctttttatatcttcttaaatgtccgcaaag

SEQ ID NO: 80 - DNA, 7771 bp, Unknown
  16S sequences of unknown bacteria
ttcctttactcctgttatcatatattcgccttcatcttctgatccatcattttataaatacaatgatactttaataatttccaagtattttcatattaatcgcttcttcacgaataccgcgcagcgcattttttaccgctccgtcattcaggttcccctcgaaatccacaaagaaccgatactcccagtttttgcccggaatcggccgggactcaatattgttcatattcagattgttgtaaataatgtgtgaaagcatgtcatacagagaaccgctcgaatgcggtgtctcgaaacagatactgatcttgttcgcgcccttccggaaaattctctggttcgtcacgataatgaaccgtgtcgaattcttcttattaaaatagatattctcagccagcacctcaagcccaaacagctctgctgcaaacttgctgccgaccgctgcctgagtgcagtctctatcttctgcgaccttcttgaccgccagcgccgtattgtcatacggaatctgccgccacttcggatgacgttcgagatactccgcgcactgggcgagtgcctgtgggtgggagtatacggtcttgatctcttccagcttcgtccccggcagtccgatcaatgcatgctcacactttacgatctgctccccgacgatataattttcaaagttcacaagcaggtcgtagttatctgcgacgatacctgcggatgaattttcaatcggcagcaccgcatagtctgcagagccttccgcaatcgcctccatcgcatcccggaatgtccgtacatggaagcagttcacatcgccgccgaaataagcccgcatcgctgcatggctgtacgcaccctcaacgccctggtacacgacccggatatttttccggtcgatatcgtcgacctcgataaatggcaggcgccccgaggcgccattctgctcaagcagctcatactgcagcttccggctcatcgacatgatctgctggaatagttcctcgaccccgtgccggttaaaatcattgtgtgccatcgccttcagctttgtcagcttttcatgctcgcgctctttgtcaaatactttctttccattcgcgatcttgtaacgcgccacttcggcactcacacccatccgcttctcaaacagctctaccatctgctgatcaatttcgtcaatttcctgacgcagttctattaaatccttcatctgttgttctccattttttcttttctctgcaaacgattatagcacacatttggccaactgcaaatagccaggctccttctgcctggctatttctgtcataacactatttatgataattctactatgatttcttcgattatttttccaccatccgaacaaaggcccggccctaccttactggaaactgcataatgcaacaccgggagaaacctttttttctccggttcgtctaaaagctgccgatacagtggatcgccgatcacgacggtaatctcgggatcattgactgctttctgaatctgctcctcgtttttcagtatccgatcgcctgctccaaggctctctgcctgcgctccaaacggaagcccgacacagctgcatttcccggtcacgtaataaatctccgcccgcaggctgtttgctatgatctggtctccgagaatcaggattccatctttttggccgcacatctcttcctgtgcaccccaggccgcgacgtcatgatctgcatgctcctgtgcaaacgctctccagtgttccaccgtagccgcactcatcgaaaatccggtcacacacggcatgttttgagtccgacacagccatgctccgagcagtgcgccactatagctgaccgccgtattccacctagcagaaaaaatctgatctatctgactcatatccgcccgatcgaacaaggacgcacgaatctggatgccaagctcctgtacctgtatcctgaaccgttccataaaatctgtcccggcaaaatcaagtggcagatcacccaaaatattcatgcctgctttttctgcctgccttttttctgttttcatagcatgcttcagcatcgtcttcccggccaaaaacgccccggaaggatatagccccagtccagtcgtcgaaaagccaaatgctggaatccccgtctcatcctcgatccatgctgccattcctgcgagatccgtaccgatcaccatcggcaccgggcttccgaccagtgcaataaagtttggatgcatttcttttgccgcctcgcagatatttcggataaatttttcatcatttccaagtactgcatccaattcccgcagtccggaacagtaaaccattgagcctccatcataccagcgcggctcatcataattgatataatttccggtacagccagccgcatcatggatgacaatcatgccgcccagcgaaaacagcgccccgcacactccggaatagtccggtgcaaacggcggcaggcaaaaactgaatcttcccattttcacaccaccaatccgtgcttttcgatcagctcctgcagatctgcctcctgttctgccgccgcagccagtctatccagcactacttctagtccataaaatccataattgccctcgtcaaaaaagagatccgccacatagcgggcacgtaagacataggccagatctacgccgatgcagatcagatccgcctctgccgacagttctcgtctcccggtcattcccggcaaatggtaatcaagcagtgaaatgatttccagctccggctcccgctccttcagttcttccacacaggcctcctcgctcggagcctcccggtagccgatatattttacaaaaatcccgcaatccatcagaaattttgccacctcaaatggagacgcacaggcaaaatcatccacgcccaccggacgtccgcacagcctttgccgcacctgttccgccttctttttaagccgcgaccggcagctttttatcagctcataaaatgtatctggaaccggcatccccgtcagctctgccgttttttcagcaaatctgcaatatgtttcctgtatcgtatccggatcatagctgtaatacatcggaatcgccgactggccgcaggatgtctcaagcagtctggccgcaggcattgctgtcgagaaaaatacggcgctgcagcagctttttgtcatctcctcaaatgcagtaaatgtctcacatgcatgaatgtgccggacgggcgcaagccctaaaagcgcagcgatctgataaaactcacaggagggatgaaactgcgccagattgccaatgcaattgactccgttatcctctgtgtcatccccgagtctcccaaggagctgataaatgctcttatggatcgataccatcggagaatccggccggtcatcggtgatcggattcatatggcagaaaataaaatacgtatccggatatctacgctccagctcccaggctaccgcgtcattgtccgtcccgatcagatcatcaatgcaggttacaaataaaatcagtacccgaggcttcttccctcttgtttcaaggcacgcaagcagtttccccgccgcgtccatcaccgccgcatcgtacccctcaatgatatctttttcatccacaaaatagtaggacagccggtccttgatcccgtgctgcaccgcacccagtgcgccatgacgcccacaggccgccgggctgataaagagctcataggattccgggatcatcattgcgatccgcaccattccccagccaccgtttccggggcagatataccggagctgttcgtatttacacagcttcaatctgacacacctccctcacgatccgagccaagtccatgtactccgctgccatctcgctgtctggaaatgcctccacggtcgtctttccctgctcctctgccttccagacggtatccgaacgcggcattacttttatgatcttcgtccccatctcttctgccgcctgcgacaccaattccagttcctttgtcacattgcgggaattcagaatcagacctgacattttcgcatagccacgccgcccaaaattccggatcgcctgactgatgttcgacgctgcatagagcgacatcatctctccggatgtcaccaccagcacatcatcggcataccccccgcgtagcggcattgcaaaaccgccgcagacgacatcacccaacacatcataaatgacaatgtccggctgataatgttcatatgcctgcagttgctccagctgctcaaaagccgtgataatgccccgaccggcgcaaccgattccgggtgtcgggccgccggcttctgtgcagatgcagccatgaaaccctttaaaagtaatatcaccaagtgtcagtgcatctccttttgccttcatctgatccagcacggtggtgatccgttttcctccgaccagattttttgtcgaatccgccttcgggtcgcacccgatctgcataaccctgtagccctgacatgccagcgccgctgtgagatttgaagcggttgtcgatttcccgatcccaccttttccataaatcgctatctttttcatcgttctctcctaaagtatgtcaatcggaatgatgctatcataccgtcttcctttcttttctatctgcttaatctgtgaatcgatctcaaaatactctcggatatggtcttcggtaatcacctctctcgtatccccgaacaggtatccttcttttcccatcagaagcgtcttatgtgcacagcgcagtgcatgctccggataatgagtattaatgacgaccgccagatttgatgccgccagccgctcaattgtatttaaaacgatcagctgatttttcatgtccagatttgactccggctcatccatgatcagaagtcccggccccttgatcagcgctcttgcgatcaacaccatctggagctgcccgccacttaaggtattacaggactggtttgcaatgcttccaagcccgaacttctccaaaagtgcataggctcggtcatagtcctcacgccgcggtgtccgtccgatcgaaatattctgagaaagtcccatcacgaccatatccacagccgggtatccgaataccagctgctttgcctgcggcacataactgatatcgcgccagaagcgtttctggttcatatgcttcgcccccgcaccatcaatctcgatttctccctctttcagcgcaagaaaccgcatgacacagcgcagaagcgtcgtctttccgattccatttggcccgagaatcgccagtgtctctcctgcttttacttcaaaggagacttttgaaaataaaagcggtcggtttccatatccaaaccccgcatttgtcactttaagcattccatgcacctcctgtccggcgaagcatcatcgcaaaaataggcgccccgatcagtgcggttagaatcgacagaggaatttctgccgccgtgatgctccgcgccgccgtatcaatgataaccatgtaaccagctccagtcagaatgcttaatggaagcagcttcttgtgatcatttccgacgaccattcttgtcagatgtggaactgccagtccgacaaaggaaatgacaccgcacagtgccaccgtggacgccgcgatcaccgtcgtcgccagaataatgagaatccgcgtccatttcatgttgattccaagcgacgccgcctcatcttctgagagggagataacattcagccgccagcgcagcagccagagtacgaaaatggcgatgccaaccatcggaagtgcccggaacacgtcggtcattgaggacccggacagacttcccatcagccagtaggtgatcgccggaagtttttcctccgggtctgccacatatttaataaaggaagtcaatgcttcaaacacggctcccacgaccacaccggagagcaccagcatcagtgtcccggtatttccctttttctggctcagaaaataggtcagagccatccccacaaacccaaagagtagcgccaggatttccacatatgcaaaacgggaaaatagcagaattccaagtgccgcgccaaagccggcgctgtatgaaacgcccagaatgtgtgcattaacaagtggattaccaaacattgcctgaaggctgacaccggaaacggacagccctgcccctacgagcagtgccatgagaatccgcggaatccgcacactccacatcaccgtcttgagcatcgaattttcttcaatcccaaggaagaggtagcgaagcacctccgccgcagaaatggaataacgcccgatacacaaagctacaagcacaagtaacagaagcagacatgtaaccactgccataacgactggaaattttttctgtctcatataaatctccttctgacatacaaaaagactggctcgttcctctttaggcgagccgatctgggctctgcctttgcggaaattacggtgccagtctttttatgtctcatcctgataattctgttttgtggatgatcagcttctcgtcgcactgcttccgaaagaagatcccttcgcagcttccggctgtgcatccaaaattccctgtgcctgctcttccgtcagcgtgtaatcataaaactgctcataatactgagtgatctcatcaatcatattgtaatcaaacagctccggatgaagggtctgtgccatccatttgaacatcagcggtgcatctccggatggcgggaaccagcggtaaacgccgagcggctccttgtataccttgccattcttaactgcggatacattggaccagtcctgtccctcgatcgtattgttgtacaggtcatccggcatcgtgtctgtgaatgttgtcaggataatgatatccggatcccactcatagatctgctccatattgacatctgcaaaggaatccagctctgcaccgacattgatgccaccagccgactcgatccagtagccgccgtaaaagtttgagccgcatgctgagatctgctccttgctgtggttgtaaagataaagcactttcggcttctcttcttccgtcgcatctgcaagtttgtccgccacttcctgttttactgtatttgcatactcgataactccctcggtatttccggttgttccgaacatctgtcccatgatgtccagccaagtgcttaaagtcgcgatgacatctccgccttctgcaccttttacaccgaccgccgggatgcctacggactggagcgcttcatactgattctcatactcggcccagtaaatgactacatctgggtccaattttaaaagctcctctacgttaatctcggtgccctcaatgaagttgtctgcaatcccgaccagttccggatacatcgcagccatgaccgaattctcaattgcactggtagaacccggatgcacacctttcagattctcgatcggtgcgcccgtcagcgcgtaaatacttgggagcggaagtgcagtcagtaccacactgtcgatctcagttggcacctgaacatctcttccattcatgtccgtcactgtgatgtagctctccgcctctgtgcttgcctcagtgttctcctctgccagtgcagtcggtgctgtaaagtacgccagtgtcagggctgccgtacagcctaacgtaagtaatctctttctcattcctctgtccttcctgttgttgtggttgtgaattaggcgtgtcttatttatattagcctgcgctaatcttcctgtattctacactgaaatcataggaattgtcaactcttttttctggtatttttctcatttaaccgaatcaagcaagtcccctgcttcaattgcgcaaagcaataagcagtgggt

SEQ ID NO: 81 - DNA, 1574 bp, Unknown
  16S sequences of unknown bacteria
gcgacgaacgtaaccgttaagaataatgccaagctgacgtttaccaacgccaagagcattattatcacacaaccttttaccgtcgaactcacttcgtcattagaactttccttacagtaatttttaccgataaggcggagaatcggattctccgcctttgttttttcaaatttccaccatgcaaacacgccatcaggatcgttccgcctactttgaagaaacagcaacttcctgccggaactattatctcccttacattgaacagcacacatccttgaaattcggccgtaactgccgggtaatggaggtcggttgcggctttggcggcattctttccatttttgcggcaaagggggccacggtaacaggaatagatattcataaaccgtcaatcgaaaccgcaaagacacttttcgccgaaagggggttgaaagggacgtttatctgttcggacattttcgattacagcgacacacaaccttacgacctgattatcctgcacgatgcgttggagcatattcccgaaaaagagcggttgatgttgcatttaaaatcctttttgaaagctgacggccttttgtatctgggattccccgcatggcaaatgccgttcgggggacatcagcaaatggcgaagaaccggattatcgccaattgtccttacatccacctgttgccccgatctcttttccgtttcgtgttcagggcatgcggcgaaaaggaaagtactgtgaaatgtttttttgaaattcgggatacgcgcatcactatcgagggtttccataaattagtaacggcaacgggattacgtatagtgaatcagcggctatatttcataaacccgaattatcaagtgaaattcggattgaaaccgcgcatactatctccagttatcgggaaaataccttatgtgagaaattttttcacgacgacctgctactatctgctggcaaagcaggaggaggctaattaatctccagatcgagcgatattttcgcttcgctcggaacaaacggaaccaactgcgctacacgccatttcggggcttcggtggtgtcgttcagcagaaaagttacggaatatatatattgagcatccgcctttacaaagttctttttgacgctttcgattccgtttgtggcctgtcctgcaaccaaaaggagcgtgttcttttcgaagtctatatcttcgggcaatttgtcgttgggaaatataaaatccgccagttccgcttggctgcgaatcacgatcagttgattggcgggcgtttcagcccagttccaaagaggattcagcgtataatcggcgcaggacaaagtagtagcgtttccctgcgtattatcatctggggtatcagtctttgtttgattcatctccacggacgtacaacccgtcacggtaaacagagccattgcgataagacaaatgatctttttcatagctttggtttttcagtttgacgatcaaatagcgttcccgatttttatttcggcacagcatccttgcgcatatcgtctgaaatataaggtattcatttacaaagataagaattttggataagaaacaaactattt

SEQ ID NO: 82 - DNA, 20632 bp, Unknown
  16S sequences of unknown bacteria
aacaaaatcaagcgaaaacacctccgcggaatcggaaggcaccgaaacggaagccgaaaccgagacagaaacggagctgacattaaatcttcccgaggctgatttcggagacgcgacctgcaccacgctaatcagaacctgcaaaataccgcacttcacagccgacgagattacgggagaagctctgaacgacgcggtttacgagagaaacaacaaggtatcctccgaattcggcgtgaacctcgcgtttgttgaccttgccgacgacagcggaatgttcaacaacaccatcggtcagagcatcatggcacgcgacggagcttacgacatagttgcgcccgactactggtggaaaaccgaggtgaacggctggttcatgaacctcaaggaagtggacaagctgcagctagatatgccttggtggtgcgcaggctggaacgacgcggctgaaataaacggtgtgcttcccggagcggtcggatactacaccctcgacatgatacaaaacatgaacctgatattcttcaacaagaatctctacgacgcgctgacgttcgactcggtttactcccttgacggaatgtacaacacagtccgcgacggcaagtggacttatgacctgttcacacagatgtgcagtgcggcggctcaggatcttgacggcgacggtaaaatctcggcaggcgacagattcggctcactctcagacctccagtccggacgcgcgcttctgtggagctcgggtatggagctttgcacgcacgacgaaaacggcaatctcgtttccactctgactaccgagaagaactacgacatattcaagtccgtgcttgcattctatgaggacaacgcgaactcatacggcggcgacaacggaagaatgttcatggcggatcaggctttgttcctcatgtcgagcattgacggcgcggttcagcttcgcgatatggaaagcgatttcggagcaattccctaccccaagtatgacgcagccgacgaaagctaccgcagccgcaacttcggttcatcctacttcgctatcccgataaccgcaaacaacgccgatatgtcagcgactgtccttgaagcgcaaaacttctacagctaccgcgacgttcgtcctacatattacgacaccatcctcaagggcaaagtatcgcgcgacgaggaaacacgtgagatgttcgaccttgtgcttgacacctgctacatcgacacgttcttcatctacggctccaatctctcgttcgtagcggatctcccgttcaacaccgttctcgaaaagcaggataagtatatgtcttccatgaaggttcaggaaaaaatcgtaaacaaacttctcggcaagctggcggaagcaatacagcccgaaaacctcggctaaattaaagcgaattagaatatggttagaaaatgaaatagttcttgttttcgcctccgcggggtgatataatattatcagaaaaagaaaacaaccaaggagacataaaatgagaacattcattgattcagttgattcgcttcccctgctcgtaaaggtgcttttagcgattcccgctcttgacataatctggggcatttaccgtatcgtatgcgcgcttgacgaaaaggatgttatcgcgcttgtcgtagccgttgtgcttatgttcatcccgttcacatggataatcgacataatctgcatcatagcaaagggcaacgtatggcgctacggtcacgtactgtaatttcataaaaatttgaaatttccccttgacaaagccgccgctctgtggtataatatcatccgtcagcgagaggtaatgctcctgcgagacgaatgcggaagtggcggaactggcagacgcgcacgtttgaggggcgtgtggtacacaccatacgggttcaagtcccgttttccgcataaagcagattcagaaatgggtctgcttttttatttttctattgactttctcccctctctttaatataatcagattaacaccatatagtatcacgaaagagaggtaaactaatgaaactgacaatcacgaaaataccgctgaatgaattcacagtggtaagccacgggtacgacgacgccgcggacgttctggtgaagtatgtttcacttgcaaccggcgtaaatcttcccatcgaaaccataagccaaaaggaacgtcacgagatacggctcggctctcccgcggacgtatgcaaaaggctgaagctcgacggaatcaagaacgacggatttgtgctgaaggaagctctcggaaacctgctcatccgctcgaacactgaaaaaggagtgctgaacggcgtttacgatttcctgcaccgctgtctcggatggagatttcttccgccggacattgacttcctacgctcgcccgatgatgaagccgacatacccgagggattcacctattcccacaatcccgcgtatgagtaccgtcagctcgactgggtttcaactcacagcgacgaatggcgggagaaaaaccacgtcaacttccgcgagttcaactgggtgtatttcgttcacaccctctccgcgctcgccgagacaaacgatccgtggggacagccatgcctatccgacgaggaagtattcaaaaaagtcgtgaagaacgtgcataagatactcgacgaaaatcccgactgcaagataatctccgtatcgcagaacgacaaccaaaactactgcaaatgcgaaaaatgcgccgctgtcgatgaagaagaaggaagccacgccggttctctgctccgttttgtcaaccgcgtagccgacgagataaaggacgactatcccgacgtttcgattgacaccctcgcgtaccagtacaccagaaaagcaccgctcataacaaagccgcgcgacaatgtcataatcaggctctgttcgatagaatgctgcttcgcccacggtctgaacgatcccgactgtgaagtgaacgccgcattcaagcacgacattatagagtggggcaagatatcaaagcgtctctacatctgggactacgtgacggactttacatactacatcccgccgttcccgaactggagagtgctcagagaaaacctcgagttcttcgcagacaatcacgccgccggaatgtaccccgagggaaactacaactccgtgagcggtgagtttggtgagcttagagcgtatcttctcgcccgcgctatgtgggacccgtacatgagcgacgacgagatgaattcatataaggaagattttctccgcggctactacggaaaaggctggcgggagatagaaaagttcatcgacttcactctggagcattccgagggcaggcacatgagcatatggcagcatccgtttgagataattccgcgcgagacatacgaaaagcacgagagcgagattgactcatggtgggacagcgcatatgcctcgtctgacgagaaagaaaaggaaagaatagaccgctcccgtatgcagtgggatgcagtaaagcttatcatgcacccgaatcaagaggacggcaaaaaattctacgacaagatgaagaaatactccgtcagatggaacgagtggagagaactgaaagacgaccccgacttctcgctcccgccgacggaatggcttaaataaacaaaaaaagtccgtaccgcttatctgaatccgatgataagttcggtacggactttctgtttatgtagaattacttttcagccgtgaaatgaaggacgtagctctcgcctgttcctgcgggataacgtgagaggttgagaccggcattcatgagaagcgcaccggaatatacctcgcctgtttcctcgagcttataatacttatcagggtcaagtcccttcatgcggatgaaacgtgagtggcagtggtagtagcgcatattgacgagcgtgaacatagcctgcgtcttgtcctcggaaacaagctcccatgcggcataatagctgttgtcccacgggcagactatacggtagaggtcgccgtaatgcgtgaggtcgtaatacttgtggtactccgcaacctgcttgtgaactatctcgcggtccttttcggtgagcttgttcgggtcaagttcgtagccgaatgtaccccacattgccacgtttcctcttgtcgtgatatttgtacgaccgttcatggagacgtgcgcgcccattgtggatgcgggatagcaaagcgatgtgccgaactggatagcgattctctggatagcgtcggtgttgtcggatgcccaaatctggggagagtacgcaagcatggcagggtcaaatcttccgccgccgcccgaacagttctcgatgagcatatccgggaagtcgcggttaagtctgttcattatgtcgtatgtgccgaggatgaagcggtggaaaagctcttctccgtgttcgtaggtgaggagcgcgcttccggcttccgttatgtttcggttgaagtcccacttgaggtagtctatcgtatatttgccgagaactgccttcatctgaccgtagatgttttctcttacatcctcgcgggacatatcgatgacgcactggtttctgccgagtgagcggtctcttccggtaacatggatgcaccagtcgggatgagcgcggtacaaatcggagtcgggggatatcatttcaggctcgtaccagataccgaacttcagtccgagagcatgaacacggtctacaagcacgccgagtccgcccttgagcttgttttcgtttacataccagtctccgagcgagcgtctgtcgtcgtttcttacaccgaaccagccgtcgtccataacgagcatttctatgccaagctccttcgcgcgttcagcaaatgaaacgagcttgtcggtgtcgaaatcaaagtaagcggcttcccagctgttgatgagaagaggacgcttttcggtcttccactttccgcgaacgaggttgttcatgtagagacggtggaaggtgcggctcattccgccaagtccttcgtttgaatatacgagcacaacttcgggcgtctggaattcttcgcctgcttcgaggtgccatgtgaagccgtcggggttaatgccaacgttaactcttgtggtttcgtagtagtcaacgtccgctgtgatgtcgaagttgccgctgtagacaaggttgaagccgtacacgtcgccgaaatcctcgttagcagcgttagctccgtttctcacgaaggctgcgaagggattgtggaagtgcgaggaagaacctctgacggatgagagcgatgtgtgaccgtgctcgagtgcggtgcgcgccatgtttctctccgcgttgtgtctgccgtagaggtggagcatatcgaagtccattgtcggcagagttacgctcgaagaatacgccttctcaatatccataggcttatcggaaccgttctttatgcgcacggactttgtcatagctccgtagtcgttgaacacggtgtagatgagcacagcctccgcgcccgttaccttatcgcacacattaatctcgagtgtgtcgcattctcccgccttgttctcgtaaagcgaaggaagtcctttcagctcgggcttgccggaatatatcttgtgtgagacatagcggaagtcggtgcagttgttgccgtcggcattgcggatagctacgggagtcttgcggaagtcgcccgtaccgaagccggaatactcgatgggagcaacgtcggcggaaaaatctcccttgttcacggacgggctgtgagcggagaaggaagcaaaccattcgcggaagtagaaatccgtgagatttgcgtccggaatctttgctccgtagtaataatgaagcagatatccgccgtcgaacagtgaaattatgtaggaagacgacgcggtatcaagcttgaagacttttttgtcctctaaaaatttgattggcatagtacacctctcatgttatgatttgtcgttcatattatgccataatccgcggctctttgcaatagttttgtgaaaattcagccgacaatgttaactccgcatacataactacaggcgtaacgcagaaattttcacaaaaaatgttgattattctctcatattttgctataattcatagaagcgaggaaacttatgatagaaatgtgaggtttccttattacttcggaggaagacgatgaaggtattctttgaaaacggcacgtttgtacgcgatgaattctgctccgttcgcgaacaatacgagcttgacggcgttactcttacggctgtgcgcggagaatggcacggaaacaaggctcttgacagcgaatgcggagcggaaataggcatgactcccgacggcgaattcacttacatggcagacgtaaggcattcggaattctggtgctctccgagattcggaaaaagcggcgattacactcaggttgacgaatgtcagtattttgtttataaaaggccggacggcgtgttcggagttatcgtacccgttgtgtcagaggattacaaatgcattcttgtcggacgcggcgaaaaactggcggctcgtcttttttcatggaaggacggacttaaggaatgcgacactctcgcctgtgttaccgctgagggagacgacccgctttatctgaccgagctgtgcgttcgtcttgccgtaaagctgctcggacgtgcaattccgctgagacgcgacaagaggtatcctactgtgttcgagtatctcggatggtgcagctgggacgcacttcagattcgtgtgagcgagcgtggacttgtcgagaaatgcgaggagctgaaaaagaaggacatcccgataaaatgggcgataatcgacgatatgtgggcggaggtcagcgaatttcccggcaaataccgcacgaggaaggatatgttcgcgctgatgcattcctcccacctgtacgactacgaggcggcgaaggatcgtttcccgatgggactaagccatgcgatagagaagatgcactcctacggcatgaaggtgggaatatggcacccgactaccggttactggaggggacttgacccgaacggcaaggcatacgaaaagctgaaaaatttcacctacaccacgcccgacggaatgataatcggaaactggcgcgagggagcttcattcaggtactacgacgcgatacactccttcctgcgcgaatgcggagcggattttgtcaaggtggacaaccagagcatgacccgccgattctacaaaggtcttgacagtgtgggaaaggttacgcggagctggcacagaggtcttgaaggctcggtaggactgaacttcgacaacaccatgataaactgcatgggcatggcgtcggaggatatgtggaaccgcggttacagcagcgtatgtcgtgcgagcgatgattttcagccggaggacagagcatggttcgccaagcacattctccagtgtacctacaacagtatgctgcaaggacagttctactggagcgactacgatatgtactggacggacgacacgcaggcggagaaaaacagtctcctgagagcagtgtccggcggaccaatatatgtgagcgacgagataggcagaaccagaggtgaaattctcgctccccttgcgtttggagacggaaagattctgcgctgcgacagagtgggaacaccgacagcagactgcctgacatccgaccccgaggacagcggcgccccgataaaaatccagaacactgtaggcggcagcggagttatcgcggtattcaacatcgacagaaacaactcccccgtctcgggaagcataaagccgtcggacgtatcgggtataaagaaagcggagcagtacgtactctacgagcatttcagccgtgagatgaagataatcggcgcggacgaagctgtggagatatctctcgagaacaacgacgagttcaggctgtacctcatcatcccctacgaaaacggattcgcaccaatcggacgtgtggacaaattcgtctcccctgccgcaatcactcacgtctcaggagaagaagtcgagctttacgagagcggagagtacggctatataaaagacggagaattgtgcattaagaatttataatcggttttgcgctgattctcgcacatatttcaaactgaatacaacaataatcggttgttttgtcgttatattcgacttcagccgattttgtttttcaggtgggaataaaaaaatcaaaaaaatctcaaaaaactttctaaaaactattgacaaaggatggagggtgtggtataatatcaaacgtcgacgggagataaacaaaacctcctaaagacaaggtggaaagaagaaattcaaatccacaaaggtatggaagcatatgcccagcaactgagctatgcatccgaaacctatttcatatggaagcatagctcagttgggagagcatctgccttacaagcagagggtcataggttcgagccctattgtttccatcgcgcttggcaacagctttgcgcatggcctggtagttcagttggttagaacgctagcctgtcacgctagaggtcaggggttcgaatccccttcaggtcgttgattccggaagaaattcggagtcaggttaatatgcctctgtagctcagttggtagagcaggggattgaaaattcccgtgtcgttggttcaattccgaccggaggcatatgcggatttagctcatttggtagagcgcaaccttgccaaggttgaggtggcgggtccgagccccgtaatccgcttaaggatggtagtgataagctccatccttttttcgttttataggaagttttgcgggagagggtttgttcaaagacattttcgcgggcatttatttaaggaagcctttgcgagaggatatttccgcggacagcttttgatgaagacttcatgagaagaaaatcctgtaggcagttttgcggatgagatttaaaagcacttcccttccgtgcaaaattttctacgagtttcttcctattaatattatatacgaggttacggcaatgcagataagtcagtttttcatgagcggggacatcaagggtgcaattgcatatatgcgcgagcacgaggagttcaaagatgttctttcggcgtacactgcgattttcgaggattgcaagtaccgcacgtatgatgtaccggacatacttaacgaaatcctgcgtctatatcagatttactaccgtgacgtgttctactgcggaatatcggaagctgacgctgcggacaaactgctggcacagctcaaagctctcatggaaatgcctgacgcggacgaagagcatctcaccgagcggctgaaatccgtgtttgcagagaacggctgtcacgcgcttttcggaaaaactcagggatattacggtccttacgtctggcgtgaaactgttccgacggtctacagtgtcgagcttccgaacgaggtcgctaaatacaaagtcaatatcttaaagggattcgtgttcaggagctggatggactatctcaccatcggcaggtacggaacgagcggatgggcttcccccgacggagtaataaactgcatcgagcaggcgtatgactttgaaagcgagcggtttcttgtctcactgctaaagcacgaagcgcagcataccgtcgacatgaagcgtttcccgagcatcactcccgcggagcttgaataccgtgcaaaacttgttgagctgcattactcgagcgacataggactgctgcaaaagttcatatcggaagcggacgagaacagagtgggagacagtcacgcggcggcttctgcgaaaatcaagcgtgaatttgcggacacagacgaaacgtctctcgaatgcattcagtcgcgggcgatagagctgctacgggagagcacgaaagaaatggaagaaaaatattcccctgcgccgtaataaacgagaaaaacagtatgactgcgaaagccacactgttttatttttatattcggttagcgtaatatctccgttccaattgagtcgacaattgttgatacgagactgggcactctatcggtcagggtgtctacaataatattttcctctgggattggtaaagcatagagtttgtttatgagttcaattttcttctcgacgtcggaagcactgaactgctgagcctttaagtcattgtagaccttattgtagaagtctatcagcttttggtttgtgtcttctctttcgcgcactattgtgctgatggcttcggcttttgcttttcccgctatatctccgggacttccgcagtcaccggcgtctccgcttggaatttccgtgacattaaaaatcgcatctttgatgtactgcgtgtcgtcgagtatcttcttcatgcactgcattacgctctcgatggtatactggctgttttcttccgatatattctctatattctcggtattgattctttcgtccattttatatccttccgtatctgtatattcatgcgcgtcttcggaaggcaggagcgttattctgttttcatcggtgaatcgcgctctgccttttttaacgagaccttttgcgcgtttttcgtatgttctgccgattatcttcccgcttgaatctactacttcgattttcagtgaagcgggagaggtattgtttgtcatgggaaccctcccctattcagttatttcagccgccgttttttgttatgggtgtctccccagggcttattttcattatatcataccgtattcaccttgtcaagcggtgttttgttgtgtagtatagtcgtttacttcatgctttatatatggtataatagaaaagatttttctactattattatataacggagcttaatgatggatcagcaaaaagaaaacaaaatggggtatatgccgatgtggcagctcattgtctcgatgtcgcttcccatggtcatagcgatgctcgttcaggcgtgctacaacatcgtagacagcatttacatatcccgctacagtgacgccgctcttgccgcagtttcatatgcgttccccgcacagaacctgatgataggctgcgctaccggtatcggagtcggtgtaaactccctgctctcacgctcactcggcgagaaaaactacaaaagagcaaaccggtgcgccggaaacggacttattctcgcacttttcggatatctcatctttctcgtgttcggtctgttcttcgccggatggttcatttcgttccagacgagcaccgctgacataatcgagtatggtcgagaatatctttcggtatgttgtgtgttctccttcggtatcttcggcgagattctgtttgagcgtctcatgcaggcgacgggaagaacgcttctcacgatgttcactcagggtatcggcgcgatagtcaatatactgctcgaccccgtgttcatcttcggctacttcggacttcccgcaatgggagctaaaggcgcggctatcgctacagtcctcggtcagataatcgcattcatcatcgctgccattctcaaccacacgaaaaacctcgaggtaaaactcacccgcgacgcttttcatcttgagagagacattgtcggaagaattcttgaagtcggcataccgtccatactcatggtaggcataggctcgctcatgacgacgggtatgaacaaaatcctgaacaaattctccgaccttgccgttaccgtattcggcgtatacttcaagctgcagagctttgcattcatgcccgtattcggtctgaacaacggcgttatcccggttatagcgttcaactacggcgcgggtcacaagaagaggatgatttccgccgtaaaaatcgcctgcattatcgcgaccggcttcatgtgcattgggcttattataatgcagatattccccgcgcaggctcttctgctctttgacgcaaacgaggaaatgctctctataggcgttcccgcactccgcaccatcagcctcagcttcattttcgccggagtatgcatcgcgctctcgtccgtatttcaggctctcggtcacggcaaatactccgcgatagtttccgcagcgcgccagcttctcattctcctccccgtggcgtacctcttctctctcacgggaaagctcgagcttgtatggctgtcattccccatagcagagcttatgtcaatcacggtaagccttgcgctgtacatcaggatttacaagaaagtaatcaaaggtttacctgactgacgtcaaaacttatacaacaattacaatctccgctctttacgggcggtttttgtttgtctaaaatttgcgttgatttatctctccgattaagatataataactgagtattgtgatttttatcacaaattttgtccgtattacattttatttaggagaaaaatatgaaacgttattttgcgctgatacttgccgcgctgcttctcatgccgacaattgtttcctgctcacagaacggctccgaagaaacaaagggagcggaaaccacagccgacaccgccgcgactgccgactccgagtctgaaaccgaagacgaaaccgacgacggcaacattcgctcatgggaaggacttacctttgacggagcggagattaacattgtcggacgcacggaagcaacatacgccatcgacttctacgccgaagagataacaggtgaagctgtcaacgacgccgtgtacaacagaaacgcaaaggttgacaacgacctcgccgtacagctgaactatatcaacggctccgacgactacaacacattcttcacaaatgtcagaaacagcgtgagtgccgccgacggtgcatacgatatcgtatcgtcctacgcatactatgccgctcccctctcacttgagaagctgttcaagaacctccacaccgtaccgaacctcgcgctcacaaattcgtggtacaaccagagctttgtaaacgacatgacggtaaacggtcagctcgatttcgttataggcgacctcaccctcaccgcgaccgacagaatgataatcacattcttcaacaaggagcaggcgcagagatggattccggacacagacctctacaatgacgtatacgaaggcaagtggaccgtcgactacctcgcaactcttgtctcgaacatatgggaagacaaaaacggcaacggcaagattgaccccgccgacgtattcggtctgtcataccagctaggctccgttccgaccgacggtatgataacggctctcggcgtacacatggtcgacaaggacgctgacggaaacctctacatcaacctttataatgaacactccaacaccgcgtttgaaaaactcattaaccttgtatacaacacatccggcgtaggtcaaagcatgaatgacgcgttcaagaacggaaacgtactgttcgttatggaatgcgctaactacgctaaataccagctacgcgacttcgaccccgactacggcgtacttcccctcccgaagctcgacgagacacaggaaaaatatctcacgactgctcaggacgcctatgacgtgctatccatccccacaacctgcaagaacctcgaagcaacgggcgcgtcccttgaatacctctcagccctctcgcagagcgacgtttatcccgcatactttgagactaccttccagaagcagtacatgagaagcgaagaagactccgtaatgttcgacctcatcaagagcggacttgagttcaacttcggcacattctactcaaactgcatcggcaaccccgtatggacattccgcgacagcatttccaacaaccgcagcttcacctccgaatacaagaagatggctaaggtttacgaaaagacgctgaagaagttcacagaagcaatggcggaaagagctgaagccgaataaaaaagctccagcgtcgatgttttgtcatcgcacagaagcctatattattaccggactgtatgtattatttcatgccgtccggtttttgtttttcttcttcgagtatctcgagtttacgcatgattttcttttggttttcgagaaccaaatcaagctttttgtgaaggtcgtcgataataagctcgtttttgaggtttatacggtagtcgttctccgctcttttcctgtcttttgcttcctgacggttctgactcatcataatgaggggcgcctgaacagcagctatacatgacagaacaaggttgagcaggatgaacggatatccgtcgaacgcgtttgccgcaagaacgatgtttacaaccatccatattaccatcaccgcgataaagctgaaaataaatgcccagcttccggcaaatttagcgacagcgtcggacgccttctgcccgagcgacagcttttcgtccttgtcggtattttttgtgacctctgttgcgataagctgatgaataagctcctcatcggtaaattccttatcggtaacgtcaagaagctcttttattacttttctgcgttctttttcgtttttcataagaatgctccaatgtttgtttacgttctgttgtagctgccgaggtagcagaattcctcgcagtagtcgccgattgtggacataagctcagcgaatctgtcggagtaaacctgcgtctcgaagtcgaggaagaagcggaattcaaagtccctgccctctatcggacgggatattatgcttgtcagatttatgccgagagctgagaaacgtgagagaaccttgaaaagcgcgccgggcttatttgctgtcgtgagcatgacggtggttttgtccgctccgggatatatgcgcggctctttcgacaggcatatgaagcgtgtgtagttgtttgcgttgtcgtggatatccttcgcgagcggaacaaggtcgtatatcttcgcgcagtctcttgatgctatcgcggcgacatcgtccctgccggattctttaacatatcttgcggcggcggctgtgttcgggaggtacgttatcttctttccgccgagagactcgatatatcccgcgcactggtgtatagcctgctcatgggatacgatttcctttacggaatcaagcgtagctccgcggtttgcgagaagagaatgctctattttcagcttgaccgaacggcagatgtaaagtccgcacgtctcaagctccttgaacacgtctcccacaactcccgcggtgctgttttctatcggaagaacgccgaactcagtgtagccggtctttaccgcgcggataacgtccccgaacgccttcacaaactgtatgtcgggtgagaggaacattcgtcttgccgcggaagctgagtatgctccgtcaatgccctgacaagccacaagtgcgctctcggggaaaagtcgcggtgttgagtctatcgcgtgcgttatctcgtcgtacagcttgcttttcggcttgatgaggctgttctgatactcgcgcgacagctcaaacaggagggaataaagctcctttgtgtacgctcccatgtcttctccggcagtttcggcagcagttttagcaacagcttcgagcttgttttcttcccgaaccgcgtcgtacaccggaagtccgttctgctttttgtattcgcctatcgcagccgcggctttcattctgtccgtgaagccatttatcagcatttcatcggctgaatctatcttttttcgcagttcactgagattttcttccatatgagtttgacctttctattcctttgccgcctcggctgaatccgtgagcttaggcttgaaccagttcttttcaaattttatcgcgatataacctatgacagacgacacaagcgcgccgagagcgtcaacgattatatccttcattgtatcccgcagagcgtcgtgtcctacaagctgagttccgtccgctgtcatgaacttctgcatattaagtcccagcagtccgtcgaacgagaactcgtatatctcccacagcgagcctatcgtcaccgagaaggtaaacgcaaagagcgcgatgaaaaacggcgacagcttcaccactacatgctcgtctcggttgaggatgtacactaccatcaaaccgaaaaatcccgtcatcatactgctcatagtgtggagaatattgtcccatccgggaattacatagtaaaagctgcgcacttctccgagaaatatcgcgcagtagagaaatacgatgtagaaggtatacagcagcgcgggtatctcaaacttgaactttttcgagagaagcgtcggtatgtttatgacaaggcatccgagcaggcactcgactatcataagaatatagtccgcgtgggaatggtatccggcttcgttttcgctcacgctgtcggagaagaacaccattcgtattacaatataaataatggggagaacaaagctcgcgagagttaaggcgtacatgattttgtttcgtctgactgccacggcttctctttctgcggcggtaagtgtatgcgcgttctttttcatatatttatcctcgctcagtcaaatatagctcttgtcagctcttcggagtcggttttgtatatcgttccgtcaaatctgccgagagcttttttcacagattccggagtaaaatcacatcccacaagcgcgttttctatatcctccgcgtcaacgccggagaaaaagtcgccttttattcccgcgcttgtgattttgccgtggtatacggaatatcccacagtaaaagttcccgcggagatatggaatgtcttctctatatcaaatttcggagcggcggcatagataaattcctctcccgcaaatctctcccgcgctatctcggaaattctctcgcggtcgccgtctgtcagggagtattcaccgtccgtcagcttttctactattatgtcgcggaactcttcgctcgttacttttttgtcatgtggcagatgctccgatatgttcgtgacgcgctgtcttaccgatgcgagagcctttgactcaatcttatacggattcggcgtggacgagcgcacaagagcgtcaatatcggtggaaaacagcagcgagccgtgatgcacagtcatgccgcccgccttgtactgcgtattgccgctgacttttttgccgtccaccgtgatgtcgttccgtcccgtgagagccgcgtcgcacccgagctgccctaaaatatcaacaatggggtcgataaatctgccaaactctatctcgatgccgctcgactttgtgatgtaggaaaactgccagccgcccatgtccgtatatatgcatcctccgccggagagccgtcttgcaaccgtaatgccgtgctcccgtgcgtaagctgcgtcgatttcctcaagagtgttctggaatttgcctatcatcagcgtcggagtggtgcgccatatcataaaaacatcgtcgtccatgatatgctcacgcgcaaaataatactccgcggcgaagttatagaacacgtccgttgagcctgtattcacatatatcatgtggactttaccccctccaaagcctccgccgcaaggtatgagcttctgacaaggggcgcgctgacgacgtactttatgccggctgcgagagctttcttcttgtagttctcaaattcctcaggggtaacgtatcttttgagcggataatgtttgctcgacggctgtagatactggcttatcacaagaatgtcgcagtttatcctatgtaaatccgagaaaaccgcgtcaagctcttcgtcgttctcacccagtccgagcattattccagttttggtgaacgacgtgccgtattccttcgcgcgggacagcacctcgagagaacgcgtatatacagctcccggtctgacgtcattgtaaagcgaaggcacagtctcgatattgtggttcagcacgtccggtttttcagccataacggtgtcaagcgcggtactgtcccccttgaagtcggagataagcacctcgaccgtcactcccgggcaggtccttctcacctcacgaataacatccgcgaaaacggaagctccgccgtcgggtaagtcgtcacgtgtcacgcaggtcactacaacatggcgcagtccaagctcaagtgcggctttcgctatctttttcggctcgtctatatcgggtgcggtaagctctcctgcctttgcgtggggaacgtcacagaaagcacagttccgcgtacactttgagccgagtatcatgaacgttgcagtcttgtgcctgtagcaggttccgaggttcggacagctcgcgcttgtgcatacggtgttcagtcccagctttgacatgagcgaggctacctcgtttgtttccgcggcgttgtagcgcactctcagccactccggttttcttttgtcaggcatattactctccgtcggcttctgcgtaggctactacctgacctacgggaacatcgtctccttcttccgcttcgagcgagactatcttcatgtcgtgcatagcctcgatttcgctcactaccttgtcggtttcaacttcaaataaaacgtctccgctcttaacctcgtctccgggcttcacgcaccatgtacacagcacgccggacttcatctcggggcgaagcgcgggcattgttatctcgactttcataattatttctgcctttcagtcaaaaatatcttttatcagcatttctgccgtgtctgtatcgtatttttcttctaaaagagataaaatttcgctcggtatgagtctcctgccgacgagaaagtcaaatccttcccctgccgacagcaccactccgtttttcgcgctcagtgtaacgtgctctccgtgaagagcaaacaagggagagcgaccgcagttccactcccaagtgcggtatttttcccccgccaaagactctattgccatgacttcatcgggagtaaaattccttatttcgtccgagagtgcgtctccgagctttttttcaaattcttctacagttgtaccttgcggaataaaatcggaaatgttgccgacaggagcgggattgcttttcacagccttcgacactgttttttccctcgcgtgagaggtcagtgacgacagggcagttatatccgcgtcaaagagaagagttccgtgatgcattacccttccccgatgcacggactgagcgtttccgctgactttttttccgtttaccgtgatgtcgaacgcctctcccatctccgccggtactccgagagagcgcagaaattcgactacgggagtgagaaaccgcgcatagtccgtccgctctcccatgtcggagaaaaaggagaaattcacgtttccgaggtcgtgatataccgttccgccgccgctgttccgcctgaatatcggtgtacagtgcttttcgcattcgagaatggaaacctcgccgtacacgttctgattcttgccgacaataacggacctctccccgcgccacagcatgagaaagtcgcctgacgtgaggttttcaaggatgaactgttcagccgcgagacagaacgacgggtcatgcgacggattttttataagcgtcattttttaatcgggatttctctcgccgagcactacgcggtacttctgatagaagctctcgtagtagtccccgtcaagtgcgtcgcgaatcttctgcataagctcgttgtagaaatacaggttgtggataaccgcaagacgcattccgagagcttcctttgccttgataaggtgacggatgtacgctctggagtggtgtctgcaagccggacagccgcagttttcgtcgatcgggcgcgggtcgttcatgtatttctcgttgagcaggttcatctttccgttccatgtgaagaggttgccgtgacgcgcgtttctggacggcattacgcagtcgaagaagtcaactccgcggtgtacgccttcgacaatgttctgcggtgttcccactcccatgaggtatctcggcttgtccttcggcatatacggctctacggcttcgattatgcggtacatttcctcggtttcttcacctacagcaagtccgcctatagcatatccgtcggtgtcaagctcgcgtatctgctccatgtggcggattctgaggtcggcgtatgtgcttccctgattgattccgaacagcatctggtgcgggttgacagtgtcttcaagtccgttcagtctgttcagctctgtcttgcagcggagaagccagcgtgtggttctgtcgcaagaatttttaacatagttgtattcggcggggttctctatgcattcgtcaaacgccatagctatggttgagccgaggtgcgactgaatctgcatcgactgctcgggtcccatgaaaatgcgctttccgtcaatgtgggacgcgaagtaaacgccctcttccttgattctgcggaggcttgcgagtgagaacacctggaatccgccgctgtccgtaagtgtgggtctgtcccatccggtaaacttttgcagtcctccgaggtcgtggatgagcttgtctcccggacggatgtgaaggtggtacgtgtttgagagcattacctgacagttcacttcctttaagtcgaaggctgacaaaccgccctttatggcagcgcaggttgcgacgttcatgaacacgggagtttcaatagttccgtgaggggtaatgagcctgcctcgtctggcacagctctgcggatcggttttatcgagaacaaacattttttacctctgtttaataatattattatatgcagtcatcttccgaactggcggtcgatggacgatttttttatttcaaatgcaacggggcgtccgtgcgggcaggttcttatcacgctcgagcctttttcgggagtcatgagaagcctatcgcatatccattttatgtgagccatgtcgtacactctgccgccctttatcgcagcc

SEQ ID NO: 83 - DNA, 10119 bp, Unknown
  16S sequences of unknown bacteria
gacgcctgggcggcaggcgcgaaggcggcgaacccggatgctaccgtgcaggtcgcctgggtcaatagctggtacgatcctgcaggcgataaggagtgcgcaaactccctgctgcagaaggggattaagtgcctgggctatcacggttctacgacggctgtcgcgcaggctgcgcaagaagctggcgcatactgcaccggtttccacattgatatgcacgactacgcaccgaaggctgtcctgacttccttctgctggaactggacgccgatcttcaatgaaatcattactagcatcgcaacggattccttcactaacgacgtgaagtacgccaacatggcggacggcgctgcaaccatcgcaccgtggaacacggacattatgcccgaggacgtagtcgcaaagtgtgacgagatgaagcaaaagatcatcaatggagaatacaccgttatggctggaccgctgtctgataacaagggcaacgagctactgaaggacggcgaaaccttcaccctggagcagttgatcgactgctactggctgctggacaacgtcattggcgatctgccctagtaagataagacggaaaacttcctataagactggagtaagcgtgcttttcgcatgaagtaactccctaagcgggaagcacattagcaaatgggagaaatacatcgtgtatttctcccatttcgtacacctgtaaacggcaattctatctgagtgcgcaatgtattagctttttcgtttgtatgtggatttacggtgctgacgcagcaaaaaagaattcgacgagccaaatagagtacaatgaactattagaaaggagacgacaatgaaaaaactgattgcattattgatggtgatcgccatggcagcctgcctgtttgtgggctgtgacaagaacgacaagcagggttctgatgcaccgcaaggtggaggagacgttgggaccacacagagcggcggcaatgatggcggctctgacgaagcagattacagcaagataaaaatcggtatgttattgaacactcccgtcactgatggtggctggagtcaggcaatggcggagtctatggaacgcagtaaggcggagttgggcttaaaggacaaccaggtcatcattgtagaatctgttcccgatggtagcgcggaggccgatgcgacaattgtacagcttcttgatgagggttgcaacttgatcattggtgcttcctccagttttgctgtcaacatcaatgctgcagcgcagcagtaccccgatgtttacttcacccagtttgagggccagtctggcgacaactactgctccttcacctgctgggacattgaagcaatcttcatgtgtggctatgcagctgctctgatgagcgatggcaatgagctcggctttgtcgcagcgcagccgcaggcttctgttgtccgtgccatagacgcctgggcggcaggcgcgaaggcggcgaacccggatgctaccgtgcaggtcgcctgggtcaatagctggtacgatcctgcaggcgataaggagtgcgcaaactccctgctgcagaaggggattaagtgcctgggctatcacggttctacgacggctgtcgcgcaggctgcgcaagaagctggcgcatactgcaccggtttccacattgatatgcacgactacgcaccgaaggctgtcctgacttccttctgctggaactggacgccgatcttcaatgaaatcattactagcatcgcaacggattccttcactaacgacgtgaagtacgccaacatggcggacggcgctgcaaccatcgcaccgtggaacacggacattatgcccgaggatgtgattgcaaagtgtgacgaaatgaaggataagatcgtgaatggagaatataccgttatggctggcccgctgtctgataacaagggcaacgagctactgaaggacggcgaaaccttcaacctggagcagttaatcgactgctactggctgctggataacgtcattggcgatctgccctagccggaaggtgtactggtaggcccaaagaactgcaagacggaaatttgatgattctgtagtaagcctgcaacttgattgacgaagtccctgtgcaggaggtgcataggtagaatttgggagaaacatgcctcatgtttctccctttttaccaatgtgacgtatgcaggagaagagactgtggttctcgaaatgtgtataacattgtcatacttcggcaatacagaatgcagtacacggatgctaaagtgcggcataaaaagcgatagttacaccgagttgtccaatttttgattgaaaaacatgaaaaaatttcttcagggtattccctttgcgagggagttgtggtagaataatggtgtaaaagagcatcttcgtaatacatatgctgtggatgcgaaatagttgtatttattctgaatgtacaatttttgtttttttgagtatctggaggtgaaagcacaaaaaatatcttttttctcaagtttgatgtgtatattttgggtggagtctgatttataaattgtacgcattgccgaaaagtgcgatgctgtgaccgtcgccggctggaatctgcacgatcagatatgctagccttgccgtgcagaatttttaatctgcggcgcggcgtatgaagtgaaaaaatcatgatgcgaatactgagcttgacgaagcatagcgcacggtgtttaccgtgcaaatactggaacacatgaggacaaatttatgaaaaaagagtttatttccgtcggtaaaaacatggagaaattcgactcctatgataaagttaccggcaaggcaacgtatgtcgccgacatgcatctgcctggcatgctgcacggcaaaatcctacacagcacacatgcccatgcactgattaaatcgattgacgtcagcaaggcgcgcgcacttcccggcgtgcatgccgttctgacagcagcagacgtgcctcagattccgtactctggttgcggccatccgatgccgtatgacacgccgttggacatgcggattctaacgaatcatccccgctatgttggcgacgccattggtgctgtcgctgcagagacggatgatatcgcagaagaggcactgcgcttgatcgaagtcgaatacgaagatctacccttctacacagatccggaggccgcaatggcggacgacgcgtatctaatccacgaagggcacaagaataacatttgtgaccagcacggctttgaaatcggcaatgttgatgaggcgtttgccaaagcggatatcatcgttgaagatgaattccgggtgccaattgttacccactgccagattgaaaaccatgtttccatctgtgatattgatcatcgaggccggttgaccttttatgtctctaatcaggtccccagcattatgcgcgagcgtctttccaagattctcggcctgcggccccgggatgtccatatcatcaagaaaacactgggcggtggcttcggcggcaagcaggagccggtctatgagcccatcaatggctgcctgacaatggcgacaaagcgccccgtcatcctcgatctgtcgaaggaagaaaccctaacaacgacgcggacccgccacagcggcatttaccggatgcgcactggcctcatgaaggacggcaccatcatcgccagagagcagcttgtcatccataacactggcgcgtattcctcccacgggcacaacgtcctgggtaacgttagcggtcagtttggccaggtctacccctgcccgaacctgcgctgggatggcaagacggtctatacaaatatcccgattggcgctgcaatgcggggctatggtattccgcagcaggcatttgtgaccgagtgccatacagataatattgctaagcgccttggcgttgatccgctgcagttccgtctgcagcatatgcgcaagctgggcgatgagccatacggcgataacccgaatatgtccagcgcgctgccggaaatcattgcgtggggacggaagcagattggctatgacgagtttatgaaactgcctaagcaggaaggcaacatccgtcggggcatcggcatggcaattgccagttatggccagagctgctatccccacagtgtggagctatcctccgcacggattaccatgcacgaggattcctcctgcacgctgtctgtcggctgctgcgagttgggacagggcagtaatacggcgatggcgcagatcgcttcagaagccatgggtgtccccttacatatgattgaagtcaacgaaggcgacacggacattgccacatttgacgtcggtgcctatgcatcccgtcaaacctatgtcgcgggcactgcggtcaagaaggctggcttgaagattaaagccattgttttggaccgcgcttccgagatgctgcatcgggatgctgatcgcctggatacctacaatggctatgtggttgatgcagagacgttagagcagttgattcccattgcggatgtcgcgtatgattgctattataaccgcggcaagtttgccgatgcgtgcatgatgattgaggccaatgcctcccattgcccaacgacccagggcttgacctatgtctgtgggttcgcggaggtagaggtcgatatggaaacaggttatgtcaatctgaagaaattctatacctcctgcgactgcggcacgctgattaacccgctggcggcaaaatgccagttgaccggcggcagcatcatggcctgcggctatggcttgacagaacaggttctgatcgacgacaagtctggccgcgtgctcaatggcaatatgctggattacaaggtctttacatttgctgatctgccggatctgcaggcacactttgtcgagtccaacgaaccctccagcgcctatggcaacaaggccctgggcgaaccgcccatgcatacagctgcaccggcaattcggaatgcagtcctgaatgctacgggcattgccatcaaccagaacccgctgacgccggagcgtgtgttcctggcgattcaggcagccaaagcaaaggaggcggaataatatgtacggtgtcgataaattatacatcccgcagacgctggaggaagcgctgcagatcttggaccgggacccggaggtcatgcctctggctggtggtacggatattctggtcaagatgcggcataaggccctgaaaggggtcaagctgatgagcacagaaaagctggaagcgctcaaaggcgtccgggaacgcgaagatggcgtgatcgagatcggcgcttcctgtaccttcaccttccttgcaaataacgagatcatctgccgccggattccgatgatccggaccgcaggccttgccatgggcggcccgcagatccagaacgtggcgaccatcggcggcaacgtcagcaacggcgcgacctctgcggacagcgcaccctccctgtttgcacttgatgcgatcctgatcctgcacagcgtgcggggtgtccgccgggtgccgattcaggaattctacgcaggccccggccgggtcaagaaggagccgggcgagctgctggtctgcatcgagatcccccacgcggggacgacgaactggggcggcatgtatatcaaatccagtgtgcgtaaggcaatggatatttcgaccttgggcgccgctgcgacctgccagctgaatgcggacgggaccgtagctgcggcaagcattgccttgggcgtcgccggtccgacgccgctgcgctgcccggacgcggaagcgttcctggtcggcaaggtccccacagaagcaatgatggaagaggttgcggacctcgtcctgcaggcgacgaatcctcgtacgtcctggcgtgcttccaaggaattccgtattggcttgatccgtgctctgtccacgcgggcctttatgggcgcatatgcagcagcgaaaggagaagcaaaatgatccagatttcttgtaccatcaatcataaaccggtccaggtcgaagtcgaagaaggcgagaccttgatggcgatgctgcgcgaccgcctgggcctgacgggcaccaagcgcggctgcgaggtcggcgaatgcggcgcttgcaccgtcctggtggacggcgtgccgacggatacctgcttgttcctggcgggcttggccgatgggaaggatatcctgaccattgaaggcctggccaacggcctggagctgagccccatccagcaggcgtttgtcgactgcggcgcgatccagtgcggcttctgcacgccgggcatggttctgtccgcctatgcgctgattttgcgcaaccatcgccccagcggcgaggaaatcagaaagagtctctccggcaacttctgccgctgctctgcctatgtgcagatcattgatgcggtccagaccgcggcagtccagatgttccccgagggctaatgtttccgctatgcggaaataaataataaaggagagcaattcaaatgagcaagaagctaattaaaaatgcagaagccattatcacctgcgatgcgcaggatcggctgctgcggggctgggatattctcattgacggcaacaagatcgtcaagattgccgagaatatctcctgtgaagacgcagaagtgatcgacgccaagggtaaattcgtctaccccggcctcatcaacacgcaccatcatctgctgcaggcattcacccggaacatcccctgcatccagaaggcggagctgtttgattggctgctgtatctgtacaatgtgtgggaaaaggtcaacccggagtacatttactacagctccatggttgccatgggcgaattcgtcaagtacggcggcacgacgctgtttgaccatcacttcgcattcccccgcagctctgacaagcacatcatcgaccggcagtttgatgttgccgatgagatgggtgtccgcttccactccggccgcagctgcttcacccgcggcaaggaccagggcggtctgcctcccatggagctgatcgagacgacggacgagacgctgcaggactgcgagcgcctcatcaagaaattccacgatcccagcgaattctccatgcgtcaggtcgcggtcgcgccgtgctctccgttctcggtcgataccgaggtcatggtcgagagtgcgaagctggcccggaagtatggcgtgcgcctgcatacgcatctgtgcgagaccctcgacgaagagaagtactgcctggaagtctacggcgaccgtccgctggactgggccgagaagtgcggctggatgggaccggatgtttggttcgcccatggtatccacttcaccgacgaagaagtcaagcgcctggcagagacgggcaccggtgttgcgcataacccggtctccaacatgaagctctcctctggtatctgcaaggtcccgctgatgctggagctgggcgtcccggtcggcctggctgtcgatggcaacggctccaatgacgccagcaacctgctcaacgagatccgcatctgctacctgctgcaccgcctgaacaacagcaagacggcgcccaccggctatgagatcctgaagctggccaccaccggctctgccaaggtcctgggccgcagcgacatcggcatgctggcagaaggcaaggctgccgacctgttcatgatcgatgtcaacaagttggactttgtcggcgcgctgctggacccgatgtgcctgctgggcaccgtcggctacacccagtatgtcgatatgacgatgatcaacggcaaggtggttttcaaggacggccgtctgcagaccatcgacgaagagaagatccgcgacgaggcgaagaaggtcgtcgccaaggtttacgaagatctgccgtaatttctacacatcataataaaacctccctgcgcggcgcttgcaccgtgcagggaggaaaacccgccggaagcgacggtttcgccagcggctgcaggccggtggcgtgttttcattcattgcaaaggagatagataccatgcgtttgattcccattgccggtttttgcggcgcaggcaaaagcttagctaccttgcgattggcgctgcagatgcagcagaacggcgaaagcgtctgcatctgcctggaccgggagaaccccatcacccgtgccctggtggaggaatataagattaaagcctttacggggaagcccgaggagatccagggatatgagaatgtcatctgtgagtgctacgggctggataccggcaacaaggcaaagctgatggccaccggctgccaggtcgcgcccatgacggttgttgtcgatccggcgcggctgcatatgatggcggcctacggtgcgatgaccctgaacagccgggcgtataacgatatcattgcagcccagctcaaggaggccgatatcgttctgctgtcgcacgcggatctggacccggcgtctgacgcggtcaaggcgatgatcacagcagtggccccaaatgcgaagcagatcgccttttctgccaagaacggccagggatatgacgaatgggccgaggcgctgaagggagaagctgcgcctgcgccggaaatcgcgcctgtcgaggcggagattgcccgctatgactgcagcctgcatatcgcagcgccccagggcattttcccggataaattcctgaacaagctggcccataagacccgggaggcgctttcctctttgccggtgccgctggcaagcttccagtgctgcaccatctcggaggaaggcctggccattgctgggtgcactgatctaaacggcgtaatccgcgaggatcggctggtcaatctgtgctccatcgcctgtgagctgcacattcagctggcaggcaactgtgatcgggaattcctgtgcgacgtgatgtacgacgcgatccagcatactgccacagcgatggaacagggcatcaccgttgttggaaaatttcccagcgtgtgggacgatgaggacgagaactgaccttttccccaataaaaagcaaaatacgggggcactgtggctacgcagtgcctccgtttgcatcatgcggaatcttgaatgagatctgcttacctcgaaacggtatcgaagcgatatttttggcggacttggggatactttttatggtccacctcggagagaaacatctctagcggacggacgtagagttgccggtcgccatagcgggcgcggtagaccatcattgcgtccccgctctctgagtgggttgcgacaccgatgatatcataccggtagagctccggctgttcggccaagagggtgggcgattgcagcgttcttttaaaatgctggacgatatcgccgggctgaaaacgatgctgtgtcatgttccgtacctccttgtagttgggcctgtgggtctggccctgacgatattgtagcagaattttttgcctgtgaaaagcataagttataaaaaatagctggaatctggggaaaaatcgtggtataatagccaaaaattaagcggatgtatcgcgaggttcgcaggctactgcaaaaaaggcggcgtgcggctcggatgcagcgcgtaaatacaagaaaggggaattcctatgaatttttttgatgtggtgcaagacagaagaagtatccggcaatatgtcgccgatgaggacattccgcagaccaatgtggagctgatgctggaggcggcaatgctggcccccagcgcgtgcaatacgcggccgtggtcgttttatgtgatctcgaaccgggcggtacgtatggagctggcggagctgcatccctatgcagcgcatctgaagcaagcgccgctgggcatcgtggtctgcgcccagccggagaagcagaagggcatcagcgctggcttctggccgcaggattgcggcgcggccattgagaatctgctgctggaggcggtcaatctgggatatggtgcttgctggtgcgggatttatccctctctgcagggcgagaagctggaaaaaatccagcagctgctgggaacggacgagatccccgtggcgctcgtcaccgttggtgtcccggatgaagaacccaaccgccgcggctattacgacccggctgcggtgcattatatccgttgagcgcagataaagagaaaaccgcggatcctctggcgagatggccggaggatccgcggaatttttttggctctatgtcaatagttggggtagagacaaaacgcaaataattgggttgtgccg

SEQ ID NO: 84 - DNA, 32759 bp, Unknown
  16S sequences of unknown bacteria
atgaaagacaaatctaaaaaatcaacctattccacaacctttggtgttgacccaacctattccacaacctttggtgttgacccatgtttctttaaagaaaaaaagcggattttttatccgcttttttatttcctgttgaaggcaactttctatcccgatttagtgcaccgattatggtttgcgttcggactcgcgcctacgctcccaaaaattgcgcatttccgcgtttttaccgcggtattttttatgcgctatgtagattgtagtttagaaactctttgaccaagacggcgttttgtatcggacgctatgcaacttccaccaatgccgataaaatcgtatcttttgtctttttatagccttccgcaagggtcttttccgggggctgcttccagtagttcttattaaacagctccaaagacaggcaccccctaaaaccctgagagtacattttgggtaggacggctttaaacgggcatatgccgtcgcccggaaacactctgtcggcgtccacaagcttttcgcgcgcgggggaggacggatagtcgtttatatgaaatacgtccaacccgccgaggttcacaaggtttagcgaggcgaaagaattgcccccgcgatataaatggtagaagtcaagcagaagcccggcatttgcgtcgttcgtgagagccgcaatttttagcgcgtcgcccagtctgtgcagggcgcggtgaccccatagttcaaggagcggctttactccatagggccttgcaagctctatgacttttgcgtacctttcggcgtattcgtcgaatttgagcggatcgagcttctcgatgccgtacatcgtgcatgctatgttcttgctcccgatttccgccgcccagcctatctcgcgcttcatttgttcgatattttttgcgcgctcggcgggatcgtccagcatgcattttgcgaatcctatcagattgtcaggttttaagtctgcgtcttcaaggcgcttctttacttccgttatcttattgccgcgcgaaatgaaatcctcaatatggcgcgtccacggttcaatgccgtcgtagccagctttcgatatcagatttatctgctcttcaagctttaaattgtatccgtttagcgtgccgcaattcattcctattggcagcggtagcccgctcttataacgcttctgcgcgggcggtttcgccgccgcactccttgccgcgacagtcgaaacggctgtcgccgcggctaactttattgcgtttcttcgtgatatttttttcatcttataaaatcggaaatttccatggagaacggtacttgggcttcaagtaggagttgatttcagagtttgagaaacttttggcagtgtcgtcgtactttatagtctcgccggaacgcgccgctatattgcccagatgcgcaagcttggcgcaaagggagccgttttcaattgtgcatgcggtcttgtatcttcttgaacgcactgcgtcgagaaaatctaccaagtggtctatatgctccgaattttcgggcttccctgattccgcctttacgggattgccctttatactgtcattcggaattattttccagccttcgcggttagccgcaagtatcccgttttctccattgaaggcgattccgtacgacatgtcaaaatacccaatcggggttgccgtattgccccaagttatgcagcagtcgccgtagtcaaatgctacgctcaaagtgtcgaatgtttgggaaggcgtctccgggtgggcgtatttgccgcctactccgccaacttttttaggagtagtcgttttgccgagcccctgcaaaaccatatcgagaagatggactccccagtcggtcataagcccgccgccgtaattccagtacagcctccacaatccgtgcactttcgacgcattgtacggaacttccggcgcaggcccaagccacatctggtaatcgagcgacttcggcggcggagtgtcggccttcgcagcgtatcccgcaccgtacctaaaatttgcccatacatccgccttggcaattttgccgagcttgccgcttcttgctatttctattacgcgcctccacattttggagctgttctgctgctggcctaccgacacaaccgccttgtatttcttcgcatagtttacgatagcgtcgcattctgctattgagttggctatgggcttctccaaatatacgtctttgccggcagagcatgcgtcgcatgcctgcaagcaatgccaatggtcgggcgtgccgattattacggcgtcaacgtctttcctttcgagaactttccggtagtcggagtacaagtcgggtttggctttaaatttcttttcgcaatcgccggcgcgcctctcgagtatttctttatcgacatcggctattgcaacaactctggcgcctcccgtgtgcattgccgacgccaagtcgttccaacccatgtttcgcgccccgatgagtgcaatccccactttttcgtttgctccaaccggacgagccattccggttgccattgccgttcctaataaccccactgatgtgacaaattctcgtctttgcataaaccccgtctatatttttccaaaaataatattacagctgagatttgcggtcaacaattttcgtgtttagagctttccaaacgcttactaatataaattcgattacgataaattttatatcggaataaattttacaacgcaagtggattcgcagaaaggtataaatatgctaaaagtctattattgggacgtttgtccgcactgccatcgggcgatggagtttctcaaaaaaaacaatgtgccttttgaggctctcgacattgaaaaacaacccgagaaaatcgtaaaaaaagttgtcgaggtcaacggcggcgacgattgggtagtcccaaccatggagtacaatggacaatggaggccgggacaggtattcaatgctaaaaaacttgaagccgaccttaaagcttgggggcttatgtaaactctgcgattctggattgtaataattgaaacaaatgtctcatattttgcgttgttaaaaattaaaaccgcatctatctatgagaaccattagaattataaacgatattgtaatttacttctgcttttgcttccttgcgggaacggggcttatgatggaattttcattcgtcaagggcgcgggtccgcaatatgtcctctctatgggcaaaaaggcgtgggaaaccggccacttctgggttggagttgtcgcaattttggcattcattctccacttctgcctgaactcgcgcttctttaaaaatgtcctaaaaacgcgcatagtttacatcttatttgtgataatcggctttggcggcgcaattctcttggcagtttggccgaccgaaaagggcgaagccacagcccccgcagcgcagacctccgcccagactgccggacaaggatacggcaagggcatgggcaaaggtgccgggcttggcatgggcaaaggcgccggaatttgccaagggcagggcttcgcgcgcaatttggctctcaaataatattattcctcaccccccagattattatcgggggcgcaaaattggggaaaactgaatttccccgcgcttcgcaggctaaaagcctgctttattctttttttttcattttaagagggaaaattatttctcctctttttatttacccactgcatacgataaaacaaagtcgcatcttacaaaaaagcggtatttatgctctctcaaaatagtaatgtctatcatagcgcaaaaaattaggctgtgaacttcttatttcccgcattacttcatttcttctttatattgtctgggtttgcatataaaacttggcaatgcagtccgccattagaatctatattgggtcggatattttaatacgcttgcccagagttaaattttttccgaaagcagtttctatttttcgcgctgtttcgcccgcggcagaatttatattacagccaatttaacgtgccgcgcgctaaggcgtatgttttgcctgcaaaacttctgcaaaagcctcgtagaatttatgtttacagatgcgcggatatttgccccaaagagatttcgcgcaatagatttctttcaggcaatacttacacgcgtgcggttaaataaattaagcgcgcgtaagttgagcaattccccgtttgggcggctcgattaacttccgcgcgctttcccgtttttaccgaaatgggcttcctatttatccagcgaatcggcgtataattccgcgacgtgctttacttttatctcgtcgccgtttagcgcgagcatattcgatatttgcatcatgcacgcagggcacccgcatgcgacagtctccgcgccgcttgccacaatattatcgcgcttgcgcccgccgattttctttgaaatgtcgtaatgtgtcagggtaaagctcccgccgcagccgcagcatgtgtcgggctcgcgcatctcgataagctcgcattcggggttcgcctttacaagctccctcggctgtctgcgcactcccagcgattttgcgaggtggcacgaatcgtggtatgtcactttctcgcgcttgccgcctgcggaagctgccggtttctccaacccaatgacatcgactaaaaacgccgatatgtccagagtctttgcggctatcttttccgccgtcgccttttgttttccctccgcgtacttcggccaaaactgctctatcgtttctgtgcacgacgcgcaagcagtcacaacatagtcaaattcaagtttgcccaaaatatcgaggttgtacgacgccatttttttgaaggaatcggcgtcgccggaggcgagggcgggtattccgcagcatgccaacccggacggcatcgcaacccctatcccgtaatgcttgaatatttttaggcaagcctcggtcacgttgggatagactttgtcgcccatgcagcccgtgaaaaacagcacttttaggccgctcttgcccgcgggagtgtcgtagtcgccatacttttggcggattgtcttttccggaagctccggcaggcgcctgtcgccgattatcggcgccaaaagcggcgacgaaagcgtgcgcggcgcgttgttttgcctgcgcataaacagtcccctgaacggcgccgacacttccgcgcagaaggaaaaaaacctcggattgcaaagcatcgcccggaatattatcttctttatcggtgacagccccatgtattgcgccgatatttcgcgcgctttgatgaatatatcaagtatgctcactcctgacgggcacgccgcttggcacgagccgcacaagaggcatcggtcgagcttgccgcgcacaccttccgcgtcttttgccactttgttttctatattggaaagcagcgaaagtttgccgcgcgctacgtccgcttccatcagcgtttctttaaatattgggcataccgattggcatgtcccgcatttcatgcacgccgagagcttgtcgtcaagcttggcggtttcctcggcaagttttgcgagatttgtcatattaaaatgctaccacttttgtagggtttaacagcctttttgagtcaaccgacgccctcagcgccctgcagaatttcagggttgccgccgacgtttcaagctccagccattttgactttgccgtccccgttccgtgttcgcccgacagcgtgccgcccatctcgacagtcctcctgaacagctcgtctatcgcctgctctacgcgcgcaaattcttgcggatcacgcttgtcgcacaatatcgaagggtgaagattgccgtcgcctgcatgcccgaatgttcctatgagcaaaccgtatttctttgcgatgtcgcctatgcagtcaaccatcgcgggaatctttgagcgcgcgactgtcgcgtcttcaagcactattgtcggacgcctgcgggcgagcgccggaagcgccttgcgcctcgcctcccatattgcgtttttctgaatttcgtcgcgcgctacggttatgtttgcagctccgttctcgcgcaatattctctcaactgtgtcggcgtcgtccgctacctgggcggggtgcccgtcaacttctatcagaagcagcgccttagcgtcgcgcggaagcccgatctttacgtcgtcctcgaccatatttatcgtcaccgcgtccataaattcaagcgtgcagggcagcacgtgggaggctattatttcggcgacggtgtcggcggcgcgccttacgtcggaaaacgcggctgtcatcgccttcgacgccctcggcgggggaacgagtttgagtatggcttttgatattatcccgaacgccccttccgaacctgtcataagtcccgcaagattaaacccggtggcgcatttgaccgtcctcgagcctgttttgacaagttcgccttccgcgtcgtaaaattcaagtcccattacgtagtctttcgtcactccgtattttagcccgcgaagcccccccgcattttcggctatgttcccgcctattgtggacactgcctgcgaccccgggtctggcgggtaaaacagcccctttgaggcaacttccgccgcaaatcttgcagtcactacccccggctccaccactgcgtaaaggtctcccgaattgatttcgagaattttgtttagcttttgcgtgactatcacaaccgatttttccgagtcgggaatcgtcccgcctgacaggtttgtgccggagcccctcactgtcatcggtatggagttcttattgcagaaggcgcatatctggccaatctgttctgccttgtcgggggtcaataccgccgcgggctccctttgcggcagcacggcggagtcgtaggcgtagctgagcctgtcggcttccgagtccaatacgttgtcggccccgattagtttcttgaaatcttttattatgctcgattcagacattttaaaaaatttttttcttaatttagactcgcaacgcttgcggtcaagtaaaacgaaatctcatattcttaaacagttaattctgcaagcgtcagaaaaaattctcgccgaatttcaacaaaatcccctccgcctcgactatctgccgcatcgcttcgtacgcggctatgccggcagacgttgacaggttgagcgaacgcagggtgtccaccatatgcggtatctttacgcgcctctccaaaatgtcggcgtgtacatattcggggcagccgctgtcctcggcgccaaatagaaggccgtcgccgcgcctgtactttccgtcccaaaaacatttgcgagactttgtcgtaaaaagccatatgcgctccaactttggcgcgtattctgattttttaaactcctcccagttcttgtggtgcacaacgtcgaggctcttccagtagtccattccgctccttttgagcttcgcgtcggttattgtaaagcccatcgggtgtatcaagtgcagcctcgccccgattaccgcgcacattctccctatatttccggtgttttgcggaatttttggattgtgtaaaattatatgcagtgcaggttcgcccatagtaaactaaaaaaattcaagcattgctttcaaaagattgaaaatcgcctgtcgcaatccgcgcctaaaaatggattcattttgccttccagcgcgccgctaaatttgtttccgaggcgccgccgcatgagtgctcgaccattaggctcggctcgcgcgttagctttttatattccaatacgctgctttatatcttcatacgcttcggcgccaacgtttgggatttcatctttgcatctgccccatggccgctttcgcgcatatataaaatttgcgccgccgcttaatactgccgccggaattttgtgtccaacgccctgcgggcctcgcgcattgcctcccgcttttttatatcttcgcgcttatcgtaaagcttcttgcctgtgcacagggctatcaacactttcgcaagcgccttcttgaaatatatttttagcggaattatcgccgtgccgccagaatctgtcgcggcttttaattttagtatctccttcttatgcagcaggagttttcgcggacgagcaggattatggttgtttatgttcccaaaatcgtactccgatatgtgcgactggtacattacggcttcgccgttgtcaacccttacgaaagcgtcgtttatctgcgcctttccggcgcgcaaactctttatctccgtccctgtgagcactattccggcttcgaaagtttcaccgacaaaatattcgtggttcgccttgcggttgcgaatctcggttattcggttgtctttgcctttgcccattggaataaaaaaccgcgtggtttgtcgccgcgcggactatctatgcgcgccccgcgcccgcattcggaaaattcgtaaagcaatatttcccaacgcaaaaaagcgcaatgcgggcaggaggcgtcaagcgtttttacaaatcttcgctttctttcggcgcctcgtaaagttcgtattttatgtgccccttgactatctccaagagagctatgtcttcaagcgatagcttttcgagcgattctaccgtcgggcgcgcgccgtatttgagttgcttcacgcggcgggagacgacgtttatgagaatgttcgggtcgggaataaccttttgtgcctgtcttagataatcttctctcaagagagcctccttattattaaatggtgaacgctttactgtatttttcgccgcgtcgaatgcaatacaaaaattatccgaattttttactatgcctcaaaagatctaatatctggaaaatcaaaagacaaaaaatcccgttccacaattttttgcgccgcttccgttttgccctcgctttgttcccttttgccgcgctccgctgctaatcttccagaaaaatatcggccgacaatattttttttcaggattttgcttttcccgcgcggcggaaaaatttttctcgccccccatagttcaattccgatttttcgttttatttgacaaccgccccaaattgtattggataaaccataattttaacacaatccaaacttataataatgagcgtatcaggcgaaaaaataacaatccgcgacggaaagctcgcggtcccatcaaaccctgtcgttcccttcatcgaaggcgacggcataggccccgatatttggagagccgccgtgcgcgttttcgacgcggctgtcgagaaggcttataaaggctcgcgcaagatccagtggctggaagtcctcgcgggcgaaaaagcattcaataaaacgggcagctggctgccttcggaaacgctcgacgccttcaaagaatatctcgtaggaatcaaggggccgctcactactcccatcggcggcggcatacgctcgctgaatgtcgccttgcgccaagagctcgacctctatgtatgccagcgccccgtccgctatttcagcggcgtcgatagccccgtaaagcgcccggacctcgtcgatatggtcatcttccgcgaaaatacggaggacatttatgcgggtatcgaatttgaaaacggcacggaggaagtcgaagaattaaaagctttcttaaaagaccgcttcccaaaaaaattcgctaaaatccgcttcccgcagtcgtgcggaatcggcataaagcccgtctctcaggaaggaacggcgaggctcgtaaaatccgccatcgaatacgccatttcacaggggcgcaagagcgtcacactcgtccacaagggcaatataatgaaattcaccgaaggcgccttccgcgactggggatacaaggtcgcgaaagagcagtttggcgcggtagaaatcgacggcggcccgtggtgcaagcttccctgcggaatcataattaaagacgttatcgccgacgctttcttgcagcaaatcctcacccgccccgcggagtacgacatcgttgccacgctaaacctcaacggcgactacatctccgacgccctcgccgcgcaggtcggcggcatcggtatcgcccccggcggcaatataaactacactaccggccacgcaattttcgaggctacccacggaaccgcccccaaatacgcaaacctcgacaaggtaaacccgggctccgtaatcctctccggcgaaatgatgtttagatacctcggctggaacgaagccgctgacctcatcataacaggcctcgaaaattcgataaaggccaagaccgtcacttacgacctcgcacgcctcatagaaggcgcgaaagaagtcaagtgctcggaattcggctcggcaatcatcgccaatatgtagtttatgagcggcggaaaacttctcgtagtgggctccatcgcctacgacaacataaagacgcccttggactcggtccaatgggcgctcggcgggtcggcgtcgtacgcggcgctggcggcgtcgttctttgcgccgacaatgctttgcggcatcgtcggaaaggattttaaaaaatccgacttggctcgcctttcgaggcgcggcatcgacacttcaaatgtggaaatcgacccaaacggcgaaactttcttttggagcggtgaatatcacgacaacttcaacagccgcgaaactctcgaaacgcgcgtaaacgtctacgaaaactacgctccgaagctaaacgacgccgcgaaaaacgccgacttcgtcctgctaggaaacattggcccggacgtccaaaaatgcgcgctcgacgcaatgctctcttcgccgtttgtgattctcgatacaatgaacctttggattgacatcgcaaaccatgccctgaaagagctaatcaaaagggccgacatattcatcgtaaacgactccgaggcaaaactcatatccggcgagcgcaatatcatacttgcgggcgaaagcctcttgaagttaggcgcaaagtccgcagtcgtcaaaaccggcgaatacggcgctatgctatttcacaaagacggtttctttgtaatccccgcgtaccccgtaagggacttgcgcgacccgactggcgcgggcgacacgttcgccggcgcgctcgcgggagtgctcgcaggaagcggaaaaacagacttcaccgcaattaaaaatgcaatgcttacaggagccgccgcggcgtcaatgactgtcgaatcattttcgtccgacaaattggaggaagccggattagacgaaataaagcgccgccaagattttattaggcgcatatcggagatataaattatggcaaatgttctcgaaatagccaagcgcgcgcgggctgccgcgctcgaattgtcgggagtctcggaagagcgcaaaaacgcggctctcgcgcggattgccgagctgctcgaacaagaagccgaaaacattattgcggcaaactcgcgcgacctcgaaaaggccgccgccgtcgggctttccaagccaatgctcgaacgcctgtcgctcgaccagaaaaaaatcgcgggcattgcggagggcgtgcggcaagttgcggcgttgcctgaccctgtcggcgaaataatcgaaacggtcgtccgcccaaacggcctcgaaataaaaaaggtaagaacgccaataggggttatcggaattatttacgagagcaggccgaatgtcactgtcgattgcgcggtattgtgcctcaaaagcggaaacgcggcaatactccgcggcggaagcgaggcgtttgaatcgaacgcggcgctggcggcgataatctcccgcgcgctttccgatacgggcataaatccagattgtgtccagattattcccacgaccgacagggcggctttcggcgaactcttgaagctcgataaatacgtaaactgcattatcccaagaggcggcgaggggcttatcaggtttgtcgtccaaaactcgactatcccagtaatcaagcactacaagggcgtctgcaccgtctatatagacaaggacgccgacgctgaacttgcacgggttcttgcagtcgattcaaaatgccagcgcccgagcgtatgcaacgcagcagaaaacttgattgtccactcggctgtcgccgacaaattactgccgattgttgcagggcgcctaagcgagcttggcgtggagatacgcgcctcagacagagccgctaaaatactcgacaaggccggaatcccccacaaggccgccactgacgacgacttctataccgagtatatcgatatgattatttcagttgatatagtcgattcggtggaggaggccgccgcgttcataaacaaatacggctccggacattccgatttaatcgtaacccaaaaccagcagactgccgaaaaatttatgaatttggtagattccgccgccgtctattggaacgcctcgaccagatttaccgacgggtacgaattcgggctcggcgccgagataggaatatcgaccgacaagctgcacgcccgcggtccgatgggcctcaaagagctttgctcgtacaaatataaaatccgcggagcggggcagacccgaggaaaacccgactctgcaaaataatccgcgcctgcgcgcacaacaaaaaactaaaccaaaatggacagactcgaagaaatatttaaaatgcagtatgaactcaacaagcgcataggcgttgacaccgcaaatatgtcggaagacgaccgcgtaaagtgggttctaaattatagccgcgccctcgcgcaggaaaacgcggagctcgtggattccgtcccgtggaaatggtgggctaaataccagaaattcgacccccaaaacgcgcgcgtcgaggtggtggatatgctgcacttcttggtttctatcgcccagactctcggaatgaccgccgacgatttttatcaagcatacgccaagaaaaaccatataaaccacgaccgccaagattcgggctacactacaaaagacgaaaacgactgccgctcgatttaagctgaggaaatttaggcgacggctttagtttttggttttttcttgcgtgggaaaatttctgtggagcgcttttgcggcggattgtgccgctttttgcgcgcccgcgttttttttaggcggctgtacggtttgcctttttatctttttccctcgcatagcgggctaaatcggctcggtttttttattttttcttttcgccgagcagatgggttctcgcgtcctgcagtttttatatttccgcaaaggctgcctaaacggcgcgtcttatttccgctttgccttcaaaagctttccactatcttagaaaagtttttgatggcgcggagtattttgtttttagcatataaaaaaatgcctttatcggcagtcgcgtgccgaaaagttcttttgttttgcgttgcctttattattccgcaaatgccccgatgcttgcagccgtccaaaactctttctggattttggaactcttgcccatattgtggaatttttttttcaaaaataagaaagcggcgcaaaaaaaagaccgccatgtggcggtcttttttgggaaatctaatgttattgctgttcttttacatcgttcttaaagaacaggtagaagaatatgagcagggcgccggaaattgcggattcaatccagaatactgtcgcccaatttgtgactgcttctgcgccagcttgcgcgggaagggccgtgtagctgtcgattagccatttcgagaagaacgttcctataacttgagctacgccgtagaagaagaagtacaagccctgcgcctgcgccttgatgtcggcaggggcttttttatcgatgtacatctgggcggcgacaaagaagaagccgaatatcgccccgtgcactgctatcgcgccaaaatataaacctccgacttcgggtgcaagcgcgctcatcacatagcgcaagaacatggcgagtatgcctattgccatcgtatttttaaatccgaggaattttatggagacgggaatcgcgaccataaacgccaattcggaaatctgccctatgttcaatacgggcgttatttccttcactccgagagacgcgaggaacgaaccatacatccaataaattgtgaatgcgatagtccataccacaacgcatatcataaatattgaaatgttcgcgtctttaagcattccgaacgcgcgcaaaccgagagcgtctgtaatcgacatcggctctcccttcgctttcgggggagtcgcgggcaaaaagagcgagaacaccgcggctactaacgcaactccggcagcgcatgcgagcggaatgtttgtgccgtctatcgaaatgtcgaatatcgccttggcgccgagcgcgaacactgccgcgcagacccagccgagagagccgaataccctaatgtaggggaaggcttcgggcgtgctgtttgtcatcgctatcgacgaagtaagcccccatgtgggcatataggcgcacatcgcaagcatcaagaatatgaatatcaatatggggttgctcgtgaagaaagtcgccaagagcagtatcgccacaaaaaagttgagaatcgccaagaccttttcgctgtttgcaaccctgtcggcaaacattccgaccagcggcgagaatatcgagcctatcgccattgttgacattatcagcgagaacattagccccgacactttcatattgtcgaggtagctcgaaagctgtacccagaaagccgccactagcataaactgcaagaacatcatggcgcttagtttgaatcttgatgcgaacgacatatttgttaactcctaatttgtttttaaagtaggctaaacataggctgttttaacgctaaaatcaagcattttgcggcatagaccgcgatgtttggaattttttattgcacatttttagcggcaaacttgccgcaagacccgcaaagagcgcgccgcagagcggaaatatggaaaacgccgcttagaaagggcgatttttgcttgaaggccatatcgccggctggcaatatggggctttaagaaaataaaaatggggcgccagaggcgcttcggcgttgtttatgagaatacaaaaatatatttcccaatgcggcgtatgctcgcgccgcgcggcggaggaaaaaatcctcgaaggcgcagtcaccgtcaacggagaaatcgcccagattggtcaggacgtggatcctgaaaaggacaaggtcgcggtggacggcgtgacgctcaaaggcatcgtcgccgaaaaagtggttcttgcaatgaacaagccaaagggctatctgtgctccaacgacgacccgtttgaggctaaaaaagtattcgacctattgccgcccccatacgacaagatgaagctattctgctgcggcaggctcgacaaaaattcgcaaggcctcttgattctcaccaacgacggagagctcgcaaacaagattacccacccgtcgtcgggaatcattaagcgctaccgcgtgactctaaaccgcccgctcgatccagccgtaataccaatccttacgcgcggtgtcgtatccgagggcgaaaaattgcgcgctctaaaaataatacagcacccctcggacacttccgagcgcgacgcaaaaaaagtggaagtctggctatcgcagggccgcaagcgcgaaatccgcagaatgtttgaagttatgggatacttcgtaaaagagctcaaacgctttcaaattggggcctttgtgctaagaagaatccctgagggctcatgcaagctgctctcgcgccaagatattgaaaaaattttgagaaaccccgtattttaaattatgcaaaaaagcgaaattttcgacaaagtggaagattgcatcgccgatttcgcggcgggaaaaatcgtaatcgtcgccgacgacgaatcgcgcgaaaacgagggcgatatgattgtcgccgcggaaaagataacgccggagtcggtgaacacgatgataaagctcgcgcgcggactcgtctgcgtgcccacgacgagcgagcggctgacggctcttggaatcgacgatatggtcaggctgaaccgcgacgcgaaaggcaccgcattcaccgtcacagtcgatgcggcgaaaggcgtcactacgggcattagcgccgccgacagggcgaggaccataaagttgatggcaaccccctccgcggggccttccgacttcgtcaccccagggcatgtaaatccgctaagggcgcgccccggcggcgtactcgagcgcgcgggacacacggaggcggctgtcgatctcgcaaagctcgcgggactattcccatgtgcagccatttgcgaaattacgaacgacgacggcactatggcgcgcattcccgacctcgtaaaatttaaaaaagagcacaatatgaagctcatgagcgttgcggatctcatcgaatacagaatgcgccgcgacactctcgttaaaataatatttgaaaggccgttcccgacgcgctttggcgacttcaagctcgtcgggctgcgttccgcgaccggcccggacacccacttcgccctcgtaaagggtaaaatcaccgaggagccgaccctcgcaagagtccactcagaaaatgtctttgccgatatgtttgccgactcatctttcgcgtcgggctcaaactccttcgcgcgggcaatggcggaagtcgaaaaggcgggctcgggtgctgtcatatacataagccgtgcagactcgggaattgtcactcccgacggcgtcccggaattgccgagccgccgcgattacggtcttggcgcgcaaattctgcgggctctcggatttaaaaaaataaggcttcttacgacacaccccggcagccatgcgctgtccgacggatacggcctcgaaataaccgaacaaatacaattctaaaatgagtctcgacaaaggtaaaatgccaaaaatcgacgcgagcggatacaggtacgcaatagccgcctcgcgcttcaacaaggaactcgtggacgcgctcgtgcgcgacgcggtggagactctccacggctgcggcgtcgacgccgagaacgtaaggcttgtcagggttccgggcgcggcggagctgccgcatgtttgcaatatgctcgcgcaaacggaacagtacgacgcaattatcgcgcttggcgttgtaataaggggcgaaacaccccaccacgaaattatcgcccacagcaccgcagccgccctccaaaacgtggcgctctcgacaaccgttccgatgattaacggaataatagtcgcaaacacccgcgaacaggctgtcgcacgcacaaaaggggaaatagcgcgcggcagggaatttgcggaggccgcgatggaaatggcttggcaaaccgacctgctcctcgacgaactcgaggaggccgaggccgaatttgagaaaaactccgaagaaaacggaaagggattcgcatcatgaacccgtcggaaaacaaaatgcgcggccgccgcgaaaaccgcgccgccgcaatgcagttcgcatacatgcgcgccgcaaacaaagacgtgccgctcaaccagcttctcgactccttctttgaaacgaaagaggagccgcgcgaattttacgggttcgcctcagagctaatcgccggaatggaggagcactccgccgaaatcgacgccgcaatttcaaaaagcgcaaaaaattggagcatggacagaatcgcgcgcgtcgatttggcgatactgaggctcgccgtcttcgagctcctctttcgcgacgacatccctccgatagtctctatcaacgaggctgtcgatctcgcaaaaacatactccactgccgagtccaaaagatttataaacggcgtcctcgacaacgttaagaacgggctcaatcgccctctaagaacccccctcaaacactgatgttctccctctttaaacgcttcaaggaaggccttaaacgcacggctaacggcgcgctcgggaaactcgccggcctgttctccaaaaaaatcgacccgtccgacatcgccctcattgaagaaactctcatcgaggccgactttggctacgaaaccgtctgcgaaataatcgacgccatcaaatccgaatacaagcgcgacagccagctccaggggcgccgcgccgcggaaatcggagcggaagtgcttgcgcgcatacttgaaggttcggacggctcgctcgcaaagagtgccgattcaaacccgtctgtcgtttgcctcgtaggggtcaacggcgcggggaaaaccacgaccgccgcaaagctcgcaaaaattctcgaagccgacggaggcgtagtactcggcgcgtgcgacactttcagggccgccgcaaacgagcaaatccgagtgtgggccgacaggctcggcgtcaggctcgtcgaaagcgcgcacggcgcggacgccgcagccaccgcatgggactgttggcaggctgcaaagtccgacggcgcaaggtggctcgtgctcgacaccgcgggcaggctccacacaaaggaaaacttgatgggcgaactcgcaaaaatacgcagggttctcgcaaaaaacgatcccaacgccccgcaaaactccattctcgttattgacgcaagcttaggttcaaacagcatttcacaggcgcgcgccttccacaagtctttcggcctcacaggaataatcgtcacaaagctcgacggcacgggcaagggcggggcgctcgcgggcatttaccgcgagctaaaacttccgatactttatgtcgggctcggcgaaaaagtcgacgacctccaaaaattcaacattcgcgcctatgtaaacggcgttttcggactcgaataatatgacggaattgaaagttagcctcagcgaaagatcgtatccgattcatatcggaaacggcgctttcggccttgcgctcgaaaacttttcgcaaattgtccgcaacggcggcaaaatcgcttgcgtggcggacgagtcgttgctgggcctctttccgcaatccgcggaaaaactaaaaagcctcggtatccacttgttccctgtgcacggcggcgagctctccaagtcttttgaaatgctcgaaaagctctgcgaatctttcgcggcggcggggctcgacagaaaatcgaccgtagcggcgtggggcggaggcgtcataggcgacctcgcgggtttcgctgcggcaacgtatatgagaggcattgcccttattcaaattcccacaaccttgctttcgatggtcgattcctccgtaggcggaaagaccggcataaatatccgcgcaggaaaaaatctcgtaggggcattccaccagccgcgcgccgtatatatcgacacttccttcctttcgaccctcccgatgcgcgaattttccgcgggcatggcggaagtcataaaatgcggagccctcggcgacgctgaactgttctcggctctcgaaaaaactcaggagcccctttcgtacgactcaaagtaccttccggaggcaatacgccgctcgtgcgcgcttaaagcaaaaatcgtgtccgaggacgagcgcgaaacttcaaaagaagggggaagggccctgctgaattttgggcatacactcgggcatgccgtcgaaaaatgcgcgggatacggcgtgtttgtgcacggggaggccgttgcgataggaatggcgtttgcggctaaactttccgtcgcgcaatcgacgctctcagaaagcgacgctaacaggctcgtaaagctcattcagaagttcgggctgccgaccagcgtgcccgaccgcataaaaactgccgatatcatagaatccatgcgccacgacaaaaaatccgtcgggggaagcctgcggtttgtcctgctcgacggaatcggcgcgtcgtacacgaaaactttggaggaggctgacgtcctaaaagccctcgaatcgtaatgctcgaaagattatcagacgcccattgccatctcgaaggcgaagatccggagtcctaccctccagaaggagtggaggcatgcgccatttgcgcaagcttcgcaaacgaatggtcaaaacttgaagaaatctcgcgcgcgtccgtaaaaaaaatattcggaatacaccccgacatagaaatatcgaaactcgacgatatcgaaattgtagaaaggcaaatgcgcctaacaattctgccggaactcgaaaaacatatggattcggcggacgcgataggcgagataggcctcgactcgcgcatagccgacagggttccaattgaaatccaaaagacgctctttgagacgcagctcggtatggcggcaaagcgcggccttccggtcgtaatacactgcgtgggcgaatggggcgcgctttacggcatcttgcgcgacttcacaaaaaataggggcctgaaaaaatttcttatccacgcggcgtcttgctcggcgcaaatggctgtgcagttcgagaaaatcggcgcgcgattctccttcggaatacgcgaactttcgagcaaaagaggcgcggaatgcgcaagggcggcgtcgccggaaagaatcttgacggagactgacggtgaatgttcggcggagtcgctcgaaaatgccgccgcggctctcgccgcgctcaggggcgtgtcggccgctgaaatcgcagacgccgcttttgaaaacttccactcgttctattcaaaatgatacgggataggttttcaaggacggcaattttgttcggcgatgttgcatgtgaaaaaatcttcgcggcgcatgccgtaatctgtggtgtgggggcggtcggctcgttcgctgccgaggctctcgcccgctcgggtgtcgggcgcttcgacctctgggacttcgactccgtagaagaaagcaatgtaaaccgccagctttgcgcgctctcctcaacaatcggaaggctgaaaatcgacgtcgtaaaggagagaatactggatattaacccaagtgcaaaagtcgatttgcaccctgcgtttatagattccgaaaacgccgcacaagttgtgggagcgccggagaacggcaaagttgtggtcgatgctatcgactctataccgtcgaaagcggcgcttatattccgcgccgccgaagcgggggttgcgatagtatccagcatgggagccgcaaggcgctcggacccatcgcgcattaaacaggcggacataatgaaaacgtacggctgcccggtcgccgcgcgcgtccgaaaattgttgcgttccctcggatactctggaaactgcgagtgcgtgttttccgacgaaagcgtatcggaatccacccatgtcccaagccaaaacgaaaaaataataggcagctgcgcggttgtcgcgggcattttcggattgcgccttgcaaacctcgccatcgcggaaattttgcctaaaaaatgaacataacccgttttttcaacatcaatatataaaatgtccatctacgatagagactatatgcgcggacagggcgaaaaaaagagcgccctgtcggacttctttgggcggatttcggcggtaaaggcgctgataataataaacgtcgcaatatttatcataggggcgtttgtcgatagattcttcggatacggcacgtttttttcgatgttcgacttgtcgctgccgggattggcttccggcaaaatatggacggttataacatattcgttcctacacgcggggctcgcgcacatagcgttcaacatgattgcactgtattttatgggaactccgctcgaatcgtggattggctcgcgaaaattcttatttgtgtatttcgcgggggctttggcgggtgcggcgctatggctactgttctcgtttggctcgcccgtcgggcttgtgggggcgtcggcttcggtaatggcggttttcgcatgtttttgcgctctatacccgccaatgcctgtcactttcctgctattttttgtcctgccgatttccataaaaccaataaatatgcttaaaatcgccgctgcgcttgaggcgctcggcctgctttacactttgtcgggagggttgtcggagattgcatatgcggggcatctcggcggaatcgtggcgggctttttggccgcgcgcgcaattaagtccggaaagcttgcgttcttagataaactttcctttaagcttccgcgcagaaaatccgaaaaatatacgaagagcgcgtccgaatattcttaccgcgtaaacatttcaaatcccaaagacttaaaaaatgaagtcgatagaatactcgataaaatcagcgaaaaaggctttgcgtctctcacggaaagcgagcgccaaaccctcgtggacgcgcgccgccgcatgaaataaccccgatttttaatttgaaacattcacaatttttaacgattattgacatatgatgaattttttaaagttgctgccggttgccgtagcgatattcgcttcggcgctattctgcattcccgcaaccgcatcggacgccaaaccacaacaggcacagcgcaagccgatttcattgcagacctccccaaaaatgcgcaacgagaccaaatggctcgtatattgcatggagcgcggccactaccttaaaatgccgattaccgaccttgacgtccgcgagtttatccgcgaatacatgcagaatatcgacttcttcaagctgtttttcaccgcagaggacgttcagcatttccaagacttcttttccccctctattgacgtaatgctccaccaggggactctgctgccggctttctcaatttacgacaaattcctcgacagggccgacgcgaggctcgaatggatacgcgaaagaatgaaaaagcccttcgacttctcgaaggaggaagctttcaggcccgacagaagtaaagaagaatggccaaaaaattgggaggccgcaaacgccctctgggaaaaaaggctcaaatacgacatcgtaaacgaaatactctcgtattccgtcaagaaaaacgacgatgaaaagaagaaggagcccgcagataatgcagggcaagacaaatctgcggaaaagtccgccgcggcacccaaacagacggaaaaggaaaaattcgccgaagttgtggaagaggaggtcgaagctccaaaaacttttgaagaaaagctcgcaaaagctgaaaaagaggtcctgcggcgctacgaaagactaatcgaaaactaccgcaaggcggacgcaatggagattcaggaaatataccttaatacgctctcgcacctctacgacccgcactcatctttcctttccgaatactatctcgaagaatttgacatctcagttcgcaatgcgcttgtcggaattggcgcgctgcttcaagacaaggacggatattgcacaatatccgagcttatgccaggcggccctgccgaagaatgcaaactgctaagccccggcgacaaaattttgggtgtcggccaggaaacaggagagattgtcgatgtaatcggaatgaagctccgcaataccgtaagaatgattcgcggcaaaagcgggacaaaagtgaggctgctgattgaaccggcttcaaatccgtcggcgcgcaaaacaataacactcgtccgccgcgaaataaaacttacaacaaaactcgcaaaggctgaaatctacacaatccctgtcgacgacaaaacactgccaataggcgtaatcgacctgcccgcattctacggtgaaggcggtttcaacggcgagtcgaaaggttttagcactactaaggatgtcgaggagctcctactaaaactgaaaaaagctggagtgaagggcataatactcgacttgcgccgcaacggcggaggtttcctaaccgaggctgtcgatttggccggcctatttataaagcgcggcccggtagtgcaggttaaaaacgcagccggcaaaaccgaaaaattgtgggacgaagaccccaaggttgtttgggacggccccctaatcataatggtaagccgcctatccgcctccgcgacggaaattgtcgcaggcgccctgcaaaaccacaagcgcgctattatcgtcggcgacaaaagcacccacggcaagggaacggtacaagccgtcctaaacctcggcaatttcgaccccgaacaaaagagcgcggcaaaagtcaccgtacaaaaatggtacgcgccaaacggagattccatacaggtcaagggcgtccattcagatatagtcctgccgtcgccgtacgactatatggaaatcggcgaacagtacaaagactacgcgatgaagtgggactcaatcgccccggatacgatagaggaagtctggggatacggcgttccggagggcgaggcaaaagcccttatggacaagcttacgaagcagtccgaagaacgccaaaagaagctcgacgaattcgcattctggaattcccagataaaccgcgtgaaggatagatggcagacgaaggactggagcgtaaatctcgttacccgagagaaaaagctcgctgaagacgaggctttcgccgacgcttccgaaaagaaggaaaaggagctgtccaagttgaacttcaaaaaggaggaggttctcctcgagagcgccaaggaaaacgcccatgcggataaggacgaaaatcccgaagccaaaaaggacgataacggcgcgtccccgcaggataaactcgacgccgagcttgcttccgacgagccgcccgcgttcgacgtccagttgcgcgaagcactccgcataatggcggattggatagaaattctcgataaaaacaaggagtcaaaatgaagattgcaataggagcagacccgtttgcgtacggcttgaaaaaagccgtggcgcaacatttgaaaaaccgcggagttgaagttatggatatggattcctatgcggaaactccctactacgaggtcgcagaaaaggcggctcgggaaatctccgccgggaaggccgacggagctgtcttgttttgcggaacgggagcgggaatggcgattgtggcaaacaaaatatgcggagtcagggccgtctgtgtggaatccgtctttgcggcgaaaaaagctaaagccataaacgacgcaaacgcgataactatgggcgcaatgattatcggagaggcaatggcttgcgaaatggtcgatgcctggctcgatacaaagtttgcggagggctttgagcagctgcgcgaatttctcgaatcggcgcgcggacaggtcgggaaaatcgactccgcaaacagggcgtctaaataggctcttataacgtccgtccgtaaataaaactcgcttaaaaaagcttgcttgcgggttggactggaaagttctgaagtatgtgaaaggagggctgagccctctttttttatgcactttatttgcgcaaaatatgccgtagtgcggctagcgcattgccaacccgcaattttatatcgttattgcgcttgcggattatccgtttttgcgcataaaaaatatcagtctgcgggggcaattttctatgtcttggcgcccattttttcttatcgctgatattaaaaattccgccgtctttttctgtataactttttagcgtttatgcaggctatttatccaatattttccgcgcattccataaaaaaagcgcgccaaaaactggcgcgctttcgctctattaaaatattttgttaattgtgcctttcccaaaaaccggcgcgcagttttgcgctgcgagcgccgtaaagacagcatcatttatacggcataaactttaccgcaaaacctccgccgcttctcatcgacagttttaactttgtgtcggaagtaactttcttggtctcgattttatagtcctcggggatgtcgtcggaatttattgtgtcgcggacaattttcgcaaggtatttgccttcgggcaggaatttcgacaagtctatctcgacgtcctttccgccccagccgcacattccgccaagataccatttgtcgcccttgcggcgcgctatcacaacatagtcgcctatcttgccctcgattacttttgtatcgtcccaagtcgtcggtactgcagctatgaaatcaagcagcttctgctctttcatgtattcgctcggcatatccgatatcatttgcagcgtgcttaaaaacaaaacatattgagccgccatgtgcgcgcgcgttccctgtactctcggtatgtcgcgtattgccttgaatgagcgttcgttagaattcctcattccgccaggcgtgtagtccatgggcccgagcagcattcgcgtaaacaccaaatcaacattgtgcgaaggcgtcacggtctttgcccatttattcacttccgcaccgtgtacggcttcaaatgttatcgcattcggatatgtgcgctgcaacccggacggcgcggggcatccgtgccactctatcaccatctggcggtcggccgccaactttgtgatgttttctatatggcgtatcatcagctggtcgtcgcggtcgttgaagtctatctttagcccgtcaactccccagctcttaaacaaatccaacgccttctccggatacgcatacagaaccttgctgaggcaccatatcacaactttcacacccttcgagtgcgcgtattcgacaactccaggaatgtccacatgcggcttgccgtttatgtagttctcgtccgtattgtatatgtctataaatttcgtgcgggcgtcggttgccaaatatgtcttcccgagcccctctctcccaacatgccagccggcgtcgagcgttatgtacggtatgtcgttgtcggcggcaaaatcgacgtagtatttgcacatctgctcgttaaatccgcatttgaaatcaacgcctttcgtattccagttgacccaccagtcccatacagaggggccgggcgttatccatgaagcgtctcctatcttggattccgatgccaatttatatacggtgtcgttgtcggcaagaaccttgtcgtcgcgcgccactataaaggctctccacggaaattcgcgcgtgccggaagtctttgctatataatcctcaacttccgacggctggagctggttgcccttttgcacaagcttttttggcacaggcgcaaaaagcgcgcgcggtgaatcggcgtctttcggatagtgtatcctaagccccgggtattccgtccaatccgactctacaagcgcgattttcattccttccttctcaaatataaaaggcatcgaggcgttcgcgccctttttcagccctttaagcccgcccgccgttgtgcgcgtaaagattgattcaaacgaagtccttatcccgtttactatgtgggcgattactttgtcggcgtctttgagcggcagtttgagcgtctcttgcttcactatcatctctccgccattctttgacacaaacctgtatgcggcggcgtcgtcgtacacccttattattacgtcgtagttgccaaggtcggcgcggctctcgttgtaattgtcggttatcgttttcctcgcgccaaacaggggcttaatctcggtatttacgctccttgattttgaccccttgattgcggcgtccgcgccgaattcccctttgtttgtcgacatgcctatcgcggctttgtccaagacttttttgccgtcggcggttattgaaaaagaaagctgtttgccgtcttcgagtttggcctcaatcctgccgtcgggagattttacggtcacttccgcagcgtatcccgcgcaggctgcggcaaatgccgcgcataatatgtataatagtccgtgtttcatacggtcgcattttgctgaaaactcacgcgctttgcaattatgctctatcctttttttatttaacagttaaatctttatattgccaactcctgccgcaaaattccgcaaaaccttagcgtctattgatgcatctgtcgattgcgatatcccatttcaagaaacttgactcttggcaaaatttttagctcgaatttcaaacttacttttctaagatgctttttaaaaccgaaaggattttatggtttatagatgcacggtatgcggatatgaatatgacgaggcttcggaaggcaagtcttgggattcgttacccgacaactggatttgcccagtatgcggcgtaggcaaggaattatttgaaaaaatccagaccgaagaggctccaataaaacaggaagaagcgcgtgcgccacagcccgctgacacttccgcggcttcctgcgcagcatctgaaacgccttcggaactagcgcagccaaatgctacatcttccgacatatgcgcggaaacaatggctaattggggcgttaagtgggttctcggcatggtcggccactcgaatctcggaatggcggacgcaatccgcaggcaggtcgaaaacggaaaaatgcgctatatcggaatccgccacgagggcgccgctgccttcgcgtgctccgcttatggcaagctctcaggaaaccccgcggcgtgcatatctattgcgggcccgggttctacaaacctcctgacaggcctatgcgacgccgcgctcgactccgctccggcaatcgctcttacgggtcaggttccctcttccattgaaggcctaaaaatatttcaggatatcaacctgcgcgacgccctccatgccgcaacccctgcacagtttgaaatgtacaagggcagcaaatttggaaggctcgccgcaaaagtgtgtaccgaggcaatcgacagaaaatgcgccgcccagcttattatgccggacgacgtgcaagtattgccggcatctcccgacgatgtcgctattcgcccgctaaaatcggtcgcgcgagctgcggaaaccttctcagaaacctccctcagggaggctgcagatattatcgcaaatgcgcaattcccggtaatcttaatgggaagaggctgccgcggcgccgcccacaaggtcgaggaactcgcggaaatgctcggctgcccgattatgacgacttatccggcaaagggtataatccccgacagccacccgctttcctgcggtgtgcagggattgagcggaacggcggtgtcggcaaaatttatggcgcgcgcagattgcgtggtggctttcggaacggggcttagtaggcatacctccgtgcccgccggaaaaaaggtcgttcaaatagactcggactcaaacgcaatcgggcggaggtatccggtggaagccgcaatcatcggagatgtttccgaggttgccccggcgctattcgactacttaaaagattccttcaaatcaaaagactcgcgcaaagacatagagcttgaatgggctaaatggcgcgccgaaaaagccgcgcgcgcctccaagagcgcaaagggcgcgattgatccggctgccgtggccgcagcattgtctaaatatgcacctgctgacgcaataatttccgtagatgtcgggaatgttgcgtattctttcggaaggtatttcgaggcgaaagagcagtctttcataggctcttggtatctcggctcaataggtttcgggctgccgggcgcaatcggcgcgtggtgcgcctcgcaggagccggacggacaattcttcgggcgcccggtcgtggcggtcgtaggcgacggcggcttgggtcaatacctgtgcgaatggacaactgtcgcaaaatattccatgaatataaaatgcgtggtttacaacaactcggagctcggaaaaatttccgcggagcaaaagctcgcgcacatgagcgtctgggagacggatcttcacaatccatcgtttgccgaatttgcgcgcttatgctctacaactggaatactcgccgacaatcccgacacgttggattcaaaggtggaggaattcttccgcgcagacggccccgcgattcttgaagttaaaactacttcttaaacaaagctacgtctgctgttttttgggaaagcaagcaaggccttcccgaacggcttgtgccattgcggcgagattgcaatgccccattcacccatctaaaaaattttgcccgaacgcgtcttgcgcgcccgggcatttttttgctttttaagcttagcagaacttaaaacgtttgagtctttttaacgctttttaggagtaagcaaaggctcgattatttcataaaaaacgtcacagaacgctgtcgagcgccgaaataatatcgtccttattttcgatgcctatcgacaggcgtatcagatcggagggcactcccgcagacaggcgctcgcgctcgccaagctgcgagtgcgaagtgctcgcggggtgtagtattaggctcttggcgtcgcccacatttgcgagattgctaaatagcggtatattgtcaactatctcaaccgccttgtcgtacccgcctttcggcccgaatacgactacgccgccgcagtctctgacaagatatttttccgcctccgctctggacgggtcgccctccaaaccggggtatcttacccactcgactccggggtgcgattttaaaaactcggcgactgccttggcgtttgaacaatggcgttccattcttagcggcaaggtctccaagccctgcaaaaatatccatgcggaatccggagacagggtagggcccatattccttagcccaactgtgcggagtctcgttataaatgccggattgcctgtccctgacaggtcgcggccgaacctcagcccgtggtatcccttgtcgggctcattgtacagggagaattttgggtcgctccaatcaaatttccccgcgtctatgactgcgccgcctattgccgtcccgtgcccgcatatccattttgaaagcgaatggattactatgtcggccccgtagtctattggccttaaaagcggcgggggagtgaaagttgagtccactatcagcggaatgttgtggctgcgcgctatttttgcgtacccctctatgtcggcaacatcaagcgaaggatttcctaccgcctctatgtacaatgcccgcgtgtgctcgtttatggatttttccaccgcggaaaaatcgtttacatcggtaaaacgcgccgtgattgagtattgcggcaaaatggcgtcgaagagcgtgtatgtgccgccgtataggttgcgcgcgctcacaagctcgtcgccggctttcagtatgtttaaaatgctgaatgctatggcggcggtgcctgaggaaagcgcgagtgcgcccgctccgtcttcaagcgcgcaaagccgcttttcgagaatatcgttggtcggattcattatcctcgaataaatgtttccgctttcttttagcgcaaataaatccgccgcgtgctttgagctcttgaaattataggcggttgttctatacacgggaactgcgcgcgaaagagtggatgaatccggaacttgaccagcgtggactgcgagtgtttctattttgtaatccattttatttggcggttttttctcttatcggattttccattgcggcaatgaacataaaacctaaaaaattttcgcgccgattgcgtgcgcaaaaaaaacgcggcaggttaaatctacgctttcccgccgcgccgtaagataaagttttttaatttcgcaaaatgggctctattcgtaaagccaagttgacagatagcgcgagcccgaatcgggaatcagcactactatctttttaccggcgttctccggccgcctgccgacttccatcgcggcgtacaatgcggcacctgacgatattcctgaaagtatgccctctttttttgcgagcgtccgcgccgtgtcccccgcctgctcggtagtgaccctgaatacctcgtcaactacctccggaagatatattccggggacaaaccccgcgcctattccctgcaatgcgtgcggccccggcttgccgccggaaagcacgggcgaatccgccggctcaacggctacgattttcactttcggatttaacgccttcaacgctttaccgactccgcacactgtcccgcctgtcccaacgccggccacaaatatgtcaacttcgccgtccgtgtctttccagatttccacgcctgtcgtgcgctcgtgggcgtcgcggtttgcggggttctcaaattgctgaggtatgaacgagccgggtatttcgtcgcgcatctgctcggcgcgctctatcgcgcccttcattcccttggcgccgtcggtcagttcaagctcggctccgtacgcctttaaaaacttgcgccgctctacgctcatggtgtcgggcattacgagtattaccctgtatccctcggcggcgccgaccattgccaagcctatgcccgtattgccgcttgtgggctcgattattgtagaccccgcttttatcagcccgcgcttcttggcgtcttcaagcatagcaagcgccgcgcggtcttttacagagccagacggattgaaaaattcgagcttcaagattatatcggctccggtgtcgttcattcttggaatgcgcacgagcggcgtgccgcctatgagttcgtttatcgacgattttatgttcatttgccttttctatcctttcgcttcgcctttattttttcttacggaagaaacgccctgtcaataatcaaaaaaaacagggttgtgcaaaaaaataggttgggcagggggcggaacctttgcaaaaagttaaatattcctaaggttcggctaaattatggcgatttattatttatacaaggctatctagaagcctgccaaattatttatctcccgcgggaggcgtggatttagtctgcccgcggatttttttatttttcaaattataggcaatccgccgcaaaaatacattttaccatgaacgatatagttatacgcccaggctcggacgcggagttcgacacagtgtacgaggatatgaaactccagttcccgtccgaggaattgaagccaaaatgcgcattcaaaaaaatgttttcaacgggcgctacaaaactgatgctcgccgagcgcggcggaagtatcgtcggatacttcatattccatagtatcggagatatcgcaatgctcgaccatatcgccgtattaaaacagttccattccggcggaatcgggactgccattatagacgccatacgatgccgctacccggagttaaagggaatgatcttggaggtcgagcccgttaatccgttggatccacagacggtaaggcgcg

SEQ ID NO: 85 - DNA, 9328 bp, Unknown
  16S sequences of unknown bacteria
gatcgaatttacatttttatgcaaattccttgcgacatttgaaatcgtacagggcagttccccacactttaccatcgcaaaaatgaattttttatcgctctcggcgcatcgttcataacgaactttgaaaaatccagtatccaggacatgataaaattccggcaggttccgctccacatctgcttcaccgatctgacctgactccgtattcttatatacgacctgacacatctgctgaataaaaaacggatacccctttgtaatattaatgatctcccggatcgcggcttccgtataaatgacaccaaaccgtttcgccggctctgcaattgctttcgtggactgctcctctgacagagaagaaatttccttataaataaacagccgctctgaataggacttctcctccgacagcatcttatatattttaggcaatccggctccaatgaccatcaccggatagccaagctgattgacgcgatgcagggcggaaatcactgcgccgagctcctcctgcttcatatactggatttcatctatgaaaaagcaaacgggtgtatccgtctcataagcggtctcgccaatcgtgacaaatacatccgtcaggctctgtgtcagactgtttgtcttatacagctcctgctcctgcacggatagagaaaacgtactgtcattcggatcaaaagaaaccaccagcgacttaatcgcatccagcggcttctggatcagatgccgaaatttctcctttgcactgacctttcgcaaaaaagcctgcgcacaggtcgcaatctgcgcaataaagtcattccgctcttctacttcgatatgcttgcagaaaatccctttctcttctgcatttctctgaagctgattaatcaggactgtttttcccacgcctctcagcccactgaatattacagaaggacttgggattttcagaatcagcgcctcaaacatctgattgatctcctggatgtcttcatctcttccggcaagatacgttggcatcaaccccgcacccggcctgtatggattcactttaaacatcggcatgcctcctttttcttattatagcgcgctttatcgcggcaagcaacttatttccgctgttttccgctgaaaaaatacgatatatatctataaacagaaaaagctcagcggaggatactttttccactaagcttttcttgtgtcatcgattttatctaatagctgtaacaggcaattacagcatctgcttaaatgtctcgatcagctcgatatccgatgccgtgaccttcagattcgactcaatcacctttccttccggattctttaccgaaatagaaaggacgctgccctcccggatttccggctgcaccgctcgcaggaaagcgggaaatttcggatgattgtttgtaaaacgctgccagagagtcttcatctgcatcagcgcctggaaattcattgccatagtccctcctgccttattttataaacatcgcatccccaaacgaaaagaaccgatatttctgctccaccgcctctttgtacgcggtcatgatcttctcttttccggcaagtgcggagacgagcatcagaagtgtagactccggcagatggaagttcgtaatcaggcagtccagtaccttgaactgatagcccggataaatgaaaatctccgtccagccactgcacggacgcagcgtgccatcctctgcggcagccgattcgatcgtgcggcagcttgtcgtaccgacacagatcactcttcctccgttctttttcgtctcattaatgaggtttgctgccgtctcatcgacctgatagaattccgaatgcatatgatgctgtgtcacatcctctaccttgaccgggcggaaggtgccaagtcctacgtgaagtgtcacctccgcgatattcacacccatatcccgcacctgctgcagaagctccggcgtaaaatgcagtccggctgtcggagccgccgctgatccttcatactttgcatagacggtctgatagcggtttttatccttcagctcatgtgtgatgtacggtggaagcggcatctgcccgagccggtcgagaatctcctcaaaaattccctcatacgtgaactgaatcaggcgattgccctcctcaacgatgtcaatgacctcgccgaccagcagcccgtcgccgaacacgatctttgtcccgggcttcgccttttttcccggctttacgagtgtctcccacacatcattttccttccgcttcaaaagcagaatctcgatgagtgctccggttccttcccgcacgccgtaaagccgtgccgggatgaccttcgtattgttgatgaccaggcagtcgcccggctgcagataatctacaatgttataaaagtgacggtgttccatcgcaccggtctttttatcgagtacaagaagccgggaggcagaccgatcctccagcggatcctgtgcgatcagctcctgcggcaaatcaaaataaaaatcagatgttttcataatatgtaatatcctgttcctttattacccattttaatgtactgtctttctgaggttccaaatctgcgatcgttactgcgcagtttttcggcacaccggtatcccagaaatccttctgctcgccatgccggatatttaagagcatcgcacgcgacgctgccccatgtgtggagatcagaattgtcttgtcataccattctttgcgcgtggacagctcttctaaaaatgcaccggtacgcgccagcagatccgaaatgctctctccgccctccggtgggataaaattgcccggatcgcgaaagaatgcaaaaaattttggatcagtgatctctccttttgcatcgcgcacccgcctgccctcatacgtaccaaaaccgatttcctgaatacgcgcatctgtaatcaccgggatgtccctttcgccaagcaccagaagcgctgtctcctttgcacgctgcagtggactggaaatgcaaaggtcaaacgggatcggctgcaaagcacgggcggtcacctgtgcaagtacccgcccgttctcatttaatggtatatccgtctgtccctgaaggcggagggtatgattccactccgtctctccatgtcggatgatatatagtctcatattatgcacgaatctcgattccgagagcttccagtccattccatatcttcttcatcgcagctgtgatgtcgccctcttccagtgtgcggtcctttgcacggaaggtgatggagtatgccatcgacttgaaaccgctgcggatctgtgcaccctcatagatatcaaagagctgacaattctccagaatctttcctccgcgctggataatcacatcttcgatctcacctgccagaatctgcttcggaacgaccatgctgatgtcacggctcactgccgggaactttgcgatgcccgcatacttccggtcaaaggttgcaagctctgtcactgtcggcatatccagcacggcaatataagccttttcaccgataccgtacgcagaagccacaagcggatgtacctcaccgaggaatccgagcagcttatcgccatagtaaacattggcctgacggcccggatgcaggaaggtctttccgctgttcggacggtaagattttcttccggtaatgccaagcttgtcaaggaactcctcaatgacacccttcattgtaaagaaatcgccatctccgtacataccaagtgtaaactgtacgcgctcatccggcagctctgtcagtggaagtgccttcggaatataaatgttgccaagctcatagaggcggacatttttatttctgtggctgtagttgaagccaagagaggtcagcataccgttgacagactgcgtccgcatgatgctgaagtcctcgccaagcggattcatgattttgatcgcattgcgcagcggagaatcagccggaagcatcagcttctcaaatgccttcggactctcgaacgagtacatcataccctgtgagaatccgcagaactccgcgatatcctgagcgaccgcacgcacacgcagatcaaacgggagctttccggtcgtcgcttcgccggtcggcagagtcgtcggaatatttgcgtaaccgaagaaacgagctacctcctctgcaagatcagcggtacggaacagatcctgacggaacgtcggcgcgataatctcgtttgtcttctcgtcatatccaaggtcaatctttttgaagtatccgagcatctcctctgcggaaatatcggtaccgagcagtgcgttgatgcgctccgggatgcgtaccggctctttaacagtcgggtacacatctacgataccgccgacgacctcacccgcaccaagctcttcgatcagctggcaggcacggttgattgcctcttctgcattgttcgggtcaagacccttttcaaacttcgcggaagcatcggtacgcagaccgatccgctttgaggaaagacggatgttcgtgccatcgaagctttacatcatctgtaatcatggaattcgctccacccatgataccggcgatgccgaccgacttttcgccgtcacagatcaccagaacattctcatccagtgtacgctcctgctcatccagcgtcacgaatttctcatcctttgcggcacggcgcacgatgatctcatggcctgcgagctggtcatagtcgtatgcatgcatcggctggccgtactcttccataatatagttcgtgatgtcgacaatgttgttgatcggacgaattccggctgctgccagacggcgctgcatccacttcggtgacggagcaattctgatattctttacgactcttgcgcagtaacgcgggcagagatccgtatcctttactgttacctttacatagtcagatgcattctcggcatttccggtcggcgtcacaaccggcggatgaaattccttgccaaaggtcgctgcagcctcacgcgcgataccgatcacgccaaagcaatcgacacggttggatgtgatctcatactcaaaggtcacgtcatgcagtccgagctcctcgatcgcgtccgcaccgaccactgcatcctccgggaaaatgtagatgccatattccggcgcttccgggtaaaattctctggaagagccaagctcctcgatcgaacacatcatgccattggactcaacgccgcgcagcttaccctttttgatctggatgccgccttcggtcatttttccgtcatgattgcctgcgacccgtccgccatctaaaacgaccgggatcttgtcgccttcctttacatttggggcacctgtcacgatctgaatcgtctcagctcctacatttacctggcagataatcagatgatccgaatccggatgcttctcgattttctcaatctgtccgatcacaattttgtccagatcgcggtctgctgcctcatatccctccacctttgttcctgagagggtcattgcatcggtatactcctgcgcagtgcaggtgagatccggcacatatgctttaatccatgataaagtcgtattcattttcttctcctccttagaactgtttcaggaaacgtacatcgttctcatacagcagtctcatatcgtcaatttcatacttcagcagggcgatacgctcaaggcccacaccaaatgcaaatccggtatattcattcgggtcaataccgcacatctccagcacatgcggatgtaccattccacagccaaggatttcgatccaaccgcttcccttacagaaccggcagccctttccgccacatttgaagcaggatacatccacctctgcgctcggctccgtgaatgggaagtggtgcggacgaaactttgtcttcgtctccgcgccgaacagctcctttgcaaattcttccagggtacccttcaggtctgcaaacgtaatatttttatcaattaccaatccttcaatctgatggaaagacggagaatgagtcgcatccacctcatcagaacggaacacacggcccggagcaatcatacggattggcagcttgccctgctccataatacgcgcctgtaccggagaggtctgggtacgcagtacgatatctttattaatatagaaggtatcctgctcatccttggccggatggtttgccggaatattcagtttttcaaaattgtaaagatcatactccacttccggtccctctacaacctcatagcccataccgataaagatccgctctacttcctccagcgcgatcgtattcggatgacgatgaccgacgttattctttttcgccggaagcgtcacatcgatgacctcagacttgagctgcagctccagtgcctgtgcctccagctttttctttgtatcttccaggatggactcgatctgggttctcgtatcatttacgagctgaccaaataccggacgctcttccggagcaacatccttcatactctttaatactgctgtcagttttcctttcttaccaaggaaattgacccggacatcattcagcttgtccagtgctcccgcctgctcgatctgtgcaagcgcttcttctctgattgcctgtaacttctctttcatgggattttcctttcttctcggtgatgtgtagtggattcccggatgttccgcccatctcaaaatgtaaatgcagcccttagcaaataaatttgctaagatctgtctttacatcttgctgccgctcggaacgaaaacacaaaaagcagcccatcccttcctgtgaagggacgaagctgccgtaaattccgtggtaccaccctgcttcctgccgtatggcaggctctcatatgcgtaacgtgcatcagcgtccgctcctacttgccgatctgccgttcaaagtggaaactccggtgtgaaattcgcttcgcgtctgtacctcaggagctcccagccgatgactcctgatctctgtcggaaaaacgcggcactactttgcaccatctgcgtcttttttcttttctgtgaggatcctctttttggatccgctgtgttccattttaccacaggattttcatctgtcaagggtaaacagctccggtgcactcagatattggttgatttctgccccgatgaacagcaggtacatacaaaaatacaaccacagcatcacaaccacaagcgtcgtaagacttccgtaaagcaccgacatattgctggcatattccagataaatggaaaatacataggaaaataccgcccatgcgaccgaggtaaagaccgcacccggcagctggcggataaacgccatcttccggtttgggagatacgtatatagtacagcaaaaagcaatgccagtataacaagtgccagcccggtaggaagcacgaccatcgaatcctgatacttcatcagaaatgggaatttctccagcagatagttctcaatgccatagccgaacacaagaataccaaggctcacgacaagtgccaggatcattacgactgtataacaggcacagcggaaacgtgtcacaaagtaatttctcgtctcctccacctgataaatggaattcagcccgtcggacagcccgagcataccctttcctgcggtccatagcgcaacaagcacagtccacggcacgagtgaagttgactgccggtaaatgctattcaccatcgactgcacgagcggcgtgatctcaaacggtgtcagcccttcaaaggtcagcacgatctcatcagccgtcagcggtgtataacgcaacagtgcaagaagcagcatcacgatcggaaatacactcattatgataaaaaatccggcctccgccgaatgtgcccgtacccggtctttccctgttttataactgaaccgatacagccagcccacaattttaaaaatcttctgcatgcaacaactcactttccccgtagtaatccttcaaaatgtcacgatagctctccccggatgctgccaatgcagccgctccgcactgactcatcccctttccgtgtccatagcccccgccatggaagaggaaatcatccccggatgcctctacccagaaccacgcgctcggcagtattccctgaagtgcgatctgcctgccatcgtgcaaaaccacaccgtccgctcccggtgcaagcatccgtcggatctcatactcccctgtgatgcatagctccctgccatcacccgacagacacagctcctgtacctgaccatcagccgcgcgtgtccgtaccgcgacggtatccagcacatttccggaaaacgcccctgtcttttgcgcctgtaaaagcagctcttctttcgtaatccgcgcactccagcgtacccatggcgaaccatattccagatccttctccggctcctgtgccaggaattcccgaaatgcctgctccttcgataaattctctctgccatttataccacaggacgtcgaataatacaatacctcattgcatgcgagcatctctcctcgggtcgcttccactgcaccgacagagactgcatccgccggataattattatacacctgataggaggtactgtcatccagatcatagacggcatccgttttccgcgcagaccgcatacagtgatacgcatacgtacgtgcgcatacagcctgtgccagctgtgcctgcagcggataatctgacggcatctcactggctaccacggccggaaggtactgctccagcggcaattcgtttacgagcaggattccgtcttcctccccatataaaaaaagtcgccccttgtattgcggcggatttgccgcccggatcagctttggcatcgtcaggatgccgtttttttcctgtgtggaaatgcagaggcactcaccggcagaaagttcggatgcggtaaattccagttgaaagctgtcactgtttggactttttatcaccttcgtttgccattttgttgcttcgtcgttcttctgtgtttcgctttcagaagcttccaaatcttcgcttatagagtaatccatattttgcactgcttcgacaagaagcggctgctcagaagtcacaaatatgctctgatgatacggttcctgatacgaatttcccagaatccttacgcggatagacttaccggcattttgatttgcgtctgctttttccaacccattctttccctttataccaattttatccaaatctcgtgtctctacattttccttccgtgtcccttccgccacttcctctttcctgtttccataactcaaatactgcaccagcagccagataatgagcatgctcactccgagcgcgcccaccgccgccagccccaccagacaccgttttccccatatttgccacatttactccctttcttttccccgatcaagtaaagcggacattcgcaatccatccctgcagctctgctgacagggcctagctt

SEQ ID NO: 86 - DNA, 19673 bp, Unknown
  16S sequences of unknown bacteria
gcccgaccctgtcctccttctctataaacaagaaaggcgacggtctgccgatcctccgccgcaagggcttcaactacctgaacctcgcgcccctcttcaagaacaaggtcgccgagccgttcgtcgtcaccgcgaagtacgaccccgccgagcacgagagaccgatcaagctcagcactcacgagggtcaggaattcgactacatcctgaagggtaaactgaaagtccagatcgacgaccatgtcgaggtcatcggcgagggcgactcgatctactacaactccggaacaccgcacggaatgatcgcctgcgagggcggctgtgagttcatcgccgtcgtcatcaacgcgcagggcaaggcgtacgaataccacgcgccgtcgatggaaaagaagccgagcgtctactccgacgcgaagagcggcgccgtctgggagaacttcatcgacacctcgctcgacgagaacggagtgctgaaagaaatccatttccacaacgaggacaagttcaacttcgcgtttgacgtcgtcgacgcgctcgccgagaagtgtccggacaagctcgcgatgctccacctcgacgccgagaagcacgagagacgcttcacgttcagggatatgtcgagatattcgtcgatgactgcgaactacttcaagtcgctcggcatcggcaagggcgaccgcgtcatggtcgttctcaagcggcattatcacttctggttcacgattctcgcgctccacaagctcggggcgatcatcatcccggcgacgaatctgctcgtcgagcatgatttcgagtaccgcttcaacgcagcgggcgtcaaggctatcgtctgctccgccgacggggatatcgcgcatcaggtcgacctcgcggctccgcgctgtgagacgctcaagacgaagatcctcgcctgccagaacaccgagaagcacatcgacggctggcatgacttcaactccgagttcaaggacttcccggacgtctacaagcgcaccgcgtcctccgcttgcggcgacgacccgatgctgatgttcttcacctccggaactaccggatacccgaagatcgcggctcacagccacaagtacgcgctcggtcacttcatcaccgcgaagtactggcacaacgtcgacccggacggcatccacttcacgatctccgacaccggctggggcaaggcgctctggggcaagctgtacggtcagtggctctgcgaggcggctgtcttcacctatgacttcaacaagttcgacgcgcacgatatcctgccgctctttgcgaagtacaatatcacgaccttctgcgctccgcctacgatgtaccgcttcttcatcaaggaggatctgtcgaagtacgacctgtcgtcaatcaagtacgcgacggtcgcgggcgaggctctgaaccccgaggtttatcagcagttcctgaacgctaccggcgtgaagctcatggagggcttcgggcagaccgagactaccctttcggtcgcaaaccttgtcggcatgacgcctaagccgggctctatgggcaagccttctccgctctatcacgtcgagatcctgaatccggaaggaaagccggtcgcggtcggcgagacgggcgagatctgcatcgacacacgcgagagcgttccgtgcggactcttcctcggctactacagaaacgaggagaagaccaaggaagcatggcacgacggctggtaccacaccggcgacaccgcctggaaggatgaggacggctacttctggtacgtcggacgcatcgacgacctcatcaagtcgagcggataccgcatcgggccgttcgagatcgagtcggtcatcatggagctcccgtatgtcctcgagtgcgcggtcacagcggctccggacccgatccgcggacaggttgtcaaggcgacgatcgtcctcgtcaagggcaaggagaagtcggacgagctgaagaaggaaatccagaactacgtcaagacccataccgcgccttacaagtacccgagaatcgtcgagttcatggacgagctcccgaagacgataagcggcaagatcagacgcgtggaactcagaaacaacgacaacaacaagaaataataaacgcgggggaagtccggaaaacgggcttcccctgacggcgttatgccaatataaaaccacatctcctcgcacaacctgccgattagcaccacacttgtagggggcgatatcgctgcggcgacatcgctgcggcgacggtcgcccgttctgacacatcgttcaacccacatttctatccactcatgaaaggaatcaactatgcctgaaaaaatcaaatggaaaagcggcgcccttctctcccctctcccggcggtcatggtgacctgcggaaccctcgaaaagccgaacatcataacgatcggctggacgggaattctctgcacgaacccgccgaagacctatatctcggtgagacccgagagatactcgtacgagatcataaagaataccgggaagtttgtcataaacctgacgacggcggcgctcgcgagggcctgtgacttctgcggcgtgcgctccggaagggacaccgacaaattcgcggagagcgcgaggttctatccgggaggtctgcacgccgttccgtccctgacgctcgaggacacgccgatgcttgaggaaagccccgtatcgatagagtgccgcgtatcgtccgtggtcaggttcgaggacgggacaactcccgacggaaagagcaggcccgcgacgcacgagatgttcatagccgacatcgtatcggtggcggtagacccgtcgctgatcgacgacaaaggcgccctcaggctcgaaaaagccggtctgacagcctacgcccacggagactacttccagctcgggaaaaagataggcgacttcgggttctcggtgaggaagaaagggaaaggaagagggaaacggtgaggggcttccacacgtctctcccaaacaaaaaagctcacggtctctcctccgtgagcttttctttcttatgaaaaaaacacctgactgaataagaactgtccgctgttacgcttttctgatcttcttcgcggcgacaaacgcgcctgcgagcgacaccatgagaataaccgcgagagccgcgcctctgtccgaggtctccgccgactcctcgcctccggtcgtctcaggcttctcagcctcgatcaccgactcgccgttgatcttcgtgattgtgtactggtagccgtccgcgggcgaattcttcatcgacgccgcgataacgagataagccttcccgtcgtccgcgataccgctgagatcatacgaataagccgacctgacgccgttgacggtgagaacgtactccccgcccttcttgttcacctcgaccgtgagctttccgcccgccttcagagcgaagacgttgtcctcatcgttgccgatgttgctgaaatcaacaggaccgaagttctcgaatctgccgtccttccagcgtatcaggttgacgatacccttattgtcgtcgccgagcggcgagccgacctggaaaagctgcggcttctggagaaagtcaacgctgacccagcaatcgctgtcggtgtccggaagcttgtcaatcgtcatctcaagcgagaagccgtcaagctcgactttatccctgtaagcgacgccgccccagttctttccgtccgtgtagtagccgccctgtgtgacctgaatacccttatcggtctctttgaccaccaccgccgagttcttgtcgtcgatgaggaagccgttgccgggaatccacttatcggtggaagctgacgacacagggatgaccgcggcagccgcgatgagcgccgcgctgaggattaacgcgatctttttcatttttctgaattcctttcgtcaataagtaataaaacagaaaatctttcggaagataccatctatattataaaacatccgtccggaattgtcaataagctgttaacaaaaaatgcgtaaatattttattacccgtttatgacgatatcatgtagaccggcagtcaggcagaacatccaccaccctgagcaccctgtccgacacgacaaacttcacctcagaacccgcgaacctcatcccgtaaaccctctccgggtcgtcctgaaccgcggggcgcggatcctcggcgaggagcgagatcagaccgtctcttttcccttcttcgacgcgcgacaggagctcttccgggaagtcaaccttcagcttcttcccgaatttctccgccgcgaagccgccggacgcctccgggtgagagtcggcgtatgggaggtagggctttatgtcgataatcggcgtgccgtccatcaggtcggctccggagactatcagcacagttccctcgttttcggtgtgttcgacccgctcgagcttcaccgaggagagaccgatattgttcggtctgaacggagagcgggtcgcgaagaccccgaccctctcgttcccgccgagccgcggcggtctgaccgtcggagaccagcccggtcttacagcctccgagaatatccagagtatccagagatgcgaccatcccccgatgccgcgcagagcgttcggatcgcggaactccggctcaaacacaatcctcgaggtaagcgaagtcagcccgctctggcgcggtatgccgaacttgtccgggaaatcgctctccatccgcgcgataacgcgaaggggcgggaggtctttttcttccataatacttcagtcatcctttcatcttgtcccggtatccggtcggactgataccctcgtgccgcgcgaaaaaccgtgagaactgcgccggatccggaaacccgaccgccgacgccacaagcccgaccggtatgtccgtcccggacagcagcccgcgcgccgcgcacatacggcgctcgtcaatatatctcttcggcggcaccccgagatgcttcataaacaggttgtagagatacctgtcgcagatatgcagggcgtccgcgatcccggtcacagtgcagccggaagcgaggttcgcctcgataaagctcttcgcggagcgtatgaccggattcccggcgccgtcgtcagcctctccgcgcacaccgcgcgcgtgaagaccaaggattgcgttcagcgccgacagagcctcataccggttcagcaccggaaggtacctcttcagcctgtcatatatcccgatcagctcatctgtgaagccgaatccaaatatcccgttcctgtccggttgtatgatctttccgacagtttcctcccctccgtcgaacatgacccagtaatagcgccaaggctcgtcggccgacgagtgatactcatgtatgacgccgggagctatatagaacccctgccccgccgcgaccggattgccatcgaaatatcccttgccggacgcgacatagtgaagtatgctgtgccgcctcggacacggcccccagtgcgccatcgacgggtcaggctccatcccgaaattgactgccctcagcggcgtctcctgcccggagccggcggaacagtcgccgtcgaccgcgaaaaatacgctcatctgcgcctccgtacgtatgattttgcaaagtatccgcacgcttttgccattgcgccgcgaaggatacggtggtataattataccacaaacccaacccatgtcaagcgtatgaaaggaagatgattcagaaaatgacaaaacagatagcgcacgccgaacccttctccggtcccgcccggctgacgatgccggacatatacggcggctctccggacaagccgttcatctggcgtatacccgtactcggtgagcgcccggtcagcatacggatcgacggtctgccggaaggactcacgataaacggaaatatcatatccggagagacacctgtaaccggggattttccggttgtggtcaccgccgcgaaccgtctcggctcagacaggaagaccgtgacgctcagcatccgcccggacggctcgctcagaacgccgcttctcggcttcacgacgtggaacgcctgctttgaggacgtgacggacaagctcgttatcggaatcggagaatatctcgtctcgagcggactcgcggaatacggctacagctatgtcaacgtcgattcctgctggcagggactgtacgacgaagagaccggcgccgttatgccgaatggaaagttcccggacatgaaggggatgtactcgtccctgcacgcactcgggctgaagggcgggatctactcgagcccgttccgggagtgctggggctgcgctgcggcggcgaacctcgacatattccccggctgcacaaggggagaaaaggacccgcgcttcccggacatcaacaacggcatcggaaaggagcgccatgaagcgcaaaacgtcgcccactggtgccgcctcggcgtggattacctcaaatacgactgggcgccgagcgacaagtacaacgccggtcttatgaaggcggcgctgaggaacgcctcccgtgacatctccttctgcatgacggtcagcgcgtctccggacgactataagttcctgaacgaaaactgctgctcatggcgcgcgaacgaggacacacgcgacgactggcagaacctcctccgccgtatggacacggtcgacacatggcgcgggaaaacatcgcccggtcacttctacgatctcgatatgctcgcgataggcgtgacgcagataaacaaggggacgcggcatctcaccaacgacgaggagctctccgcctacacgttccacgcgttcttcccgtcgcccttgcagctcagcatggcgctcgacaaaatgactgacttcgagcgcgaccttgtctcgaacgatgagatcatagcggtgaatcaggattctctgtgcgactacccgtccccggtcagcgctccggatggcttccgcgtctgggaaagaaagctcgcgagcggagacaccgcaatcgccgtgttcaacctgagcgacagcaccgccgtgatatctctgccgctcgacaggaaacacatgatccgcgacctctggacaaaaaccgacatcgcacgatccgaaaccctcagcgtgacgctcgacgcgcattccgcgggtgtttaccgtctgtcatgacataacagcgccgccgtcagataaccgacgcgcggcgctgcttttttatatcagtcaatcagcccgagccgtctgaacgcgttcgcgatcccgccctctccgatcggtgtcgtcacgaaatccgccgcctgtttcagcgtttccgacgcgttgcccatcgcgactccggttccgcagtattttatcatttcgaggtcgtttccgccgtcgccgattcctatcgagtcatctctgtccgccccggcgtactcaagcagcttcgatatcccgagcgccttcgtcaccccggcgggcatcacctcgccgcaggtgtcgggcagatgcttgtagctgtacgggtcgagcgcgaagcccgagaacagcttcctcatctccgcgaacggcttcgcgccgtaatagaccgccttctcgatacagtccatctcctccgccctcgcgaactcgacctgaccgaacagcgcgtcgcaggcgtccttaccggcgccgctcctcccgaagaaatccctcgcggcgtcgagctcttcccttgtcgtgacaagatgcccgtcggtgtggaacatcagcgccgcgccgagcggaccgcagacccgcctgagctcccgtatcatatctcccgggaaatagtgcgtgaacacggtcctgccgtcaagcctgacgtgcgccccggacgaggtcacgaaaccgtcgaacgggataataccaagcagccagccgtaaatctgactgtaaaatcttccggtgcagagaatgagcctgtgcccgttctccctcgccgcggagagcgccctcttcgcgctctccggcattcttcctgagtagtcgacaagagtcccgtcgatgtcgagaaaaacatacttctttgtcatgcgagggcaatctccaccgaggaaattctgtacggtccgaccccgaaggacaccgttttcccggaaacagcggcgtctccggtcttatgcccggacaggtcgacaagcgccgcgtccctcacatcatttttgagaccgagagtgatttccgcgttctttccggcgagctcgttcagccttacaagcagctttccatcatccgtgagagttatcgacgttatcttcgctgagccggtctcagccgtcataagcgagccggacggagcgagagcgcccttatgcgggttcgtcgacgcgtatctcaccggtaaacggaaggtctcggatatgtccgccatcccgcgcgggcaggaaacaccgatgccgacagctatcgttatctcgtgccgtccccgctcagggtcaaagtcaggattgtgcgccgtgttgatgagagtcgaggtcagagtattgtcataagccctgtagccgtacttcgagtcggtcatcaggtagagaggcgagccgtccccgatcgccgccgtgtagctctgcgccggaatgtcgtggttctcgctcccggtcatcgcgacgcccatcggcacgtcgcgcgtatatccgctcaccgcatagccgaccggcattctcagcgcgagcatcggggcgaatctccccgcggtctcgttccagtcgacgtttatgtggtagttcagcgccttcgcgcccttgtcgagcgttatctcgcagttcacggtcgagttgtagattccggcgtcaaaacgatagccctgtctcagcccgccgaaaccgaatctgtcaacgcgccggatatccgtcagcggctttatcgcgtgatacttgccgataacccacgcgctgcttccctcgagctgagtgtcaatgccgacgatgcccgcgaactcgtttccgtttatcttctcgcttccgtccttcttgtcgatgagcgagacaaggctcatcgtctgctggtcgaactcggcgcggatgtgctcgttctcgaggacatagctgttttcatatgagagcacgttgtgggttccgccgtagtagtacgggtacttctcgacctcagcctgtctgacgacaaccgtcgtgtaaccataggcgggcagcttcaccctgacgagcaggcggttgaactgatgatcccagtacctctggaaggagccgtcaatgaccgcgaactcgagcggttttccctccgcgtcggtcactctgagccgtcttatgtcgcctgtccagtcccagattctaagttcggtgacgtcctcccgctcagttccggcgggattgtagagggtgaacacgcgagtcagcccgacgccgcgctccgggttcggaacgcccgcgaagctcgtcacgccgaagcccacgcccgcgccctcagactgcgagccgcgctttatctcctcgtcggagagctcaaccatagaactgtcaaccgcctcggagagacctctcagagcgagcgtctcctcggtctcggcgtgagccgccgccgtctgatagagccccatcgcgtactcgcggctgtcctgaacgcaggaaccggtgaggatatcgtggaagtgggtgaagagcgtgtttctccatccggtctcatacgccttaaaattatatctcgcgccgaaaatatcgtgtccgagcgcggagagcgacgacgcctcgatgagcttcgcctcggtcatgcggttggctctctttatcctcgactgcgtggtgtagcatccgtcgaagaggaagttcagctcatggtcgacgacgggcagcttttcgcgtatctccggcttgtcggcaatcgagaagaactcacggaaggtgccgaatctcatctcaggccagatcttccagctcttcatctcgatcgcgcgctcaatgtcgcgtctcgtgacgccgccgccgtggtttccgacaccgtagacgatgagtccggtcttaagcccgcccatgcggcgcgacaaatcgatgagccccggaccgacgtgcggcgttatcgcggaattgtaccagtaaggctcgcggtacatgagtatctcagcgccggacggagccttgtaacgataaagaatgtgatccccgtcaagcccgcggcagtgatagtagtactttatcccggcaaaggaatcgatctccggaatatgcgcgctgtgcccgaaggtatcgggtgagaagtcgatcttaagcgactccgggtcgacgccccatgtcttcccgagataatcgcgcgtgtatctgacggtgttcagaagcgactcgccggacggcatattcttgtcggtctcgacccacgcggtcgaggttatctcccatctgccctcgtcgattctcgcctttatccgctccatcatgtcggggtcgtactcctcgacgagcctgtagaccgacgtctgcgactgcgagaaggtgaaatccgggtactcgtccataaggtcgagcatcgtgcggaaggtcgcgagcgccgccgagacggtctcgttccagccccacatccagttcatgtcgatgtgcgcgtgaccgcagaggatcagcgaatactccttcgcggctttttcgagcggcagaagcttcttttcggtctcctcgcacgcggagaaagtcagcacaccgtccctgtcgagcgatttttcggcaacgtcaagcgccgcggaaatgtcgtccgtgaactttccgtcattcgcgtcgtcgagcttcagggcgaactcgagctcggacaccacgcgccttatcgtgccgttcggcggcgttatgtgccacatggtctccttcggcataccgaaggtcatctcgtagcccatgatctcccgctctccgccgacgcgctgcctcagcgcggaaaatctcgcgtcattgttgttcatcaggttattcctcccgtaattctggttctgatgatactattctaccacaccgcggcggtattgtcaatgagcagatcggatttttccgaaaaaaagagtgagcgtttccgcactgcgaaaacgctcatgtatgtcactcctcagagcggagaacctcaatcaccgagttgtaatagctgtccatagcgctctttttcttctcgatcgtcgaggatatcgccgactcgttctttattatctcggtcagattcatgacccagcccttgaagccgtcgtacaggtacgcgaagtccatcacgcgggaatccagaatttcgcgcattatctttatcgactcctcgtcgcgtgtgcccttctgctcgaccgccatgcctatgtatttcggtataacgtcggtgtacgacatcgcgctcatagcctcgacgaccgctccgaccatcccggtgttatcgtggttcgccggcacgaccatgacagaggctccgccgtcgacgaccgtgtagtactcctcctgcttttcgtcatacttcgggagcggaaggacgccgaactcatcgctcatgttgcgaagcccgaaatcctcgcgcagaaggtcgttcacctgcatcgcctcgaaaagaacaactcccttcggaaacagctcgcgccttgtcttcgagagcgcgtcggttttcgttattgtgccgctgttagaacagaagagcttcgagagctttccgagcacgtcgagcgtcttctcggacgttatcaggtgctccacatggtcgccgtcgacttttgcgacccgcccgtccgcgccgtacaggaacgccgcgagtaaacacccggcggaggttcccgcgaaaccgtagaagtcctccgcgtcccgcttcgtgtcgccgttagtgtcgcggtagacgtcggacgtcaggctgttcagctcgtcgagcgtccatgtgccgtcctcaaccgccttgtagagatccgggaaaccgcttatttcctcggcttttgtcttgttgtagagtatcatccacgtctgctggaaatacgagatcgacagctcgctctcgatcatgtagagcttcccgccgaccatcgcgtcgttcagcgacttcacataccacggcttcgagaaatcaacgtaaggtatgtcgttccagtcggcgaaaataccgctctgagcgtccgagcccgactgatacatctgcccgaagacaaggtcgtaaacctgatcgccgctcataaccgactgcttcaccaccgaggatatcctgccgtagtcatcatagacggtcggggtgatcgtaatgttgaacctttcctccgccttccttgcccgctcatagaccgcgtcgtttattatatccccgttctgctcttccggcgcgaagccgtacatcacgcttgtctgctcgaccgtcctgaactccctgccctcaaagtcgagcgccgggacgctgtctgtcagcgcggaattctccgctgtcgtcgtctcttcatttgtcgtgtcggtattccctgtctccggcgttccggcggcgctcccgcaggacaccgccgtcagaacggcgaggagcgcgcatatcgctcttatgcttttgcttgtcatgataatcttcctttcggtcggtaaattcaaagttctgataatattatagcacatcatgacattattttctatcaaatctgtggcattctgtattgattttgtgacctgatgtcttgacagaaagcgcgttttgtggtataattcagatacaacaaggtcacaggagtgagaaaatgtccgcacagaactcagtcattccgggaaaagtgatactcacctggcagacagacagcgagctcaccggggaaaagcatcaccacccgcacgtccaccccttctgcgagctgtatttcttcgtcgagggcaaatgcagctacatggtagagaacggcatctacgatatgccgcccggaaccgtcatattcacccgccccggagagattcactcggtgcggataaacgagccctgcctgtacacgaggttcttctaccagatagacccggattttctcaccgggttgatcggcaggatgcatatgcgctgtttcttcgaccgtcccttcggtgagcggaatgtcctggtgctcccgcgaaaatcctatctcgcgtgtcaggaacgcgtaagacgcgacgtgacgatgcccgcggactcccccgaccgggcggcgacacttgtggcggacctgctgctgaacctttcagagatcaacgcggcgttcgaccggccggatacgacagacgccggcgaaaggtacggaactctcgtcagcaacgtgctcgcctacataaactcacacctcggggagatacgctcgacatccgacatagcgtccgcgctgtacgtgtcccgtgaatacctgtcgcgcagcttctcccgtgaaaccggaatgcgtctcggagaatacctgaccgaacggcgtgtctccgcggcgaaggaactgatactcggcggcacatcccctgacgaggcggcggaggtatgcggcttcgggaactactcatacttcataaacgtcttccgcagaaaaaccggagtgaccccgggcgtaatgcgcgcgtcaggagccggaaaaagcgtcatccggatggaaccagaagaaaccaaaactccatgaaaaaaggcgtcagccccgtgtgactgacgcccccattttatttcgcggcttccgttttcaccgcgtttatcgcggctaaaagcccgagcgtgtagctgtactccccgaacccggcgatctgcccgcggcagaccggcgctatgaccgaggtctcgcggaacccttcccgcgcgtgtacgttcgagagatgtacctcgataaccggcagctttatcgccgaaatggcgtcgcgtatcgctatcgaatagtgagtgtaagcgcccgcgttcagcactatcgcgtcgaactcccctctcgccgcgtgaagatggtcgacgagctctccctcgtggttcgactggaagaagtcgattccgacgtggagcttttcagccttcttcgcgagccttctgttgatcgcctcgagcgactcggagccgtagattccgggctcacgctcgccgagaaggttaaggttcgggccgttcattatcagtatgcgcatttttcttttctcctttttcctgattttcaacttgaataccgagaacatcagtgtaaaactccttcgcgaagtaaagcgttgcggacgacatattgccgtatttgcggtcgaagagacgatagcccgaaacgtcggtcacgattccgtccgcggtgacggtgtttttccggttgtcgaatacgaacgtctttccgtgaagctctatctccgtgaccttttcagcggagttgtatgtgacgctcccgtcctccgcctctatcatgttccggaacgggtagtagtccgcgccgttcacggtatagaccgggttctcgcagtggacgccgttccggtacaggtcgcggaagtcgttcccgcggatgaatatcttcacgccgtcccgaaccccgtagacctcgcgatacgcggcgcggtagccgtttccgtcgctgacgaactggttgtaggaatatttcgggtcgaggtcgatgttgtagtaaaaatcttccgtcccgtttccgagcgccgacagattttcgtttattatcttccgatttgcggcgtaccctgaaagcaccggcaggaacgaaaccataccgagcgcgaagacgaccgacacgaccgcgatacgcttcggctccgacaccccgcagagcacatccgccgagaccgcgatgaaaatgagcagtccgggaagaatattcctgtatccgaaagtgaccgaaaacacaagcatccccaccgaagcgagccccgccaaaagcagagccgaccgctcagccttcccggaaaacagaccgtaaagaccggcacaaacaagcgcgaccgtcaacacaagccctgtcgcggtatacctgccaagcgcccataaaatcaccgccgcgaccgccgccgaaccgaggagcgccgggaacaatttgttccgcctgaacccgtccgccgcgagcagtgcgagcgttccctcaaacaccaagaacgccgaatccttcccgaccgaatactcatagacgtttttcagccggtcgatcatcccgagcttttccgagacctccgccgcggctctcccggacgtcgcgggcgagagcatgaccgtcgcgtatccgaccgcgaggaagaacagcatgacgccgcacctgagcagctttttcctgtccctgacgcgagaaagcgtgaagagcaaagcggcaataatcgccgccgcgccgccctgctcggtcgaggctcccgcgaggaacatgaccggtattgtcaggacgcttatcctgtcctcggcagctcttctatacaagtaaaatgccgcgaaaaccatgaccgtcgggtaaatataattcaccgcccccgacatccagaaaacgccctcgcgaaacaccgtccacggcagaaacagcgtcccggaaagcccgagcgcgaggaacagcagcctgttctccgccctcacagcgcgcgccgcgaagaaatacacggcaaatatcatcagcggtatcaccgcgaaaaacagcctgtccttcggtatcagcacgagctcgagaagcagatgcacgatggcgcgaccgtttatattcagataatgcgagacggtaagatcccggaaattccggagcccgtccctgaaatacagcgcgtaattgaaatcatcgccgtaaagcgtcgacgccgccgcggtaaacgaatggacagcggcgcagagtatcgtcacaatgactgtcagataaaacagcgccgcgcgtctctttgacggcttttcaatgcgtctctccgtattgtccacagaatttgccaccggagcgtctcagcccttttcgagcagagaatcgtagtaatccttcattgttttcgcgtcctcagccatcgtccctgccgactcactgatgaacctcggcgcgagaccctcgcggacaatcgcctcgatgagcggctcaaacgccggctcaaagccctcgtcctcaaacctcacgtgcttcttctccccgctcttcgtgtactctatctttgagaagtgacagtgaagagtcttcgcgtactcgtccccgagctcgttcgctatccggtcgaaaaccttgcggtaatcgtccgccgtcacgaacacccctccgacagcatccggctcgtccgggtcgtcaaacactccgctgtgaagccttccccggcagttcaggtgcccgaagtcaacgaccgggtaaagccgcgacttatctatcttgcagagcgtcagaacctcagagagcgtcccgagctgattcagctttcccatggtctcaagtccgacacgcaccttcgagtcggtgctctcaagcagcttcacaagcgtgtccgacgcgtactccatcgccgtttcgcgcgaaatcttcgcggcgcttcccgtgtggacgactattatgtccgccccgagccattccgcggctctcaggctctccgttatatatcctatgctgttctgccgcttctccggctctacgctcgacagcgagatgaaatacggcgcgtgcagagacagcgcgatcccgttcttcgccgcctcctcgccgacacggcgcatagacttctcacccgctctgagaccgtttccagcctgatactcatacgcgtcgagcccgcgcgccttcagccacgccggagcctgccacgtatccttgtttccctcggcgtaaaagctctccgagtttccgccggttccgaataatgctctcaaaatatgacctcctcagccttttataacgtcaaaggctctcatgcaagcgtcctcgtccggaagctcgcccgtccagttcccgaacgccagcgccccctgatagacgagcatccacagtccgctcgctgtcttaagcccgagttccccggctcttttcagaagctcagtctcgagcggctcataaaccgcgtcaatgacaagcgagcccggacagagagcctcaagaaacgaaagcgactcaaaccccgccttaccggtcattcccgctgctgtacaattgacgagtatatccgtctgttcagcggcgtcacgcagctccggcaaagtcaacccgccataagcgacccccggcgctcccgcgtcagacagcatcacgcaaagcttctccgccgattccacagtcctgttgagtaccgtaagctccgcgccgccgagcgccatcgagagcgccacagaccgcgctgctccccccgctccgagcaacagcacgcgtttcccgcgcacaaccgtatcaagcgaagaatcaaccatcccgagcgcacgtctgaccgtcagcagtatcccccgcccgtcagtggtatcgccatacagacgcccgccgcgtatcgtcaccgtattgaccgaccgcagaatctcagcctcacgcgttatctcgtcgcaaagccccgccatgtcggtcttcagcggcatcgtgcaattgaagccggaataaccctccgaaacaagcctgccgaccgtctcatgcagagtatcgcaggtcgtttcaatctttatatacgaaaactcaggaatcaccccgcgcgcgaactcctcctgaagccgcggcgacctgctgtgggcgatcggcgaacccagaaccgcgcacctcatcatatcttcttcggcttgtctgccatgacgttgggcgcgacgtttgccgcgttccgcgcagcctgcgcggcaggcgacggggcgttcggtctcacggcgatctttatgccgtagaacttcagcatatccccgatgccctcctgtatctcctcacgcgagaaatcagcctctttcagcgcctcgtcggtgaactccgatattcgcgcgtaaaaatccagacctatcgcgataaaataaggctttttcttgtcaaacgaatcaaacagcagattctccgccgtattgaccttcccctccacgacaagctgacggagccgcttcagcactatccccggctcgctcgtctccggaaaagcattatccggcacaatcggcgaatccttcttgaaaagcgccttcgcgagaagcgctgtaaactgatacaactggttcataatattgtctcctttttatttatgtgaacgataataagcgtgtaaaaccggacgctccaaaagacgcttgaaacgaaaaaacaacgtcgttttatccttgatcggcggaacaagaaacgaacgcataccgcaccgcttcgccgcccacacgtccgtaaagacctgatctcccacagcggcggttgacaaaacgtcagtccccatatgctccatagcggcaaaaagccccttccgcgaaggcttccccgcgtcggaaagccagaaacagtcaaggttccggcagaactcttcaacacgctcccgatgattatttgacacgaaagctgtagagataccggcgtcgtgcatagcctcaagccaccccgcgaccttttcggtcggaaccgggtcgtcgtacgtcacgagcgtattgtcaatatcgagtatcagccccctgaccccgagcgacaacagaaactccggcgttatcgcgtatatatcatcaaatatgccgtccggcatgaatccactgaacatctttattttcccgtcaatagtcgatatattatccgtgcgccggcaaaaagcccccgaaacacacggtcataattattttatcacatcacagccaaacaggcaagcgaaatttgtaaataattatttgagaacacggttgacaagacgcggatttcgaggtataatattatatatgagttttttatgatgcggaagtgcggcataaacgtaccggtcgcgtcaggttcatttttattattgtgaaaaaattctaaagagcagtttttcggaggaatattatgaaatacattttcgtcaccggcggagtcgtcagcggtctcggcaagggcatcacggcagcgtccctcggacgtatgctcaaagcccgcggagtccacgtcaaaatccagaaattcgatccctacctcaacatcgaccccggcacgatgagcccctatcagcacggtgaagtcttcgtcaccgacgacggcgcggagacggacctcgacataggtcactacgagcgcttcaccgacgaatccatgtcccgccactccaacgtcacgaccggcaaaatctactggtcggtcctcaacaaagagcgccgcggcgactacctcggcggcaccgttcaggtcatcccccacatcaccaacgaaatcaagaacaacgtctacatcgtcggcaagaccgacccgtcctgcgaagtccttatcaccgaaatcggcggcaccgtcggagacatagagtcccagcccttcctcgaagccatccgtcaggtagaaaacgaagtcggacacgaaaactgcctcttcatccacgtcaccctcatccccttcatctccggctcgagagagctcaagtcgaagcccacacagcacagcgtcaaggaactcctctccatcggaatccagcccgacatcctcgtctgccgcaccgaaatggagctccccgaagaaatgaagcaaaaactcgccctcttctgcaacgtcaaaaaagagtgcgtaatccagaacctcaccgccgacagcatctacgaagtcccgatgctcctcgaaaaagaaggtctcggtcacgtcgtctgcgaacgcttcggcatcaaggacgaacccgacctcagcgaatggaccaacatgctcgcctgccgcaaaaaagccgacaaaacagtaaaaatcgccctcgtcggcaaatacgtcgaactccacgacgcctacctctcggtagccgaagccctcacccacggcggcttcgcaaacggcgccaacgttgaaatcggctggatccaatc

SEQ ID NO: 87 - DNA, 32744 bp, Unknown
  16S sequences of unknown bacteria
aaggagcgatgccgcggccggtcgagccgtaagccttgtcggcgagtctccactcctcgagacggtcaagaatgacgctgtacgggagagtgatgcacgcgcggtcgcttatcttgaggttgtccggcgtgatgacgacacccgccttgacgaggcgcccgacctcgtgatagaggtgcttcaggtcgacgaccatgccgttgcccatgatattgacaatctccgggcggagtatgccggacgggagaaggttgaggatgaattttcctctcgaatttatgacggtgtgacccgcgttgttgccgccctgataacggcagactatatcctgttcctcggagagaaggtcgaccatgcggcccttgccctcgtctccccagtttataccgacgatcgaagtaagcattttcagaattcctttcagccttccggctctgtatttttgctgtcctgcgaaaacaaccttgaatcagtgtttcctgtatatattataccacaaaaaaagattttgtcaaaccccaaaggcgattttctctatacaatgatcaaataccggatataatcaaaatttatacccggtattgaagtcataaaatggcgttatatatgcgctcaggctctgacaagctcgacgcgcccgttgacaggcaccgctatacgcatgaagtcagcggcgaggcgtccctcggagaccttcccgcccatgcagtcaagaaccgtgtagtcatacgcggcactctttccgccgagatcgaatatgatgtccttgtccatcgacgcgttcacgactgatattttgtcagtcagaacgtttatgtacgcgatcctgccggaatacacggcgccgacctgagcgtttccgagtcttgacgagacataattgtaatccgccgcgtagcccttgtaaagcatttcaccgtcgagcaggacatttctgttagcggtccagaactcgagatagctcttcaccatcttcgcgtggtccgcgggcatcctgtcgtgcagcaccgagacctgcggcacggcgaagaggatgttcgtgagctggaacgccgcgagctcgaccggctccgagtagttccacatgaccatatccgaatgaacggcagtcccgccgctcgtcattctgagcgagagcgagccgacacggttcgacagagagtcgttcgggcagtccgcgaccctcagcatatttccgaatgtgcgcatgagaggaccgatatatccctgtctgaactcgatcagtatctcgggatcgatctttctgagctccgcgaggacgtccttcatcagtctgtcgacggcgtcgtagaccgagacgtagtccatgccctccctgacctcatccttctggtggaagctgtcgatgaagtcgagcttgaagccgtcaagaccccagtcgagcttcgcgcgtctgtagacgtcgatgagatattcgcggacgtccggatagcgcgggtcgagcgtatatgtcttgtccatgccgcagccgccgagcatcttgtccttgaagcgctcataagccttcgaatgctcgccgacaaacgggaccgaataccagagtatgaacttgagcccggtctcatggacggcgtcgacgaacgccttcatgtccgggatcttgaccggagtcacctcccagtcgccgcagtacgcgtagccgcgggcgttgttgtcggtctgccagccgtcgtcgactatgatcgacttgcagccgagatcggcgaagaatctgcactcatcgacgatgcgcgggacgtcaatctgctggtggaagctgtaccaggcggaataaagcggctcacgagcggtgtccggaacaagcgccggagtgtaaccgtcaaatgtctcccaccacttcgaaacgtcctcgacgcacctgtagaacgggatctcgcgggtatcgacgcgtatctcagccgtgtaatcggagatcgcgcagtcgacgttgagcacgacctcattcacgagcttcgcgttctcctcgacgacgccggagcgtatcttcacgctgttcttcgcgtcggagcaggcgattgtcatgcggttcgtgtcatcatacgcgacgttcgaaagcaccgggcaggaacgcatcgcgttcgagtcgtaatatccgccccagtcaggacgcacggtcttgtttctgtaggagagcgggctccacacggcgttgacgccgatgtcctcggtgtaccacttcactctgatctcgagcttcttcgcggtctcagactttgccgtgagcttcagggtgactatgccgggagcggtattctcctcggtcagcgcggcgtcgaagccggcggttgctttaagttcgtacattgaaatttcctttcaaaaatatttcagtcagcgagctttatgacaatacccggagcggacgtgtcgcccgggtcatgcctgtcgcagatcctgtcaataagctctccgggtatgacgagccgcccggagacacgctgaacgcccgcggtgacgtcctcggcgctgtcggagaaaatgtcctgcatgagaacgcgttttccggatatgtcccggtcgaactccagcgtcagcgtctcatatcttccgaaaactccgatgtcgcacggctcgcctgcatatgccgagaccttcgccgggaggtactcaagcgtcttcccgccggtcgtacggtcaagagccgctatcgaatacgcgccggtcagcggatttttcgacgcggcgaggaacggtatcgcgtccccctccgcgcgcggcagctcacagcgcctcgagatcgcccccggagccctgaacgacatagttttcccggcgacaaacggccagacgtccggctcgcgaggcgggtaggcatagctgtcggtcagaagtctgtccgacacacgcacctcgtccgatctgaacgcgaacggcggagcgatgcggtgccatctgacggcgcggacaacctcggcgtatctcgcggtgctctccctcccgcgccccttttcgaagcgctgatgccgcatgacgccgaccgaacagccgagcgcggcgccgagatacacgctgtcctcgacgttgagtatcccgcggcacctgtccgacgcgcaaagcccgctccctgcgagtagtccgacccggttcattgttatcgccgtcgaaaactcgccgagaacgtcgtatgtccggagaaagtccgagttttcaagtatccttcggttatacatgatctcgtcatctatcattctgtcctcgccgcagacatactttccgaacggcggatacattccgcgcgggtagtgctcgatcatcagcccgggcgcgcgctttctcacgctctctgtcagcatcacgcggtaatccgcgttttccgacattcttccccagtcgaccttccagtaggatatcccggcgcgcgagcacatcgcggcgcggtcctcccagtattccctggctttgtccggagtttccggcggctgaccgtcggtgaacggcatctggcacgcgacccatacgcccgtgcccctccatcctagcgagcttatcttccggcatatctttccgagccgctcctccggggttccggtgaaggacggaaacctcgcggggtcgggctcgagcgagccgaagcgcccggtattctcagggtttctcgtccccggcggaacatcccagccgtcgtcgagaagcgcgatgagatcgggacggatctctttcatatactctgaaagaatacccctctctccgaaaagcacatcctcgttcatattctcacggacgtccttcgcgtcgtcgcccatctccataggtctgatgcgcgcctgcgtcgcccatgtgcagtagtaatccccggtttcgggtattctgtcgggtatgagattcatgcactcacctcagtttcagatatcgaacacgaccatcgcgtgcattgttacctttccgacatcgaccgacacgactccgttctcaaacttatagtcaaggtcggtcgtcacgatctttccgtcctcgcactcagccttataaacgcgcttcggcgccttcgggagtctcgcgtcaagctttatctcacagagcgggatgatatcctctatgacctcgatgttcgcgcccctcttggatgtgtgcgcgaagagaaggtgcgcgatatatctcgactcgtcctcctgcttcgtgaaagtgacgatgccgcggtcggggagattcaccttcaccgaacggtcgtcgccgagaagattgtctatcatgtggagaacaagctccttgaggtgatacgagcccttgtccgcgtagtcatggaagacgttccacgcgatgtatccggtgttctttgtcagaactgctccggctctgtccgcgccgggattgttcggcgtgtgctggtgcgagcagaagtggtcgggggtgcggttgaagtatgtctcctcaagggtcgcctcgacgcttccggtcgtcggctttatgttcatcgcctgcttgtacatgacatacgcggttctgccgttgacagcctcgtattccggtatcatatagttcggcatgaactcgttctttccctcgcagacagcgccgagatcgagagcgaactcgtccgaggcggtcttcagacccgactcgccggagcagagaatctttccgccgtcctcgaggtatctctcgagacgcgacttcagctcgtcgtcgacgcggatgatatccgggaggataaggagcttgtatttcgagaagtcctcctcgcggtcgacaaggttgaatagatgcttgccctcgagaagtatcctcgacgcgccgacgtcatacgggcaattgcggtccgggctgttcgagaacgcctcggcgctgagtatcgcgatgtcggcgatatgctccgccccgcgtacatacggctccttcgcctcgacctccgcgtacgccttgcctatcagttcataggtcgacatattcatctcgccggtcgggtggagctggtcgccgatcgagcacttcgcgccctcggctatcgacagcgccgcctcgtatctgagcgcgttcggatgcttgaacccgccgaactctccccacgtcgtgtggaactttccggtcatgccgaggaactccatgccgagcgtacggcagtaagccgcggacatcgggaaatggtcatatccccatccgccggtcggaaggctctcaagctcgagatgcgtgtcgaaatgcgcgtggtcacggcggccgcgcgtgatgtttccggcgttatggaagatcgtcgcctccgggttgtacttgtgcacgacctcctcggtgcggcggcagtactcggcgtagaccatgtcgccgtgctttttcacgtcctcctggtttctcgggtcgagaccgagctttctcatcgactcgatgcagcggttgcacacacaggggcgcggagccgagatatcgaggaatattccgctcggattgtacttctgcatgacctcctcgacctgagccatcaggtaatcgagatacggcgtattgtagcagatcagatgataatacgcggcgttcagaaaatcggctccgtctccgggatgccacttcacgatgtcctccggatggcggcgcgcgtacttctcgtcgtgtccggcggagagatacaccggcgcgttgacgccgatctcacggcaagcctcaagctgtgcgccgagaaggtcgaacttcagcttcgggtgcatctcgttcgccgtcgacggatgatacgcccagccgtggtggcacttcgagaaaacggtaatcgagtcgacgtgaccggctttgagagcagcctggaactgcgccttgtcaaacttgtccccgacggacgggaccgcctcggaggtgtggaagtcgagatgaacctcgcggtatctcagtggtttcataatcttgtttccttttcagtcattatattccgggatatatatcccgctgtataaatgatacagtacagtgatgcttttgtcaagagttttcgccgaaaaatactgttttctacatggacttttactgttttttcaagtagccgctcctcacagctcgaaccagaaggtggagcccttaccgacctccgactcgacgccgtatctcgcgtggtgcatctcgagtatgctcttgacgatcgacagaccgagtccggagccggtcacggcacggcgatgcgttttgtcaaccttgtagtagcggtcccagatgtatttcaggttctcctccggtatgccctctccgtggtcggtgacttctatgcggactatcttcgagccgttctgctcccttacgatctggcgcacctcgacgagcttctccccgcccgaatgcgttatcgcgttgttgatgaaattgtagacgacctgtaatatccgcgtgcggtccgcattgacgatcacctcttcggacgccgtgaaatctatagtccacccgtcctgctcggtcagtttcgagaagcgcccgatgacctcgcgtatcgtctcggtaaggttgaaatcactgagcgacagagtctgcgttccggactggagcttcgatatatcgagaatgtcgttcacaagcgacgtcagtctcttggtctcgtcgatgattatctgcatattctccggagtgttctcgccgggtatatcccgcatcatctcggcgtagccgccgatcatggtcagcggcgtgcgcagatcgtgcgaaatgttcgcgataagctcccgctggagcgctccggtctttgacagctcctccgccgcgacagacagcgtgtctgacagctcggcgatctcgcggtaccctccgactccgaaacgcacgtcatagtttccctccgcgagcagcttcgcgccggaatttatccggatgatcgggcgcgagacctttctcgcgagcaggaaggacagaagcagcgctatcgccgtcattatcacgctgacgattataagctgtgtcctgagcgtctttatggtcgagcccaccggggatatcgtcgtgttcagtatcagcagtatgtcggtctgccgccccgcgggtcttccgacgcgggtatagattattccctctccggaattgtcgaccaccactctgcccgtatacgtcccggaactgttttcgctgtacctgagatcgttcagcggaaacaccgtcatcttctcaccgccgctgcgcttcgcgtaataatacagccacgcgatattctgctcatccatcctgtgaaccacacagtccgaacggtaatgcttcgacgtcatacggctgaacgccgcgccgtccacctcgtacataaggatgcagacgtcatagtcctgcgctatcctctcagccagcatactgagctgcacaggggcaaggtcgcaggccgaggtcatgatatccgccgcgcgcatgatctcgccggtctttatcctcttgtagatattcccgaaaaacacgacctgaaagcaccagagtatcacgagaagtatcacgagaaaaagcatcaggtaggagaacaccttccagcgtatgccgatacgcgagccgcgctttcttatcttctcgcgctgtttcaccagcttttcggaatcccagaccgccatcccccggccggcgggcttattttgtctcaaaccggtagcccacccctctgagggtgacgatcagcctcgcgtactcacccagactcttcctgagcagctttatatgggtgtcaagagtgcggtcgtcgccgtagaaatcatatccccagacctcggttatcagcttctcacgcgacagcgcgatccccttgttcttcagcatatagaaaaacagatcgtactctttcggcgacatatcaacacgcttcccgtcaacgtaaaccagccgcgcggttatatccgccttgagcccatctatctcgacgatctcatgcttgttctcagcgggcgcggtggcggggcgggagcgtttcatcacggcgtctatgcgcatcatcagctccttcggggagaagggcttgaccacatagtcgtcaattccgagaccgaagccgttcagcttgtcgtattcctcgccgcgggcggagagcattattatcggtgtgtccgaaaacttgcgtatctcgcggacggcggagaagccgtcaagctccggcatcattatatccataattattatatcgaaggtcttctcgcggcagagcttaacggcttccatgccgtcagccgcctctgtcacttcgtgcccctcaaactcggcgtatttccggataagcgcgcgtatgcgctcttcgtcgtctactgtcagtatcctgtacattcggtgttcctccgtcagattatttcacaggtataatggagacactgaacaacagtcgtttccggagagaaatcccccgcaaaccacgcgttttcccgcggcagccgcaactattcagtgtatccgcagtgtatccatatctattataaaacagtttcgcgtcaatttcaagaaaccgtatgtaaaaaattctgtcattccggatctttgccgttatcgctcttcctgaaccggttcctgtactctcttggggatacgccgaccgacgcgcggaaaacattcgagaaataattcgcgtcagaaaacccgaccgtcaggcctatatcctgtatcgacatatcggtcgaatcgagcatcgcgcgcgcctcgtctatccggagggcgttcacgtattgatttatcgtcatgccgctccggcttttgaagaggtggctgatatatgacgcgctgtaatgcgtctgtgcgcatatcccctcaagactgatcttatggtcatgcatattgcggattgagttgcagatatggtaatagaggtcatcccgtccgggtctcccgccgcgtctgtctgaagattcccgtgtctccagatactcaaggcgtatcatgtcgcaaagcggctcgatcagtgtgtcaaccttctttttatccgggatgtcggtcgtcagatgggcctcatagaccttccggacatcctccggggcaagtccgaattcgcggcagagtttcgacagcttgtgcatagccttcggataaagcactgagtcctccgcggggcggtatccggacacactgacaaagtcagccggtttgccttcggtcaggatcgggtaaacatactccacaacgccggcatggcacatcccgagccagctgccctcggagcatctgtcacataccttctgctgactgaggacgcacttttcccatatttcgctgtctgtcttgatatacaggcagaacttgttcacgtgcatattgaaatcagtgtatctgacgcatatcggcggatatctgtcgccgcggctgtgtatcgtcacgaacagggaatgctccctcacaagatagtcaatatagttttttatgtgttcatgtgtgctgctcaactcggtatctcctgtaatattatgctgaaataatcatttgtgcattattttataggtatttgaaaatacagtcaaggttttcgctgaatatatatgttataattatcttaccgaaactctgtatacattatacaatacagatgccattttgtcaatagacgatcggaggaaacgtaatgacgataaacactgatttttgcggagggaacgcaatgacgataaacacggatttttgcggcgggaacgccataatcagatctgtcgcggatgacactgtcgtgttcagcccggatctcagggacactgagggagactggttctactgggcattcgaggttaaaggggcggcgggaaagactgtcagcttcgtgatggaaccaggctatgtcggatacttcggagcggcggtcagccatgacctgtatcattggaactggtcagacaccgcgaccgcggcgaacagcttcacctatactttcggagaaaacgagaacgatgtcttcttcgcgcacgatatgctctatcacccgtcgcgcttccacaagttcgccgagctccgcgggataaaagtaaagcatctctgcgacgacaacaggggcacgccgataccgtacgccgtgatcggtgagggaaaacgcaatatcatcctgacggcgcgccatcacgcctgcgaggcgaccggcgattacatcatggagggcatcatcgacgagtacctgaaaaatccgattccggacacacgcataacagcaatcccattcattgacgccgacggcgtggtcgccggggatcagggcaagaaccgtcgaccgcacgaccacaaccgggattatcttgacacgatatataacggagtccgcgctgtaaaggagatcgccggaaagggcgacgtcctcgccgtcttagaccttcactccccgtggcacatctcgggcagaaacgacaagatcttctgcgtcaggaattcagagaaaaagctcgacgacatgagacttttcggcagatgcttcgaagaatccatatcgccggacgcgatgaaatacagcacgaaaaacgacattgaccccggcgttgagtggaatatcggcaaagaacgcacgagctgcggcacgttctgccgtgatattcccggcgtggagctcgcgttcactctcgagacgacatatttcggcgagcccggaaacgtcgtgtcacaggaaaaactggtcgcgaccggaagatgcttccttgaagggttcagaaaatatcttatccggaaaggaatggagaaaacaatatgacacgcgcgataataggcttcaccggagacataatgtgtcagccaggatacgcggaaatgtgtacggtgaacggcagaagagacttctcgcgtatgttcgcgcggatatccgacacactgaacgagtgcgattacctcgtcggaaacctcgagacaccgatagccggtgaggatcttggattcacaaacgaacgatactgcttcaactcgccgacagagttcgcggaagaaataaagcgtgacggcttcgacctcgtctgcctcgcgaacaaccactgcatggaccgcggcgaggaaggaatattctgcacgctcgacaatcttgacagaatcgggctcccgcacaccggtctcaaccgacccggggaaaagcgctggtatgccgccgcaataaacggcatacgcgtatctttcgtgaattacacgtacggttcgaacgccttcgctcaccacagattcctgtcagacgatctctccggaaccgtgaatcttttccagccgcaggagacgcttcccggctcgatacatctgcttgagagcatggaaacaatcgggcgcgagaccgaccggctctaccgtcatccgagcgacgaatatgacagatacataaaacctcacctcgatatgctgagaaacgacatcgcggacgcgaaggctgagtcggatttcacagtggtcgtcatgcacagcggcggtcagtacaacccgacacccgatccgtacacgctaatgctcgcggaaaagatacgcgaatacggcgcggactgcatagtcggtcaccatccgcacatactgcacggctatgacgtgaagggcggcgtgctctgcgcgtactcaatcggaaatcttctctgcataccgtcctcaatgcaggacccggtcggaacagcgtattccgctctcctgcggctgacgctcgaaaaagacgaaaagggcacgaggcttaccgacgccggtttttcgctgatacgcacaatcgaaccggaaaacggcgcgccgtactgcgtcgagtgctctgcccccggtgattttgacaccgacgaggctctgagacaggcgtctatcctgagcggacgtacagagaccgctctgagacacgtttaccatattgacattaattaattctataaggagaacaatcaatatgaaaaaaagaatgatcacaatctgtgttctcgcggcgatgctcttatcctgcgcttcctgcggctcgacagaaaccggaaacgacgaaaccacgaaaagcggcggaaccgacacgacagtcagcgacacaaccgccgagccgaccgagtacgacaaatacccgctcccggaaaaggacatggacggcttcaacctccgcttctgcaactatgacgactcctggctgacctggactataaagactctcgacgtcgaggaagagaacggcgacaagctcaacgacgcagtctacgcgagaaaccgccgcgtggaggcgaaatacaactgccagataaccgaggaactcgtcgagaaccccggcaattcaatgtcaggctacatcatgtccggcgacgacctgtacgacatcattatggttcacgacgaggcggtgagcagtctctactgccagggctacctcgactcatgggacacgcttgagttcgcggacacgagccgttcatggtgggacaacaacgcgaacgaagtgttccagatcggcggaaagcagttcgccgccgtcggtgatttcaccctttcgatggtgtgccgcgggttcgtcatgctcttcaacaaggacatggtctccgacctgaacctcgacgagagcctctacgacatggttcgtgacaacaagtggacgctcgacggctacgcctccatcgctaagaacttcgtgaaggatctgaacggcgacggaacaatggacggaaacgaccagtacgcgacgacaggcgcggtcaagctccatttcggctctctcgtgaccggatgcggcgtcaagtatatctcgaccgacagtgagggcgtcccgcagttcgcgatccccggaaacacctacgcgttcgacgtttttgagaagatattcaacatccacaacggaacgaatatcttctacaacattgtaaaaacgaatgcccacgacggaagcaacgaagctatcacattcttcaagaacaaacagaccgcgttccacggcacatccatgaaaggcgtcgcgaacttccgcgacgcgaacttcgatatcggaattctcccgtacccgaagtatgacgaaaatcaggagaattattatattctgacctccggcggaaccgtagcgacaatcccggtcactctccccgaggacagacacgagaatgtcggaataatactcgacgcgctctgccgcgactcacagcagaaccttctcccgacctacaaggagatcgtcctcaagacaaaatacgcgcgcgacgaggattccgcggaaatgctcgatataatcttcggctcgctgacatatgacctcggactctccgtctggccgcaggacacgtactacaagtatatggagtcctatttcaagatgaccgacaatttctcgtccactaccgacaagataaagagcatcgtcgagaaggacatctcggaccttgtaagctcactcaacaagtaaccgatgtctcaaaagaccgccgcgccggcggtctttttttgcgatttcggggtatcatcttgacatatcgctcgcgatgatgtaaaatatatccgtaatatactatcaggagacaggtcatgcgcagtattgacaaaaacgagatatcgccgtttcttcgctacgccaggataatacacgttacgccggactacagctacaacggcatcgcggcttacgacgcgcgcgcggtgtacatactttctggcggcggaaaactttctgttgggagccgttcctaccgtctcgcgccgggcacgctgattatatggcaggcgggacaggtctacggctttcaggacgtcgcggaaagcgtcgatctgatcatgctgaatttcgatttcacgggcggcggggaggctctgctgattccggacagagcggagaacttcgacgcctcgcgcgtgcgctcatacccggcgttcactgacggcgcggacgacaacggcgtattttaccgtcccggcgcgttcgacactgagacgctcatgcggagccttgtcgacgagtacatgatgtgccgcgtgaactccgacctcgcgtcaaaaggactcctcacaaccctcgtcgcgaaagcgtcccgccccgcggcaaacgaccggcgcgcggatgagcttatcgcgtacatcaattcacacgcgtcggagaaaatgacctacgcgtcgctcggagccgctttcggctaccatccgaaccatatagggcggcttgtgcggaacgccgtcgggatgccgcttcacgcgtatgtcatgaagatacgcgtctcccgcgcgctcgcgctcctctccgaggaggggaggacggtcgcggaaacggcggagttatgcggcttcccggacagcgcgtccttctcaaagcgcttcaaggcggagaccggcgtgacgcccgcgtccgtcagacgccgcaaaaatgtttgattctgacatatttctgtttgagcccgccattgtgtaaccgtcctgaatgtgctataatatcagcagaacacggaaacagatttccgtgaaaaggatatgagaggtatttcagaaatgcgcgattatgacgtaatggcatggtatttcccgaactggcaccccgaccgccgcaacgacgagtggcacggcaaaggctggacagaatgggaggtcacgaagtgcgcgcgcccccgcttcgagggacacgatcagccgaagctcccggtatgggggtacgccgacgaatcagacccgaacgtgatggagctcaagatccgcacggcgaaggagtacggaatcgacggcttcatcttcgacacatactggttcgaggacggaggctacaggctgaacgcgcttgaaaagggatttctcggggcgaagaacaacaaggatttcaagtttgccctgatgtggtgcaaccacgacccgatctacgcccacccggctacaagacgcaagccgaacgacccgctcctgagcggcgagctcagcgaagagggcttcatccgcggctcggagtatttcctgaataactatttcccgcgtgagaactattacagagtcgacggaaagctgtggttcgcgatatggatgccggaaaagctcgtcaaggggcttggcggtatcgaaaacgcgcggcgcgtcctcgacgacttcagaaacagagtcagagccgccgggctcggtgagctgtatctcgcggcgccgatgcacaacgtccccggagcgtggaacggcgaccgtgaaaaggcggacgggtatctgaaggcgctcggttttgacggaacggtttgctacagcaccccgacagacgcaaaggatttcccgcgcgagagcttcggcaaattcatcgacgacgccgtcggattcatggacaggatggattcactgtcgtctcttcccttctgcccgacaatgtcgaacggatgggactcgtcaccaagaacgctccagtccgagatatatgagaacgtcggatacccgtggagcgttgtcacggtcgaccgatctgtcaccgagtttgaacgcgggctaagagccatgaaggaattcgcggagcgtcccgacttccgcgggaatatggtgacgctctcgacatggaacgagtggacggagggcaactacctcgagccggacgcgatgttcggatacggatttctcgaggcggtgaggcgtgtcttcggaacaaaagactgacatagtgccggtaatgcccggcggacaaccacacagatgaaaatcatagaaccgtcggaatttttttcggcggtttttattgacaaaatccgattccggtggtataatacattcagtacaggttgtacgaaaggaaaaaacatatgcgttatgtatttgacaatgaccttcacatccactcgaccctctcatcctgctcgtcagacccggctgagagtaccgagcggatactcgcatacggggtctccaaccacctgaagacgctctgcctgaccgaccacttctgggacgacgcggtgccgggcgcgtccggctggtacgcgccgcagaatctcaagcatataagagaggctctgccgctgccgcaggcggacggaacaagattcctgttcggctgcgagactgagcttgacaggaactgcacactcggaatctccccggaacactatgatctcttcgacttcatcgtcatcccgacgacccatcttcacatgaacggcttcacctgccgcggcgacgagagctcggcggagcgcgcgaagctctgggtcgaccgtttcgacgcggtgctcgggatggatcttccgttccacaaggttggcatcgcgcacctgacctgcgagctgatgtcgcccggaaagttcgaggaagtcctctcgctcatcccggacgcggagatggagcgtctgttcgcgaaagccgtcgagaagggcgtcggaatcgagctgaacttctactcaaagcgtctgaccgcggactccgacataaaatatgatcccgacaccgtcctgcgcccctatcgcgtcgcgaagaagcagggctgcaagttctatttcgccagcgacgcgcaccaccccgccgacctcgacgcagagaaggagaacgcggagaggataatcgatatgcttgaactcgacgaaagcgataaattcataattaaataaaaacatcgaaaggaaccacaccatgaaaaaaaatctcctgaccccctcgatgggatactaccgcgcgaaccttcactgccactcgaccgtatcggacggaaagaaaactccggaggagctcaaggaattctaccgatcgcatggatacagcgcggtagcgttcacagaccatgaggcgttcatcacgcacaacgacctgacagacgataagttcgtcgctctgaacggctatgagcttgaagcgaatgacccgagcggctccggaaagacctgccacatctgcttcgtcgcgcttgacccggagaatgacctcgacgtctgctatcaccggacgaaatatttctggggcaattccgcgggctatcgcgacaaggtgcacttcgacgagaacgcgccggacttcgagagagtctacagtcatgagggtataaatgaaatgataaagcgcggacgggacggcggcttcttcgtcacctacaaccatccgacgtggtcgcttgagagttacccggaatacagcggatacaagggaatgaacgcgatggagataacgaactacggctgtcaggtcgaaggctatgacgacgacaacggacacgcctatgacgacatccttcgcggcggcgagcgcatattctgtgtctcgaccgacgacaaccacaaccatattcccgacaatgacccgcgctccgactcctttggcggatacgtcatgataaacgcaccgaagctcggataccgcgagctgacaagcgctcttgaaaacgggcagttctacgcgtcgaccggaacgtcgaagcacgtcggacccgagatccgctctctcgacttcgaggacgggaaggtctacataacgacctcggcggtcaggaacatagcccttatcacctgctcacgtgcctgccgcctcgccgaggctgcattcggggagacgataaacgcagcgtccttcgatgtcggcgcgaatgagacctggttccggattgtcgtgaccgataaagatgggtacaaagcttataccaacgcttattttctggatgaactgaataaataaaacacgggaccgcggcgtatgccgcggtccttctgtcgtatttccggttatttaccataagttttcattattttttcgatctgttttcccactcccgtaacctttgaggcacatatcgaggcgaaattgtccttgccggcgacagccatatcgtatcctacgacgcacaggctcccgccaaggaaataataccctatgtcgaacactcttccgtccttgattatatcgagcatatccgccgactcggtgtcgcgcgtgtactttctctggagagcgacctcatagtacgccgggatgacagttctgtagccctctgccgcgagagcctcaagtatgatcgacgtgcgctcggggtcggatgtcgtcttcggtatgcacggcatatggtttccggcgtcaactttggtatagtatttctcacaggtctcgtcgtatttcggaaccgggagaaatccgtaatcgtcgttcatatcgcgcatatcgttcacttccgtgagaagcccgtcgaaaaacagccccctgccgtccgagaagattttccgcgcgtcgtaatccttgctcgtgccgtcatatctgcggcttccctcaagatagctgttgtccgaatagaagagcctgaaatagtcgttcatcgccttctcagtgcgctccgtgtaaatcgtgacggcaggttcgccgttctcgtccttatcgacaattcttccgcctgtggtcgtgatgacgttgcagggcatggagtacatattcgtcgatagcccgtactgatcgtcctccggcttctgttctccgtctccgttcagatccttcgtacccgcctcggtgagccgcttgaattcatcaaaggtccatttcccgctctttacgagctcatacggatattcctcgccgaggtcgtcgaacagctttttattgaagagcatacattcggtctccgcgagagacagatagcttatgtccccggtcatgacaaagagtctgccgttcagctcaaagctcgttctcgcgtcctgatcccaccacggcttgtcgagatcgacatacggaagatcagtgttgtaatcaagaagcagtcccgggtaagcataggtatggaacgcgccctgaccgtgcggaaggatcatgtcatacgcgtcctcaccggcgaggatagctttcgtaccgtcggtatacgcgtcgttgtcggacgactttatctgtgtgaaattcacaccgaagcgctcggaaaccttgcggttgcggttgtagacggcatcattcacgacctcaccagtcagtgactcgctgtacatatccgcgcaccagagatccggccatctgacgagtatccggaattcgtatccgccgtaatcgacctccggcagatcctcctttatcgcgtatctcggatcctcggtcgtgacctcttcataagaagtcacggcgtctgaaacggtatctgaactgtccttcacctcgccggaagtcccgccgcaggatacgctcgccgccagcatagacatcagaatgatcatggaaatcgctctttttttcatttgcccgttctccttatgctatttatattttgttttcagaattcgaccgcgaccgactcaagcgcgccgagcgttatcttcccgtcggttggcagtttttctccgccacgggtgaatgtcattccatgcttattttcaaggtgaaccgtatgcggctcgtgcgtccagttgactatgaattgcacggtcttgtccccatgcctccacgctgtggtgagcacctttgactcatagaccggctcgccccatctcttttcgagcactgtttcctcacagtcaagcccgagcggcttcaccatttcggcgtcgcggaaaatgttcggatacaccctgtgccagctctggagtgacgctatgaaccctatcagctcatccctgtccggcgtcttcgagaagtcgcgcataccccagtggaacatgatctctccctcgtcgttaagcacgagagtcagcagatcgcccgcgaggaaggaatacgccagcctcagctcgcagagctccgtcgtgtacgcaagcgggcaggagacctgattgcccataaaattcttcagatacggatgatacagataagcgtaggccggtatcggtcgtccgtatgtgtaacagagctcataccggttgtccgacagccgcagctcctcaatatacggctcagccgccgccgactcgcagccgagaagcgtctccgggcacttctctttccagccgtcaagcagatccttcgatgcctttgtcatccatcctcccggaaccggcgggtgaccgtgctccttcgaatagcagaaatacattccgccgccatggttctggtcgagcgcctgtatgtagtcgacaccactgcgaagcagtgggtcaagcgcctcatcgagtatctcgcgtccggtctcagacgccgggcagacatcgtatccggagcgctgaccggtgcagatcctgctgtgcgggatcgactggtcgggcgcggcgcagaagccttttttgagattcctgtcagcgattaactgctcattgttgtaggacgcaatgagattcgactgctctgtgaagccaagcccgctgcaatagacgccgagcagattcccgctctcatgcagcttcttcatgaactcgtcgaacatctccgcgccgccgtacggaggccatacaaacggcggagcccacggagccgtgccctcccagtgcatcaggagcaccatcacgcgggagttcgtcctcttcgcgaactcgtcgacatacgggagaacgttctcatacgggaagagcctgttcggatccatcttatccatatcatggattccgcgcaccggataggttatgacgagcggcatatcgtttctgtaccagtcgggaaggtcaatttcggagatcggcttcgttctgaagctctttccgagccattcgcggtagatatcggcgccttcctgccatccgccctcgaagcccttccagacgatgtccggcgtcttcacgtcgccgccaaactcaccgcccatgaacatcctgacgcggaagtcggttccctcatcggagcacttgaagtcaagccccttcggagcgcggctctcgtcatgaactcccatgtaaagcccgttctttccggacagataaagcatgaactgagcggaaaccatgtacgggaacatcatatatccgccctgcgacgggaattccgggtcggtcatgccggtcttgagcctgccgtcctcaactaaaagtccctcattgtacatcgagacgacagcgccgtcaccgccgtcacggcgcagctttcccttgacgctgagcgacgggaaatcgatatactcgaccgcgagatccgaattgtttttcacttcgagattccatacaatcctgtcgccgccgcggagcgtcaccgttatggtaagactgtcaaagcgatatgtgagcaccgcggcgttgtcgccgtattccgcgctcgcgtcggctcctgccgcgtcaaatatcaccggagcgccgttttcgtccctgagacggacgctgaacagcggcgcggagtttcctgccatctcgcgtccgtagagagaaacgtttccgattctcgtgagatcatcggtgagaccgagagaaagtgcatctgttttaataaacatttttcttacctcttgcaaataaggaatttgtatgatataatcatagcatacaattaaaataattgcaatgcaaatcggagagtgttttatgcaattcagctcttatccattgtttttcacagatcagggtgacgaaatcatcctgcgcgacccccatctttcaatgcttccggaaatcgagatatactccctccactatcacaacgtctgtgaggtagggctctgccggtgcgggtcggggctctggctcgtcggggacagcgtcaccgcgatacacggcggggacgtcatgatcgttccacccgggatacatcattattcgagaactgtcggagacccgtgtatgtgcgagttcatatattttgacgaggagcgtctgctctcgacctgccgcctcgataagggtctaaaaaagcgccttccgaaaaatctcccgtccgtcatccgcgacgagaaggcgcggagcttgctccggtcaatgatcgaaacgagggacgtcacggagtcggcgctctggtacgcgctgttcttaaaatggctgccggatgacatggaactcccggagacacgcgacgatacagaactctctccggcgatgcggcggataatgctgtcgtacagcgagccgctgacgatggcggacctcgcggcggagtgcggcttctgcccaagctggttcgcgaagcgcttcagacaggagtacggcacgtcgccgatgggattcctgaatgaattcaggacgaaggtcgcggaacagctgctgcgcggcgacctgagcgtcaccgaggtcgcggagatgtccggcttcggttccctgtccgacctttacaggcatttccagaaaaagcacggcgtctccccgacggagttcagacggattatgaagaaaggcacgaaataagaatcattttacaaattgtttacaatttcaagccgattgcccttgcatttgtgccgcggatatggtataattacggtagacgataatacatcgtcggaagggagatataacaaatgaaaagaatactcgcggcggcgcttgccatcgcgctcatcgcggctgccgtgtcatgctccggaaagagtcaggattccggaacggtcgctgacaccgccgaaatgagcctcatcaactccgcgctgaatgaaaagggcgcgacggaaggcgacgattccacattcaaccggaagtatgtcgatgtgtcctacgacatcgcgtaccttggaaaggtctatgacggcgagccggagatccttcccgagggcgctctgaaagactggacggaaaatgtctttctgaaaaagagcccggaggaacaggacgctctgcctgtgatgtatcaggcggtgcacgaactcggcgtcacgaaagaccagctcacggcgctgaacgatgcgcggaaggagctcggggagtatatgatccttgatgatgattacataaactccctgtatatcgaggacgaaacggaaatgaagcgcgcgctcgcgggtccggcggcgctttattatgacggtgagttatacacatggaacgagcttaacgcggtgccggcgccggatattttgagccggataccgaaagacgtgatggacacttatatcgcgagtgtcatctcttatcttgaaacatcggaaatcatgagtcaggaagagattgaaagatatatctccgacagtaccggaaccacctccggacaataacccctgcggagtcgcggcgggcacagggcacacggcttcggcggacgcggcgtatataatacggcgctgtctcggagacaaaaagaacaactgaccgcaaatccgattgaccggacccacgagacccgcgccgagaagataaccacacggcgcgggccatctcattcaaggcttcccggtaaacacatcacgccggaacagaaattttgaaaaattctcaaaaagcacttgacaaatcaatgtcattgtggtataatatttgttgttaggttactgggtgtggcgcagttggtagcgcgctaccttggggtggtagaggccgcaagttcaagtcttgtcactcagaccagagcgtgaggagtgacacacttctcacgctttaattttaatcatttgcaatttgcccggtttaatttaatttttctattttaagtcagattaaattaaagattccggacaagtcttttccaacaagaagttttctgctctgctgatagtgaaggtagatgttcgacgtcgtttcaatgtcagcgtgtctaagccagttcttcacgtcttcgagtgaccagccgcgagcgaatagtatgcttgctgtgctgtgccgaagatcgtgataccgcatcggcgcaagtccgtttcgtttaagagcgcgttgaaagctcctcgtcaggcagtccggacgcatgactgaaccgtcagccctgctgaacacatagtcactgtgattctctgctgtctcttctctctgccggagtaacgaagctcttgcttcagggagtaattcaaaggtcgcatgactgcccggcgtcttcgtgtcatcaaccgcctgtaccgtcaggctcttcacaaccgtatgctcaattgtcatcctgttcagatcgaagtcaatgcttgaccatcgaagaccgagaatttcagagcgtcggagaccgtatagaagcgtcacgaggacggcagtttgaatcgcgtgatcattgctcagagcgttcaccactttcgcggcttgctcagcttcaaggaagacacagcgtctcgtctgtgtggtcttccgtctgggagttcgaaccggaagagcgggattcacggtcaggtatccatacagaactgcgtcattgagtgactgcttgattatgtaaaggtgcttttgcacagataccgtagaaagtccgcccggcttgccgtcgagccttcccgaggtcaatttggagttcacgtatttctgaatgtcgagcggtttcaggtcttcaagctcagtatccgcaaagaacggcgcaatctggcgatatgtgtattcagattcgctttcgaatgtcgaagcccggataagcggctttcggttttcgtgccattctatgatatattcgctgaacttcattggtttcctttctgacactgttgtaagccctgtagtttataatactctcgaatcctgtatcgacatctgtaatatatttggttgattcataggtcagtgtctgaccctcgacgagtttttcggcggtcgacgctgtgcagagctttacggacggtttcttgcagttccttgaccatctaaaaatgtgcattcctgccgggtacattgaaagtctggcacctttgagaactcgcttcttcaccggcttgccgttttcatcgagcgtgtcgacttcctttacagtgcaagctctgccgacttcggaaggtgttgcctcatcgaggggtatgtccgcgagatatgcggtcaaatatgctcctacattatcgacgttgtcaagctttcttgccttgacaaagccatgtccccatgtgtgggcgagaatatcgttcgggatgaacggtgcttcggtcgggaatccgagcaggagatgaatgtgccatgcgccgcgacgctgtggttccacacagattatataccggttgaagctgtagaacggtttgagcttccggagaaaattcttgaagtcgttgtataatttcttctggtctgtcatgttctcggcataggtgagcgttatccatcgccattcggcggggtttatgacgttagcgtttatcatgtctcttccctgtttcatcgaacgggaaactgatttcaggtcatcagagcgtcgatcttggtgattgaattccttgacttgaccgtcacggatatcaacgtattcgtctttggagatcttccgggttgtgccgcctttcgagcggcgggaagtatatgtaacctctgtgatatttccggcttgtttgactttgacaagctctgtatccatcggacggatatttgtccgttgccccttatcgtcccagacataatcgaccacaaccggcaccctgattcacctcctgacctttatttcgacatgatttattgtgctgtgaaagttagtgcttctgagcttacactaatattctgatataatcaagttaaaggcgctgacccttagtctctgcaattttcttcggtcggagacgcgcccccggcgcacggcgtgcgctcgggggtgggcgcgtccccctctgaatcactatgacacactctgaaccactcgaacagattgtccgtcttaacatcgagatcgtgagtatgttttatcatcagatcaagcaaatcgatttgaagttcgtcgagaagcccctctgtaaagtaacatgagttgtaccgcaagttcggaatctgatcacggcggtaaaggtcgtagcactcactcagaaagatgagcttttgaaggtcacggattgcgaagattatttcgtcttcggtttgaagaaattcttcgtgtgtcatgttttctctcctaatatgatttagatgcaaccgtttgactgcataagttattatatcatagaatttacaatttgtcaattgcaatcgtttgattgctatgctataatttgtatataggtcgaaaacctaaaatattatgaacaattgaggttgatttgtatgatatacgagaacctgagaaaaataagagaagaaatgggctacacccagaacgatgtagccgagattttgaatatcaagcgtcagcagtaccagctttacgaaagcggaaaaagagagataccatcacgatttgtgaaacagcttgccgctgtgtataaggtatcagccgactgcatattaggtgctaattacgatgaagaaattgaagcaccaatagaagagcttgtagaaaaagccatacacaactacgaagagctcgaagaaatgtacgacaacacagacaacgaggacttcaaaaaagagcttagagttatgatccgcaaaataaagagcaacgcacacagcatgatgatcgactcctatatctttacaaatatggcaatagatcacaaagaacatcctgaaagtgtcataacagacgagcaaaggctcttcttcctgtaatcgcttttgtctccgacggagaacgagttgagagaggcgcgaaatgaagctcgtgagaacatagcggctcgcggcaatgtcagcaaaattcgttttctcaagtttagctccgttgagttccgccgagatgaagttactgcgctggcgtctgcggacgccgaatcgtttatctatacgtcggctaaaatgccaaccgcgcgggtgtcgcgctctggcatctcgtatgatgaagccacataaaacgcctttacttctacaatttttatcgcttggggtggtagaggccgcaagttcaagtcttgtcactcagaccagaaaacgggagatgtcaaatctcccgtttttttcagtttttatgggactttttcgaagcttgaagtcgcaaaatcaggagctgtcaggctctctgaaaaacacggtaatcgtccccgaaaacagggttggtacaaaatctggtacatagattcaaaacgcacttttcacaaagtcagtagaggccatgcctgaaacgtccggaaaaacaaggattttccgttgcttttccggtgcagaattcaactttcagaatgcaaaaaggagcaaaaacatggcaagtatcacaccaaaaccgaatggaacctacctcatcagaatctcttgcggcaccgacgccgccggaaagccgatcaccaaatcccgtgtcttcaaaccgtccaagccgaaactgacataccagaagctcaaccgagaactcgacgccttcataaaggagttcgaggacaagatcgccgagttcggcgttcagggacgccccgaccgtatgcgcttcgctgagttcacctcgaaatacctcgaagtaaagaaaccgcggctctcccctgtcacatacacattctacgaacaggtcatccgtgaaatgctgatcccgatgttcggcacgctcaggctgcgtgacatacgcacataccacatccagcagttcatccagtatctcgccaccgaaagaccgcgaggagacggaaatgaggggcatatcgcaccagcgacgatcaaacgatacaccactgtcatgcgctcgatcatgacactggcttacaagatggagtacatcgacgaggacgtcggaatctcgcggcgaatagagtttccgaaagccgatacgcccgaagtcgaggcgttcaacgccgaagaagcgtcacagatacttaaggcggctgaaagcgagccgataaacataaagctgcttgtcgagacatcactcttcaccgggctgcgccgtggtgagattgtcggtctgaagtgggaggatatcgaccttgaaaaacagaccctgtcagtcagacgcagcatttacaagccaaaagccagcaaagccaaggaaaagcagccgaaatcaaagaacagcgtccggacgatggcgattccggcgcggctgtgtgaaacactgagggaatacaaggctcatcaggaccgtcacgcgtcgttcctcggcaaggcatggcagaatctcgggtatgtgtttacagaggaagacggttatgtcatgaatcctcagacaccgaccaaacagttctcgaagttcctgaagcggcatggaatccggcatctgaaactgcacggaatgcggcacacatccgcgacactgctgctcgccaacggctgtgacatcaagacagtttccgcgcgcctcgggcattcggacatcgagacgacaaacatctatctccacgcgttggagaatgtcgaccggctcgcggcaggcacatttgaccgggtattcaaaactgagaaataaaatcaagtagtagctccacgtaactaaaggggcgacctctcacgccaccgtgcgtaccgaccaatacacgtcggttcaaccacataagtcaaggactcgtagtagttgaggatattaaagtatcccgctgctgcgagtctttcatttataatggaacgtgttaaagccaggattcaggtgatacgccggtagcccagtatagaacagcttctcagcttgctctatgatcatgatgatcgatattgtcaaaacatccttttatgtctccttcgataaaccatgacgctcccgtgaattcctttttgagcgagttcagtgctgtatgacagcttctattgggacgaaaaccgtgagagtagtaggaaaataccggttcatatactgcttccagtatcatacgaagtacctcctgaaccagcttatccgtaaaggttggaataccaagcggacgttttttcttgcttttgtgttttttctgaatgtactcccgacggacaggtttgggcgtataggaaccgtcagtaatagctgatatgattccgtttatcttttcttcgctgaatccgtctgcggtatcatcgtctactccacgggtagctgctcctttatttgcatagagattctgatatgcacggtaatacatatcgggtcccagcatatagcggtacagccttgtgaaaacttcctcattgtttctttcagtatttttctgattctatccaaaatctttgttgttggtttcattatgaggttttcctccctaagcaatatttgatttcggatgcaatgactgttctccttcatccgaaagaaggtctttcgtgaggttcgttactcctcaccgcagacaccgttctctctgctgattactatgagaactccgttgccatggcggattttcagtgtcatctccctaacctttgcaggctcggaatttgtcactcttacgagcatttcacatagctttttgtgaagcattccgctttaggcaatccccagttagtacgataagcaggtaagtgtgaattttcggatatgcttttgtttcgttatcaccggttctccggctcgtcatgtgcggtggttgataacctgatgtgcaaaggtagaacacatcggaggttgataccgcttttcggcgggtatatacacaaaattcctccatctggacccaacagaaacttgaaactcgcattcaacattctgtagttttatccttatattcacttaacattgcagttcagtcgtacccctgtgtatatgataacttaccgctttcctgtcatgctatggttccgtccggctttcgcctttcggtcagacaggttgtttccgtagttatctttacgggtggtaccttgactacatcttatcgcaccatatggctaaaagaaaagagcagccgtttcaattattgaaaatagctgccctcaataggtggtttacaattttagaatgtcagtatcttaacttacatccagtatatctttgctccagaaatttgaatttttgaatccgcaggaagtcttaacaaatgtacaatattcagatagtcaacatacccagcccccacatgaataaggctgaaaacacagagaacagtgcttgcaaaagcataagtgcgtggaacaatcatatatgcaattagcggaacaacacctaaaattagcgatggaagcatattaaccacgataaacctatttcttgtcatcggtgatgtatatgtcgttccaagtccctgcgtcgtgtagaacataatgacttcactacccgctggaaaacttacggcatggatgagttcatgaaccgggaagaaaagtaacgcaatcacaagacctatcatccaatcaactcttgaaaatgctacccctccaagataagtttttttgatataaacacaacaagcaaacaaaagaagaatcggaataagcatgattgcagacttgcttgttacttccggtagtttttttgcaccaacttcaacatcaacagtaggaagattttttccgtcatactttccaatccatttaatcttcattgtcattcctcacttaacggcgagaacaattcatccacaatcatctttgcctcggcaagatgaccgtagaaaacataaaaacgaatcctttcgttcatcaatcctattttcatcgccatacctgcgccaaatacatttttttgaacaaacggtattttctgttggtttaacacatccgccagcataccactccaaagctgctctttctcggtgaggaagcataaatcattcggccctatctgcttggcgttttttctcccgcatacggggcagcactcaccgtcaaatggcaggcaacatctgttgcaatactgagtcatgaccatcactcctctcattttagcttaatgaaatggttaaacttatccaatatgattatatcatgcggtcagaggtcttttcaaccaatgctttcatacagatttgcaacttttctatgaacgccgcactttttcgctgcttcgcttgccgccctgcggcgttcctcgttgtatggggcggtcagacggaaagagaagcgccccttgcggatttcaaactccatgcagcccgcgtccgggcgacatcgtgttcacaccggtcggaacgaaatattttgttgaatggacaggaagacctaacagcacacatatgtcactgcatttcagttttccgccgatggggaatccgtacaagcatagctattcccagcagatcgtgaggtcaacgcccgggctcgaggcggatatcgcatttatcgtcgcgaacttcgcgagcgagccgtcgtcgctcagggtgctctcgaggtactacgggatggtcgacactcttttcggaatgcttgtgcccgactctctccccgagaccctgccggagatacagaaagcgcggcaattcatcgacgaaaactgctgccggaagctgacgatagatgagatcgcggctcagtgcgggctcagccgctcgtattttcatcaccagttcaaggtggcgaccggcataacgccgatagagtacaagaaccgcgccgcgatcgcgattgccgagagaattctgtcggaaaaccgcgggataacaatcgaggaggtcagcgccatgaccggttttgagtcggcggcgtatttccgccgggttttcagaaaactgacctgcaagactccgaccggatataaaaaaacctgtcacggtgaagaaccggtggtaaggtattgattcgcgccaaaataaccttaatcagcgcttccataattacagaccctgaccgaattcactgaattccggtcagggtctgttttttacctgagaagctctttgaactcttccctctccctgagcgggtcaaagcagcgatttctctgaagagagcttttgaaatcgtcgacgtctgtcacgggagaatcggtcacgttcttctcacctccgaccttgtcgaacagcggagacgtgaaacgccagctcgtttcctttccgtatctgaccatagcctccgcgtgaagacgggctttgcggagctcagccattgcctcgtcaaaacggctctcatcgcagagcagatatgcctttccgagcgaattgtactggagcgtattgtgataatactgataatttccgtccggaaaaagtatcttcagtatctgctcaacggcgtcgcacaacatgaccgattgcggcaggagctccaggcaaagcagaaaactgccgagccgattttccgcgaccgtctgtatgtgcctgaccttttcgtctccctcgaggcaccagcagagcatatcgtcgcgctttgtctcgtcctcctgcttcatcgcccagtcttttgcctcgacatgtcttccgagaaaatggagcgtgagcacaataccgtgcagcgccttgtcacacagtttgcggtcggtgctgttgtcaaggacgactctataatggttaacggaactttcaagcagacgttccctctcattgtcgtctgataacggcagtccgtaatagtattcggcgctcgcgagccattcgacatactccatgtttcccggatattccgcggcggcgcggacggcgatccggtagttcctttccttgtcgtcatggttccagtattcatggaacgcctcgtcgtattccgcttttctcttatccttctggtaggtgtccatcccgagaaggcgatctgtggtgacgccgaaaagcgtcgcaagcggaggcagcagcgagatatccggcatagcggcgtcggtctcccaccggctgaccgcctgcggggatattgacagcagctccgcgagactctcctgcgtcattccggcgtcccgccggagggtccttattgtttgtccgaatgtcattttcgaaacctttctgttttgatttttactgaccggtctgtaattatattataacagctgtccgcccgaatgtcaacctcccgttgattgagagaatataaaccgaaaattgatatcggcatactacaattattcgataaatatgttgacagttatcgctcaatatggtataataagttatagagcaaacaacatacggaagaaatattcaaggaggatacactcatgctgatcgagacttatgatctgacaaaagtatattccggcggtgaaaatgaggtgcgcgcgcttgacggcgtctcacttggtgtcgaccgcggggagttcgtcgcggtcgtcggttcgagcggcagcggaaaatccacgctgctacatcttctcggcttgacgatcatgtaaaatatattgtgtaaactccaaaagtatggtacaatagatataagagatgaagcacatgaaaaaagagaaacggaatccgcggagtcacgagctgattc

SEQ ID NO: 88 - DNA, 9466 bp, Unknown
  16S sequences of unknown bacteria
aagatagcgatatcgagacgattgagagctatatcgaggatacgccacaggtgggcgaggtgcttgtaggagaggatgcgaccaaccgcgcgcggccggcaggcgaaaccgtggctgggcgcagcacaatcggaggcccgaagggctggagtggcgagcacacgaagcgaagcgcagtgcgcagccacggaacaccgcgcaagcgtcagcgcagggcggagcgcaatcggaggcccgaagggctggagtggcgagcacacgaagcgaagcgcagtgcgcagccacggaacaccgcgcaagcgtcagcgcagggcggtgcgaagaacatgcaactctgacggaaggcagcgtgacgtacgacattcgcttttacgcgcaagcgccgcgggacgggacgctgatggaaatcatcgtgaacgtggaggcgcagaacaaatacaacccggggtatccgctgatcaagcgaggggtctactacgtgagccgcatgatcagcgcgcaaaacggggtagacttcaagaacggggaatacgggaaactcaaaaaggtgtgctcaatctggatctgcctgaacgcgccgaaagagcggcgcaacagcatcacgcgctacacgttgcgggaagaacagctcgtggggaatagcgtggaagcggcgaagaactacgatctgatatctgtggtgatgatctgcctgggcgatgcgcaggagcggcaggcggatgtgctgcggatgctggatgtgctgctatcgtcggagtgcaaggcagaagagaaaaagcagatcctggaagaagaatttgcgattcaaatgagcgagagagtggaagaggaggtggcgcagatgtgcaatttgagtcaggggattgtggaaagaggcatcgctcagggcatggaaagaggcatggcccagggcatagaaaaaggcatggctcagggcatagaaagaggcatggcccagggcatagaaaaaggtatggctcagggcattgcccagggcatggaaagaggcatggcccagggcatagaaaaaggtatggctcagggcattgctcagggcatggaaagaggcatagcccaaggcgtggaaaagggcgcattcaacgccacgctagccagcctgcggcgtttgatcgccaatgcaggcatgtccgcagagcaggcgatgaacgtgctggaaatccccgcctctgagcggccgcgctatctggcagccatgaactaaatgctttgtgccgccttttgcgagagagtggaagaggaggtggcgcagatgtgcaatttgagtcaagggattgtggaaagaggcatcgctcagggcatggaaagaggcatcgctcagggcatggaaagaggcatggcccagggcatagaaaaaggtatggctcagggcattgctcagggcatggaaagaggcatagcccaaggcgtggaaaagggcgcattcaacgccacgctagccagcctgcggcgtttgatcgccaatgcaggcatgtccgcagagcaggcgatgaacgtgctggaaatccccgcctctgagcggccgcgctatctggcggccatgggctgagcgcgcattccgtcttttggacttttattcggaggagatattgccggagccgggaacactggaaacaggccgggcctaccgggagaaaaaggccaagcccctgctggctcaaatcgtcaaggtgctgcgctccctgtatctggcctatgtggagctgcggggaaaatttgagcatctgcaaggggactatggccgggtgcgggagagcaacgcccgcctgtctgaccgattgcaggaggtcaagttggaaaacaaggcccttcggcaagtctccgccgactatgagcgggtcaaaagggtatttggcccggaacaagtggaggtggcggtggaggccgacaaacagagggaacaggcggagaaaggacgcaaacggctccgacgctcctttgactggggcgggaggtaaaagagtagatttgtttacagttttgtgctatatttattcagtaaccacgcgacaaaccggaatttataaggagataataaaatggatttaacaaaaatcgaaaagaatggcattgcttgtgccgtcgtaaatagtaacgaaattgtcatcacagatgcacaatctgcgttggatgtgcttatgtctgcaaaatacgatattggtacaaaaaacattgttgtcgataaaaaattgattacagaggatttcttcattctcagtaaaggtcttgcaggtgagattctacaaaaatatgtgaattacggtggtcgtattgcaatttacggtgattattctcattacacaagcaaaccactaaaagactttatttatgaaagcaacaagggcaaggatgtgtttttcgttgccacgcgagatgaagccgttgaaatgctgacacgataaattccagtttatcgggtagatagcaaccccagacagggctgtcaatggtcaagatgaacggcgcataagcgcgccgccattgaccgccccgtctggtcttgctctgcggttatcaaggcgggcaagccccaaaggcgcttgcccgcctcctttgattttgggcgggggccggtggtcgaattgcgtcccatggtgggattgatttccaccaaaggcggaaatcaatcctctattgcctgggagcgcaagcgctcccaggcggtggtcgaaatgggtctcgattcgagacccatttcgacagaaacttacatcaaattgaggcaagttttgattatggccgtttatggcctgaaacccttgcaattccctgatttctgtgatactattttgatactaagaaaatagggtgccccaaataacaggtggaatattaacatatttgcgaaagtttttcctgtaaaaccacctcaaatacacccccatatatttgaatttgccgtaagtgaattgcacgataacgcgataaaaagaggataagaggcccattggccccaaatcctcttttttgatggcgcttttttcacgcccctgtaggcaagcaaattgccgggcgaaagggccaaggaagtctgctcaacgcccagcgcaggctttggatcattgcccctccaacacgatcattttaagcttttgatcgatgcgggcgatgaattcgtcgatgtcgatcaggccgctcaaatattcccggatggcggtgtcgtattcgatggaagtctcttcgtccagcccccagaaaggcgttacggcgaggaattccgccagttcgcggtaggcggcgatgctcgcttcgtccgccagatagcggttgttcgcttcgaattcggcgcggtattgttcgctgagctcgatctccgcctggagcgcggccttttgcgcctcgtcttcagcgctgtccaggcgctcctcgagcgaggcaatctccgcgtcgtacacggcgaggctttccgcataatgttcgttgggtacggcatcgtttttgcccggcgtggtgtgcgccaggaacaggggatcctgctgcgccgctatctcttccaggaacgcgatggccagatcgcggtttgcgctatacggattcacgaaaaccgcgtagagttgcacggcaatgagcggcgtttcgccctcctgcatggccagcggcgcgattcgatatgcgctggacgaatttatgccggcggtgaaattggtgaacagttcgatcagcacgttctcgggcgcggcggcgctttccaagtctaccgtttccgggaatccgagcgcggcgaaatcgatggcctcgaaggcttccgccatttcgcggaacagtggggtatccagttggaattcctggccgggttggctgatgtacagcatgtaagcgtccagcatggcgcggaacagctcctcgcgaaatccatcgatggaatagtatggcgcgagcgcgtccatttttccggcctccaccgcgctgccgagctgggcgagcaggcggaggaaggcgggccaggtctgcggaaattcctccggcgcatatccaaggcttgcccacagttccgcgttatacgaaatcagccctcgacccgtatgcatttccaccggcagagcatatacttcgccctctttgcaaaccgcattttgaatcgccgggtacatggcctgcaccatctgcgcaatgggcgcgctgtccgtcagttccgccatgtagccgcgctcaaacagcgcgctgtaagccgcgtccgctgtgcaaagcgcgaacacgtccatggtgctcgactgggtgagcatggcctgaatgatgtcctcatggctctccaccaggttgagctcgatttccgggtgcgcttcggcaaaggacttgaaagcgccctccaccacagcgtgataattctgctgaatgttcagcagcgcgtccgcgcgctggctgggatcggtgttgcggcgcaggatcgtcatgctgtccccggcaatcaggaatccatcctgcgtgaggacgggcagcgcattcgtttcccccgtcagcggcagcgcggcgacgggcagcagcgattccggctgcatgccttccattttatagagctcgccgtccatggcaaagaatagcgcgtcggcgctttcgtcatagcagaaatggcccggctcgcccgcaaccgcaaattcgcacagcggctcggcggtcgcctggcccagatccaccttgtggatggcggccgtgcccgccaaatcgtcgtatgcaatggccagcgccgcgccgtcctggtaggggatcagccactggaagagcgggagcaatccctcgatcagcgtcagttcgccgctggcaaggtcgacgacggcgatgctggaaccggcatcgtggctgcgcgcgaccattttgccatccagtacgaacggcgcgtacaactggcgcggcatggcgaaaatccccatgtattccaccatattctcgacgggaagggcaatctgcggcgtaaggcgcgcgacgccctccgccagttccacgcgatacagcgcaaagttgcaatagtcttcctcgtcgcccacgcattcgtagccgtacaccagcggcgcatcgcccgcagcgatgacgttggcagggatgaagcggccattttcctgcgtcgcgagcgctgcggtgtcgatggcatattccatcgaatcgccccctgcggcgggaaccgtaaatagcgacgcgctggagagcgcatagagagtatcgccgatgagcgcaaaagagcttgccacggtaaagccatcttcaccgctttgcagcaaaatggcgtcgcccggcgcggccagcgctggcgcgcccatggcgagcaggcacaggatgaggagcagggaaagtcgtttcttcattttcgagcaattgcctttcttcaagttaaaatgcgcatgacttaacccgcccgataggctttgagaatcatcttctggtgatcctcatccacccggtcggtgccatgggtgcgcgagttgaggaaatggacgcacaaatggccgggatagccgttgccgtcgatcgcgctctcgccgtgcggctcggaatagatcgaagcggcatagcgctggccatcgatggtcacccatacggcatggcggatatacgtccagtccccgtcggaatccgcgcatgctttccacatggcggcggtatcggcggcggtcagcggttccacatccgcgtggttgctgccgccccggcgtttcacccgccaggaaatgccggagtccacatcggtgatcacggcctgcgagccggtggagaatgccgactgaatgtcgctggcaaaccagtccgccagcgcgacgtttccgccagcgtgaaccgcatttttatcgggcgtgagctgcgcctttttcatgtagccaaccgtgccattgtgcgccaccttgcaccaatccccatggatggcataaaccgtaacctccgctccggctggcgcggtggcatagcggccagattgagaggaatcgctttcgtatacataggcttcttccaggacgtatgcggcaatggggtcggcgggcggggttttggacatgccttcgatttgcgcaaaacccgtggtcgatccataggaaacctttgcccaaccggcgcgggtttccagcaccgtgacagagcgcccatggcggagggagcgcttgatatcggacgcggtggaagcggacgcgtacaagggaagtgaatcgatgaccacgtaggcgatgaagctttcgccgccatcgcgcgtttcggcatcgccggaggaaagggattcggcccggatatacgcaatcatcccattttggggattttgaatgcgcgcccagccggaatacgggccggaaccatattccacgaccgccacggcggcgcccgcagaaatccgcatgctttcgctgtcctcgctgggatgttgatacacccgggtatcggcgttgaccgtcgctttttccgccgatgcgatgagggcaacggtttcgccgccatcgcgcgctttgtctttgccagaggagagatccccggcctggatatacgcaatcatcccattttggggattttgaatgcgcacccaaccggaataggagccggaaccatattccacaatcgttacggctgtgccctcggaaacgcgaatgctttcgctgtcctcgctggggtgttggtacacccgggtatcgtcgttgaccgtcgcgctttccgccagcgcgctgggcgcaatgcccgtgagcaaaagcgccagcgccactcccatcaccaatgctgttcgtttcatgttggtttcgtcatctcctgcttgtcatactgttgggccgcgaggccttggttttatggcgtatcgctcaagaacatggcctcgcaagccccggtgatcgcgttatcatggcagtacatcccataaatcaagcagcttttcgccagtaagcgcgtcatacccgcgagggttgtccacgtccagttggatgccccaaaccgggctcaacacttcttttccctcccgttgcaggggcagatacatcaattccggcggcgtgggattctgcgccaggtccgcgatggtatcgtatgccaggatgtcctcccgggcaacctctccgtaaggcgcaaaggaaaccgcgcggccgcgcacttcgtccacaccgctgtccgtaatccacatataaacgtaggctgcttctatgtcgagcgtcgaccaccagcccacgcgcatttcgggaacgcggtatgcgtacttgatctgatacacgcacgagcgctctttggccgcttcgcccgccatgatctcccgcgcgtacaggcaactcgtatccatgcccattacgtcccgcaggaactgcagcccggcttcggcggcttcctccggcgtatacaaaccgggctcgtcgcttaagcgcattttgtcctcgtcactgacccatgcacggtccatctcgccaaggccaaagacgtggggatatgtgcctggccgcagaaaatgaaaacagcccgttcgggaatccagcgtcaattcgtagtcgcccgatcccgaatccagaaccgccccatcctccgagggcgtcatctcgagcttcacgccgcccataccgcgctccatgatgtaggcagggtcgttgagtttctgggggaatacctcatatgtgggaatgctgtcgccctccccgtatccagcgctggcggtgaatagcatcgtgcatattaccgcgaaagccaatatctttttcttcataacgtacctccattttctcaccaatgttttttgtgtacgtgtcaggagcctttatgcaaatctttgaggctttggaaagcgcgcttaaaagcgcggatacttgcgattgcgtgaaacgcatagcaattgtgttcggcgttcacggaaagtgatggtttcatgcgtacaagtcaatccctcctttgcgaagataagcaatttctgtagtagctaagcgaattcaaatcatcagcgtagcgatacaaatatctttgggcatgttgcgtggtattgcgttgctttacaggatggttgttgcgagatatatcttttgtgtattttaattgtaacatatcccaaaaggaaacgcaattaaatggcggtaaatatttcgattttttatatatattcagcataatttattgacagcataccatggtgtactatttttcaattctatatactatccactgggtcgaataaagattcgcaattttgctggcggccttgattccggtttctcatggaaaattgcaagcttaaaaggccgcttccatgcttcggaatgggcagggaagcggctatacatggcaagccacagaatttgcgtcaaatcttgcgcgtaagctcggcggcactctttggcttcagttctgtgacttgccgtaaatgaaattcaaggtttatgaaaataggtgatcgccctccgaggagaatagaaaagctccattttccagcatccatccgcctcctatggtagggttcaattctgtccacaatccatcgttggcgacggtgtgcacaaattcctcccctttcaggctctgccatacgccatctttggccacgagaacgagcatatcggaagaactatgataggcaatgccgcctatgagattggccacgctggaaaagtccgctgtggaggcggtaaccggcaatggcgggaaacgttcatcggtcaccgtgtggctggaaagatcgtaggcgcacaaatccattgcgccatcgtccgcgcggcgcagcagcaacatttgtccaggcttatagggacaaaacgagtaagtctccgccagatcggtcaacgtatattgccccgttcgcagatcgaacgccagcaggcttgcgctgcatggcgcgctgtcgtccgcggtccaacgagaggggttccaataggtatacagtgtggttccctcgatataggcattccaaagcggttcaagggacagctcgtcgctccccatttgctccatgagcagagaattgtccagccgaacgtcgctccaatggatgccgtccgcgtcgaccgtgccaatccggccactggtcgcgcaatacccatagagcacattgctgtccaccgccgcgatcaactgggataccgtgtggtccaacgtctccctgtcgctttcgctcaaatccgcataggattttccctgccaatctgggcgatgcggcctggcgggcagatgggcaaacagcgtgtactcgcgcgcctccacgtcgtagtaaaagagtttgcccgattgcttcagcgaatagaaccggttgccaacggccgcctcgcaagtgctcgcgatatccgaaaagccggcggaaaattgttcccgatacgcctcatcaaaaatcgtctcggcggcggtgtaatatcctgcttcgcgcgcctgtgcagcttccgccaggcactggccgcagctgcagaaaattgcaaatgcccaaatcaaactggtgaataggcccatctttttcatacattgtacctccacgctcggaaaaatcacaggttttccgcttccaccatgcgcattttggtggaaagtt

SEQ ID NO: 89 - DNA, 12936 bp, Unknown
  16S sequences of unknown bacteria
cgaaggcagacgtcagcgccctggaagagctgatcgcgtatgcgaagagccttgatctgagcggctacacgacggaaagcgcacaggcgctcatccaggacatcgcacgtgcagaaaacctgatcgctgaccctgagattacccaggaagaagcagacagcatggtcaaggaactgcaggcatctgtggacgagctggtcgaggtcaatgagcgcacaggcgctgcggattcgacgaataccgctgcagctgcacaaaccggactgtttgccggcgtgctggccgctgcaggcgcggcgctgattgctgtatctcgcagaaagaaaaagcattcataattgcttgaaggtgtccgctttcctgagcggatgagcgaagaatcaacaggcctgtttgacggtcgggggaagagatccccggccggctgaccggcctgttttcatcctgtgcgtccgcacagatggaatttgccacgagatgtgaaaaaacattaacagcgcttacacatgctggtatcattacgatgtaagcagaaatgtgattacttcgggtaagcatgaactgcgggatagacaactggatggatgtgatcacagcgatgtgagcaggacctatttactgaagtgcggtagatagggattttttttaggaagaaggtgacttatgaagatcaaacgggtactgaacaacaatgccgtcatttcttccaacagtcagaacggagatgtgctgctgggcagcgggatcgctttccagaaaaaggccggacaggaggtagatcctcagcgggtggagaagaccttcctgctgaaggataaagaggtccagaaccggtttaccgaattgatgatcgatgtgccgatggcgcatatcctggtcagtgagaagatcatcaattacgccaagatcaaactggggcgtccgctctagctttcacagccggatgcaaaggcggtgtagtggcgcggatcgtcgaccggatcgagtctatcgtgaaggactattaccataccgagtttgatgatgaatcgctggattactatcgcttcatcacgcatctcaagttctttgcccagcggctgctgcgcaaagagcattacgatgatgagagcgaggagttcctggaagccgtaaaggtcaagtatccaaaggcgtatcagtgtgcggaaaagatccgcgcgttcatcgaatcggaatatggctatgaattcgaccgcagtgagctgctctatctgagcgtgcacatcaaccgcatcgtcaagaatctgtaaacagggtgtgatcaacaagcatgacctgaaaatgcatcgtatggtgtcttttcaggtctttttttgaggaggaaaacaacatgaattatgaatcgagcgcaaagcagatcctgaatgtgctgggcaaggacaacattcagtctgcgacacactgtatgacccgtctgcgctttgtcctgaaggatgaagctggcatcgatgatgaacgagtcaagaagatccccggcgtcatgggcgtcatgcgcaagggcggacagtatcagatcatcatcggcaacgaagtggcaaaatgctttgcagagctgaagaagctgggcgtcgcgtccagcgatgaaccggcggaaaagccaaaggagaagatgacgctcaagggcgtcggcaacgccatcctggactatatctccggaagcatgtccgcgctgatccccgcattgatcgagggggcagaatgatccgggtactgctcatgatcctctccttatgcggagtgatcaatgagagccatgatcggcggcggtgtcgccggtgtgctgatcgggctgttctccctggaggcgtatacatttgccgttccttcgccgctctcgctgccgcagttcatctctgaatccggcggatcgaatttcacctatgccctgattgtcgcggcggtttctgtcatcgtcactgcgctcatcacctggttcaccaccgatccataggacggcagcgagccttcgcagcctgagatcgaggaagtgacaccgcaggcggaagctggcttccacgacaccagaaagatcgccagcccgctcagcggacagatcatcccgctcgctcaggtcaatgacgcgacatttgccgaagagatgatgggcaagggaatagccgtcatcccggatgaaggcgtggtctatgcgccgttcgacggcacggtggaggcattgttcccgactggccatgccatcggactgaagagcgagggcggcgtgcagctgctcatccactttgaccttgacgcgatcagacagggtatgatgtgaccacacctgtcatcgtcaccaacagcaatgactatatcgatgtgatcggcaaagagggcgcgcatgcagatgcgatgcagccgctgctctatgtcatgtgaagaggaggagaacgatatgacatttccagcaaattttctttggggaggcgcagtggccgccaaccagtgtgaaggtgcgtatgatgaagacggcaaaggatggagcacgcaagatctggcgcccaaaggagtcgtcggtgcaatcacggatcatcctaccgaagacaatctgaaattgaagggcatcgatttctatcaccgctatcgagaggatattgccatgcttgccgaaatgggcttcagcgtgttccgcttttccatcgcctggagccgcatcttccccaatggggatgaagagacgcctaatgaagccgggctggcattctatgatcagctgatcgatgaatgccgccgccatggcatggagccgctggtgaccttgtctcactatgagacgccatatcatctggccaagacttacgatggatggtgcagccggaagatgatcgatttcttcaagcggtatgtcaacacggtgatgaaacgttacaagggaaaggtgcattactggctgacgttcaatgagatcaattccatcctgcataacccttatctcagcggcggcatcctgacaccgagggagcagctgtcgaagagcgatctgtatcaggcaatccatcatgagctggtcgccagcgcgctggtcaccaagatggcgcatgagatcgatccggacaataaggtcggctgcatggtgatcggtgtgccaagctatccgcttacgccgaatccggacgatgtgatcgccaacatggagcaggaccgccacaacctgtactttaccgatgtgcaggccagaggggcctatccgaagtatctgaaccgctatttcaaggaaaacggcatccagatccagatggaggaaggggatgaggagatcctgaagaacagcgtggatttcatctcattcagctactatatgagcacttgcggatgtgcggatcccgatgtgcatccccaggcggcgggaaacatcatcccgggcgtggccaacccgtatctgcgctcttcccaatggggatggcagatcgatccgaaagggcttcgttatttgctcaatcagttttacgaccgctatcagaagccgctgttcatcgtggaaaacggtctgggcgcgcgggatgagctgatcgaaaaagacggtgtgctcaccgcagaagatgattaccgcatcgagtatatgcgcgagcatctgctgcaggtggaagaagccatcgaagacggcgtggaagtgctgggatacacatcctggggatgcatcgatctggtgagcgcttcgaccgcgcagatgagcaagcgctatgggttcatctatgtggaccgcaacgacgatggcagcgggacgatggcgcgttaccgcaagaagagcttttactggtatcgcgatgtcatcgcctccaatggcgcatcactgaaatagcaatcaggagatcatggcagttcctggtctccttttcttcagaaatgatgggcaaagcggcagagaaccgctataatagatgagaaaggttgtcggaatatggatattgtcatgatcgggatcagtgtggagaatgcggaccttgcgctgttgggcagcgtttctttcaccgataccgcaaaactggaaatgctgaatctgctgggcgggctggatatcgctgccggggtgatcctttccacctgcaaccgcagcgagatgtatctctcctgcgatgcacacagggcgaaggaagcggctgatctgtatcggtcgttttttcatcttggtcaggaggaaaagatccgcgtgctgagcgggaaagcggcgtgcagatggctgttcgaggtgtgtgccggcctacgctctctggtgccgggcgaggatcagatcctggcgcaggtgcgggaggccgtgcgcttttctcagtctgctgcagcgatggataagccgctgcatctgatcttctcgcatgcgctctcttgcgcaaagcagatccgcagcgagctgcgggcaggggaacgcccgctttccatcgcctcgctgggcatcaagatcctgaaggaaaagacggcgctggccaataaagcggtgctcatgctgggcgctggcaagatggcacagctcgcgttagcttatctgcgtgacagcggggcacggatcacgctggcctgccgcagcacggccaagatagaagcgctgcgtgaggcatatccggacttgtgctgcatcgcatttgcacatcgcgcgcaggcagtcagacaggcagagatcatcgtgagcgccacctcggccccgcatctcatcgtgcgcagggatgatctggacgaggtcaggcggcagttcttcctggatctcgcatcgcccgctgatatcgatccggcagtcgccaagatgccggggaagacgttgatcgatatggatacgctgaagcaggtgtctgagcataaccggcaggaacgcctgcagctgatgcggaaagcgcaggatcatctcgaaccggccttgtgccggtgtgaacaggagctggcgcggctttcgatggatccggcatatgccggcatgcaggcaagatgcgaagagatcagcgaacaggcctatgcgtttctgatccatcgtctgcagctcaatgagcgcgagcgtcatatcctgcgcaagacgatccgcgcatcgctgttccgcctgatgcgcgaaccgtttcaggccatgaagcagcttgacccgcaggaacaagagcaatatacggatatgctgaggaagctgtttgaaggaggagggagagcatgaacatccggatcgcgacgagaggatcgcggctggcgctttgccaaagcgagatcgtcaagaagaagatcatgtcactggatccatctgcgcgctgtgagctggtgatcgtgcgcaccgcgggcgaccgcaaccagcatgcccctttgcatgcgctgggcggaaagggtgtctttgtcagagaaatcgaggaatgcctgctgaatggtgaagccgacctggctgttcacagcatgaaggacatgcctgccgaactgccgcagggactgtgctttgcggatgcctgggaaggagaggatccccgcgacgcgctggtgcttcgtcaggggatcgacgagcagacgcttcacgcgcgcccctgtgtcatcgccaccggaagcctgcgccgcgcggcacagctgaagcggctgtatcccaaagtgacctgtgtcgatatccgcggcaatgtggagaccagattggcccggatggaggagcggcagctggatgggctcgtgctggcggcagccgggttgatccggcttggcctgcgctctcgcatcgcccgctgcttcgatgaggaggagatggtccctgcgccggcccagggcatgctcgcgctggaatgccgcacgcaggatgaagatttgctcgcgctgctgaggcgcggatcggatgcgcgtgccagaagcagggcatacatggagcgcggcttcctgcaggcgatgcacgcagactgtcatcagccggtgggtgcctgcctgcgccatcaggacagccggctcatctttgactgcatgtgggggaacgccggcgccgcttcttttgccaaggcgcaggtgagcggaacatgcggcatggaagaggaactgctgaatgaggcagtggacatcatcgaaagacaggtgcgcgcatgggcagagtaacgctggtcggcgccgggtgcggcagctatgatctgctgacgatccgcggcagagcgatggtgcaggaggcagactgcatcttgtatgatgcgctgatcgatccgcgcatcctgtcctttgcctccccgtcatgcgagcagatcgccgtgggcaagcgcagcggtcatgcgctcatgagccaggatcagatcaatgcgctgctgctgcagaaggcgggtgagcatgcgcatgtggtgcgcctgaaaggcggcgatccgtttgtgctgggcagaggcggagaagaagcgctgtttctgcgcagacatggcgtcgatgtgacgttcgtgccaggcatcagctcggccatcgccgcgctggaggagggaggcatcccgcctactcatcggacgctcgccttcggtttccatgtcatggacggtcatgatccctcgcgcatcgcgtttgatgcgctggtgcaggatgggaacacctgtgtgttcctcatggggctgtcgcatctcgatgagatcgtccagggcctgctcaaggcagggatggatgcgcaagtcccttcggccgtcatttctcagggcgctaagcgcggtcagcgggtgctctgtgcgccgctgcatgagctgcctcagcgcgtgcatgccgcaaagctttgtgcgccggccatcatcgtgacgggagaatgcgtgcgtctgcatgcgcagctttctgtcccccggccgctgcagggcgttcgcatcggcatcgccgcatatggcagcggacagaagctggaagatctgctggaagcgcaaggcgcgctgaccacacagctttgctctgcgcaggtcagcttctgcttggacgcgctggatgcgatctgcctggatgcgtatgactggctcatcttgacgagcccgcgtgcggccagcgccttcgttcgctggatgcgctcgcggcagatcgatctgcgccgtctggcgcatcttaagctggccgtgcgcgtatttgtcaggacgtgctgctgcagccggatgtggtcgccggcatccaggacagcgcacatctgggggatgcgcttgcgcagcaggtgaaggaggaagacacgctgctgcatctctgcgccgaggagcacggagatgagctggcgcagcgctttggcgcgcagctgaagacagcagtggtctatcatatggaacgcagagcatgccctgtcacagaaggggagctcgaccaagtcgtcttcacctgtgcttccgccgccagagactgcgcgcatcacgtcggttcggcatatgcggtggccatcggccaaaaatgcgcggacgagctgcgccgtcagggcgtgcagcggatcatcacggcaagcgagcattcgctgcagggctgtgtggaggcgctgatacagaactgggaggagagaacatgagcttttacagagggagaaggctgcgccgcaatgccgccatccgcgccatgatgcgcgaaagcgtgctgcagccgcaggatctgatctatccgatattcgtcgggaaccagccgatcgcggccatgcccggcatcgctcaatacgggctggatgcgctgcatgaggtcgtggaggagatgcgcgcgtgcggggtgcgggcctgcatcttgttcggcatcccgaagcataaggaccatgagggaagcagcgccgctgatccccatggcatcgtgcaggaggcgatccgcacattgaagcagctggatccgcagctgtatgtcatcgcggatgtgtgcatgtgcgaatataccgatcatgggcactgcggcatcctcgacgcacagggagaggtcgtgaatgatgtgacgctgcagcatctgtgccgcatcgcgctgtcatacgcgcaggccggcgtcgacatggtggcgcccagcgacatgatggacggccatatccaggcactgcgcagcgcgctggatgaagccggtcatgtcagcctgccgatcatgggatacagcgctaagtacgcttcttcttactatgggccgtttcgggaagccgcgcattccgcaccggcgttcggtgaccggcgcgcgtatcagatggatatgggcaaccgccgtgaggcaatgcgggagatcgctgccgatatcgcagagggcgcggatatcgtcatggtgaagccggcgatgccttacctggatgtcatccatgaagcggcacagcgctttgaccatccgatctgcgcttatcatgtatcgggcgaatacagcatgctgcggatggcggtcgatcaggggatcatgagcgaagaggtcatcctggagtcgctgctcgccatcaaacgagccggggcaaagctgatcatcacttactttgcgttagacatcgcccgcaagctgaaggaggatgcgcgatgaagcgggaacgaagcgctgagctgtttgctcaggcatcacagcgcatgcccggaggcgtcaattccccggtgcgctctttcgcgcatgtgagcgaggtgccggtatttgtcaagcgggcgtatggcagccgcgtagaggatgaggacggcaatgtcttcatcgattatgtcgggtcctggggaccgctgatcctcggtcatcggccgcagtgtgtcgttgatgcgctgcatgaggcgctcgatcagggaacaggctatgggctgcctacggcggcagagagcgagatggcgcggctgatgatcgacgcttatcctgggatggaggaagtgcggatggtcaattccggcacggaagcggccatgagcgcgatccgccttgcccgcgcgtataccggccgggatgacatcatcaagtttgccggctgttatcatggacacagcgattcgctgctggtcagcgcaggctccggcgcattgaccttcggcgtgcccagcagccccggcgtcccgcacgatctggccgcccacacgttcgtctgccgatatcatgaccttgagggcgtgcgcgcgctgcttcagcgtcatgagatcgcggcgctgatcatcgagccggttgcagccaacatggggctggtgctgccaaaggagggcttcctttctgcgctgcgcgcgctttgcgatgaatatggggcattgctgatcttcgatgaagtgatcaccggctttcggctcagctatggaggagctgctcagctcttcggcgtgacgcctgatctggcctgcttcggcaagatcatcggcggcggtctgccggtgggcgcttatggcggaaagaaggcgatcatggagatgatcgcgccggcggggccggtctatcaggctggcacgctgtcgggcaatccgctcgccatgcacgctgggctggcgcagctgagctggcttcgcgatcatcctgaactctatgatgatctggcgcgcaaagggcagtttctgaaggagcgtgccttggcaagtgcaagacggcatggcatcccgcttcaggtgcatcagatcggttcgctgctctgtctattttttgcggatgggccgatctgctgtgacgaagatgtcatgcgctgtgatacggcgcgctttggccgcttcttccatctaatgctggaacagggcatcctcatcagcccgtctcagtttgaagtgctgtttttgagcgctgcgcatacgcaggatgatctgaacaagacggcatgggccatggagcgtgcgatgagcgcgcttggagcatgagcatcgccatcgccctgcatccgcaaggcaagcgtgtgctgatcatcggcggcgggaccgttgcgctgcgcaaggcacggcagttcgctgacgaacaggcgctggtcacggtgctggccccatcgttcatcccggcgtttgacgcattggccgtacggcggatcagcgcaggttatgcgcgggcgtgcctgcggggatattttttggtctatgcggccagcgatgacgctgagctcaatgcgcagatcgtgcgggatgccggggaagaaggcatcctctgcggcagcgccacacaatgcgcgcatgtaacgtttacttccatgcgtcaggcagatgcgcagacgtatacgctggcgctgtccacgcatgcgcatgccatcgcgctgggcgggcagatgctggcggatgcgcaggcatcgatcgatgcgcgtcatggctctcgcctggccttgcttgcttttctgcatgaagccatgggtgagcggtatggtccgatccgcgctttgctgagccggatggaagaggagaagctcgccttgtttgctgacatgctcaggaagggaaaagtacaggtgttcgtgttccatggcacggattcgccgcgtgcgctcgctcatctgcggcagacgtttcaaggcagcggcgcagatcatgtgcgtgctttcccagccgacgggtcatcgtgcgctgtccgcaggtgctcagcctggatgagctgaccgcgttcgtcaaggcggcgagcggcctgctcgccgttcatgttcagctggcgttcgtccagcgccgtcagctgtatgcgcaggcaaaggacgcgctgagcgctttgggcgagatcgcgccgttttggctggatgaggaagcgctggaggagatggtgcgctatgcaaagcagaaggcgtccaaagcgcgctgtctgttcatcacgcatcactccttcgctcagctttccgccatggcaaaggcacatggcgcgctttgtctttctctgcatgatccgctgccagcggtgcagggagagatcatgctgtttcctgtgttcatgacttacggcgagcatgtgcggaacgatctgttcgcgggggaatgctcgatcgttgctgcgctgcgtggcagagggtgcacggtgctcgctcacgatcaggcgctcagcgagcaggaatgggcgatccgccgcctgctggctctgcccgcatgcacataaaaaccaggcagctgcggtctgcctggtttttatgtgtgataaatgtgcttgattcagcctgctgtctgggggatgtctccttcatgcggcatcgtctcgatgtattcgctggataccgcagggacgtagaaggcgccgtagcagcgcatgccttcgtcttccccgatatcgaccaagaagcggtaatacggcatgaaatagcggtcgaactgatcgtggcggtaaacgagctcgccttttgcgatcacatcttcttcgctgatgtcataggggacattgctcaggtaggtccctgccttgaggagcgattcggcttcctgcatggagatgatcggatattcaccgcattgctgggaaagatcgggatcatggatgcggatgatccacagccttccttcgtcatcacaggagaagacggcggagcggaattgctggttgaggaggtcctctgcagcagtttcgcctttttcatacatggtgatggcataacgctggacgccgtcgatgtcccggtcgccgccgatgatggcgatttgcggatcccgcatgccgatcacgccggcatagcgttccttcaggtattcgctgaccttcagacattccgcataggaagcggtataggtgaaatgaaggtcgtctggcagcgtgatgccgggctcgaaggtgatggtgagggtcagggcttgatcgacctgcagctctacgccttcgctgccgatgtacagacagccggaatctgcatcctcgtaaaagcgcagctcatccggatcgaggccgagccgctctgccgcggcgctcagcatctgtttcatcttgcttttgtctgtgtcttggaggccgtagtcatcatcagtgaatggatcagggttgacatagaccggcagcgcatcgatctgtgcatcttcgttccagggactgacgctgcgcagctctttgacatcatctgccatcaggatctcagcgccgcttgcgccgaaggatcccggcgtgatctgcaggagctgcttgggctcatcgggcgctggctggacaggcggcgatgccgggatcatcaagaagagcaggagcaaagcggcggcgatgagccctccgccaagaaagcgcagatgccggtgcggcctgggccgcatggcgcggaaatggtcggcttcatgaagcaggtcatcgtcgagcaagccgatggcatcgcaaaggtcttcttttttcatggtgcatatccctcctgtcttaaatatccgcgcagccgttccctgatccggtgcagcatgctcttggtcttggattcgctcatggcatgccgcctggcgatgtccttgatcggatccatgtagaagtagcgttccacgaatacgctgcgctgcagggagggaagatcacgcaggaagcggccgatcgtctcagcgagcagctgcgcgtgcacttgctggctgacgctcgtgccatctggtatgcattcctccagctcgctcagggaacaggcgtattcgctcgattgtcttttgaagcgcttgcgtgtgcggaaacggtcgatggccgccgccctggtgatcttggccaaaaaagggggaagggcctgcgggcggtgaggcggcatggacttccatgccctgaggtaagtgtcactgacgctctcttcgctgtctctgggatcgtgcaggatgttgtgggcgatcgtgaacagatagcgcccgtatttctgcctggtctggctgatcgcctgttcatcgcgctgccagtacaggtcgacgatttcttcatcgatcatgctcatcttcaccttcctttcaccctatatcccgataatgttcatcatcggttgcgtttcatttggcaaaaaggacggaaactgctcatttccgtcctgttgtcgatcattttctgatggagaagacgatgtgcggcatgtcgatgccgtaatagtgcttgaccaaggtgaagcgcggctccataccgatccgctgtgccacacgctgagaggcggtgttggtgtcgcggatgatggagaacacttcgttgaagcccaatcgttcaaaggcataggcgcggcaggcc

SEQ ID NO: 90 - DNA, 1820 bp, Unknown
  16S sequences of unknown bacteria
cccatatatggcatgtcgaaggctttttccaattcttctaatgctttttcggctcgctctggatctgtattataagtatcaagccattctttcatccatgaatattcccacaaataagaagctctcgtttctccataaccaacctgaaaggaagctcctgtatcttcatcttccagtttatcaggaagtgtaatgccatcaggccaattcaaactgtcaatggttgcaagatattcttcttcaatgtgtgcaaaatccgtgagtcctcttgaagtagaatttgtttcagaatttgaacaacctgtaaacatcagacataccaataaagaaagcattgctcctaaaaaaatcgttgttttcatagataatattttcatgtttttcctccaattttataaaatttattttatctaagcgccaatgcaggttcaagctttgcagcttttaacgctggcaatagtcctccaagcaacgctacaacaacggatgttataacagctaccactgccgaaagaataggatattccagtgccgctacgggagaatccacaggcagaaataaccccatgccttgaaccaagaaaaaggatatcaggattgaaacaatacaaacaaacactgatatagttaattgtgcgcctaacactaaagtaacaatattcgcacgagaagcgccaatcgcccgtctaattagtaattcgtgagtacgttgttccaaggatgataaccctatgttaatttgtcctaatacagaaacaaataacaataaaaatgatgttaccaaaagtcctaattgaagtacagaaagtacggaattataagtatctccaatatcacttttccctatgatatccaaatttcctcctattgtatcttctaaaatgtcatgtaatgacgaatacatctgtctcatggtaattcccgcttctgaatgccaatgaacagttgcattttttactttccacatattcggaacaagtagttctattgaatgggcgtcaagatatacagttggtatatctgtcccgtcattcacagtacctaccacattaaatggtgttaatgaaagactactttctacatttccaacagcatatgaagtatcaaaataattctgtgctgctttatttactaccatgtacagagttttatttatttccgaagaatcaaaccaatcccctgatgacataggcaaattatagattttgttatatgtgcttgtagtaaaaacaacatctacgggtacagtctttttgtaaacagtgtcacttatgtcttgtagagaagagacagacgctactggagcaactgttatctcttccagcatggaaaaggtaacagccacaaaatgatcagtattgtaaatttctcgaaaaaaattctccattttaatggtatcttgaaaatctgatcctgtaattgaaaaagaatatgtaggactccatccatacatctgtgcattgacagaaatcaaatattctttaccaagcgttcccaccaagacagaactaatcattgcaataattcctacaaacatcgatatacctgttaagatatttcttagaggagaaatacgaaggtctttaagaatcatatttaacacattgaagcctccctccgtccatttcaaaaattgtattacaagtctttgcaatatcgaggtcatgagttactattaaaagcataatgccatttttaagcacaacttgatgtaaaaggtccataatttgttttccggtttttttatctaaagcaccagtaggttcatcacataaaatggcttccggcgatactgcaagtgcgcgggcaatcgccactct

SEQ ID NO: 91 - DNA, 8016 bp, Unknown
  16S sequences of unknown bacteria
tgacgctgagtcagctgctgctcacggcgcagacaggcgataaactgtccgactttctcattgctgatctgatccatcatccatccctcctgccttccattgtaagaaagcgcgccgcaaagtcaatctaccgtcagtagaatccgccgctgacagggaaacgcgctgatccctcagcgcagatcacgctgagatcacgatatagtattccagcttctgttcaagacagccatgcgcgtacagccgctgatgcagcagccgcagaaactcacgctccaaagggacaagctttcccgaatcgtcaaaaagccccatttccagcaggatcttaaagatttccgcattgatgacaagcggatcatatatgctgttgctcaagtccatcacctcgacaccatagcagcacattgatacgatgataccgataatgaagcaggttttctcccatataataaaatcatgaagaattcttataaaagcgactatgtggactactctcctttctggcagcttctggaacagaaaaggatcacacagtaccagctcatcaaccagttcaacgtcaattccagaacgctgtccaaactgaggaagggcggcaatctcaacatttacaccatttccgacctctgccatatcctgaactgtgagatcgaagatatcgtccgcataccagaaaagcgaaacatcgccaagaaacaacgatgcatcactcccacatctgtgatcaggcacaagtaaaattcccgccggctgctgttcagctgacgggaattttcattgaagggctgcacgcttttcgccgcagcaagccttcaccccatttatctcaattatccttcacatacctggaccagcttctcacgctctgcttcatgccttccacatccagcacgcccagcgcaaagccttttctgaccagttcggcagggacatattcatcatatttctcaaagtttggaacttcgttgggatagacgagctcaaggggatcgaagtcctgttctgcctcttccgccatgatccgataaaagtcagacgcgctgaccttcatggtgaattgcagataataaggcctgagggaatctagccccttcaagcccagccgctgtttgcagcggatcttcaacatccgctccaaagcgaggaaagcgtagctgcccagccagggaaacagcgcccacatgttcccgcccagatgaacgagcggatgatcgcgcatgccggatttcgcaaagctttccctggcttcctgcaatcggcacaccgcatgccgcatcaggtatggatagctgttctgttccttcagcacaccatacatccgctccaggatgcgggtgtggatatcgccggcgacatcgccgaaataagccgggatattgcctttgaccagcgtgcagcatacttcgcggcggcgatgatccacttcctccacgacccagacgcggccggcaatggcgatcttgtcgccgatcggcggcggtttgacgatggtgcccagctcttcagcaccggcgcgcacggcatattcgacattttcctgaaagaccgcgtaaaacttgtaattattgacgatccgctctccttccaggccgacgatgagcccgccgttctcggtctggtcgatatggccgatcttgatcagatgccgcagcaagatccgataatcatcttgcgtgatcagatgaaagctggacagcgtcaagacgcgcgtagccagctctgccggcgtcatctccccgcaggaagccagcgtgctcatcgtctgatgatacagcaggctgtaaggcaaacgctgcgtgcgcggaggctctacgaaccgctcctcgatgtacagctgcaccagcgcgatgccctggatcagataccaggggatgagctgcggcagcatcgcccggggctcaggatgatcctcacgcatgacgaaccacatctcacagggatcgccgcggcggccggtgcggcccatgcgctgcaagaatccggacacggtaaaaggcgcgtcgacctgaaatgcgcgctccagcctgccgatgtcgatgcccagctcaagcgtggcagtggcacagaccgaaagcagcgaatcatcatctttcatctcttcttctgcgctttcccgatatgaagcggacaagttgccatggtggatgaggaaacggtccggctcatgattggcctcacagtattgacgcaggctctgacagagcgcttcacattcttcacgggaattggtaaagatcaggcatttcctgccgcgggtatgttcaaagatatagccaatgcctggatcagcggccttgggcgccgaatcgctcgcttcctccaataccggcgctgcatcgatgagctgccggccttcatcagcctgcgggccactgttgaagaaatgctccatggataagcgccacacttcccgtccgccctcgatgcgcgggatgagcgtccttcgcccgctgcctgcgcccaggaaacggccggcttcctcaggattgccgatcgtcgccgacagtccgatgcgcctgggccggcaatccgccagcctgcacatgcgctcgatcagacagaacgtctgcatgccccgatcgccccgcagcagcgaatggacctcgtcgatgacgatgaagcgcagatcgccaaacagcgaagggatctccatatgcttgttgatcatcagcgactccagcgattccggcgtgatctgcaagatgccggaaggcttgcgcagcagcctgcgcttttgggcgtgagacacatccccatgccagcgcgtcacctggatcccggcttcctcgcacagctcgctcagccgtccgaactgatcgttgatgagcgccttcaaaggagcgatgtataagacgccaacgctgtggggaggatcttcatcgagcaaggtcaggatgggaaaaaaggctgcttcggtcttgccggaagcggtggatgccgtcaacagcacattgtcatctgtattgaatatcgcttccgcggcggcattctgcacgctgcgcagcgcctgccagccgctttggtagatgtagtcctggatgaacggcgcatagcgcgtgaagacattcatatggtgaactccgcaaaggcctggtctgcttcatcggaaaccgcctctgatctcgcataagcgaagtcttccgaatccagcagatcatccatggtccgggccggatcctgatataacagatccaaaagctcgatgaaatcacggatcacctcacggggcgtgatgtgctgatccgcgccgatccgtccgtattccagcttgatgaagcgggcgagatccgttgtgctgagcttgcgcgcatagccatacagaccgccatgcatgtctgcgagcttttcgcacagcaccagcatctcctccggctgcagcggctccagatggatgaccggcgccagcagatccctgctgcccggcttggagaatttgccctcagccagacgggaacgcaatgcctcatagctgtatatgccccggcggcggtcttcgatggcctgcggcgtcgaacccatgatgatgcccagatactgcgccttgccttgcaaagtgtcattatacatggtgagcagcttctcataattatattgtctggtgatggcattggggatcttgtaaagattgaccagctcatcgatcatgatcatcatgcccgcatagccagcatgacggaagaagacggcaaagagcttcagataatcataccagtcatcatccgtgatgaggatattgaccccgagctcttcctttgcttcccgcttcagcgcatattcgccgcggaaccagcggacgaccttcgccttcgtctcatcatcgccttccagatacgcgtggtaatagcgtgaaagcagccgtgcaaactcaaagccatgcaccatttcgctgatggccgaggtgaccgcatagattttctgatccacggcctgcgtcagcgcggcatcgccaggcgtcagccctgtttcgcgcacagcttcgctctgcacaccgctgatccagcgatccagcacgagcgtcagggcgccgccttccggcctcgtcttcgtcgacagattgctgatcagttcccgataggtcgccaggccctgtcctctgcttccctgcagacggcgctccggcgaaagatcggcgtcagcgacgatgaagccgcggtccatgacatagttgcggatcgtctggatcagaaagctctttcctgacccataacggccgacgatgaagcggaatgacgcgccgccctccgcgatgatatccacatcgtgaagcaatgcttcgatctcatttttcctgcccaccgcgatatacggcagaccgatgcggggaacgactccgcccttcagcgaattcaggatcgtctgcgcgatccgtctgggcactttgcgttcattcttattcatccttattgcctcccaacatttgcaagatctcctcctggtagtcttccacggccagcagcacgtctccgtcgcagtcgaggacattgtccccgaacacatcgaacaaagcctcattgatcgtatcggccaccactgcgggcatcagatggtttgccttgatcagcgccgcaggcggatcgccatgagccagcatccgcaggatctgcgtatgcagcgcatccaggccctcgaccatatccggctgcgtttccgacgccgcagtgtccgcagccgcgatctcatcctcttccagctcctcttcgatcaacagactgtccctggtctgcattgcgtccaagcggatctgttccagctcagagagatcgatcgtgactgccggccgggacgcctgccgccaagcatggatggccgcctgtgccaaaggcgtcgcccatgcttcatccgctttctgacgcagataatgattggtcttcagctcacggcggaacaaacggtccgcctcgtgcaggagcgcctgcagccggcgctgatcgaaatacaggtggtcataacgcttttcataccagacaccattgcggcaatgaaacgaacggcacgcatcccagaccacatctgcgtccggatgccgctgttcttcccaatagaccgcgttagccagcggatgccacaaaaacgtcttctgctcaccgaagcatgcggtgaacatgtcctttccttcgatcacgctggtcttcgccgcatggcgccagagttccgcgaacagccgctgtccctgttcccgcgctttcgtgatgaccggtgagctctccagcttctttcccccaaagacacagagcgcggaaaagatctcctcatccgcagcctcttcaggatggcgcaatgccgcaagggcgtcatctttagccatgagcgaaggatccatgtactgacgggccagtgccgaagagacgccgtgcagcactgcatgccccatcatccagcgatgcaggttgctgcgcatcttctgatcaccgatgccggaatcaaggaaaccgacctcaaattcccgcatcttcctcagcgtttcttccggcgaacgaacgccgatgccattgagcagctcatagacatacaaatacgcaaacgacgtcgtgatcggatgaaacacccctttgcgcacctgtgtccgccaggtaaaatagccgcgcagctgccgaacattcaagtcatgataagtcggaaaataccggcggaacgcgccggtccatggcacatcgtcctcatagtcttccatccatttgccttgccggtaaaagttgcggcacttctgggaaaaagagccgccctcatattcatacagatcgagcatcgcttcgatcttttccgggatatccacgctgctctgcctgccggcaaaagccggcgtgacaggctcgatgaccaccatttttcttggcgcattgtccagcacgatggtgcagccttgccatccatccccgcgcaatgcccgctcaaagagccggaagacgacatccggatcagtgcgatcatcaaaggcaacgcctacccacctcggtcctctcatatggaaaggcagcgagaggaaggacaatggcagctcagcgagcacctcgtgcccgcatttgatgtcacagcgctggatctcgctgcagctctccccatcccactgccgcatcagcagagccgcccattttcctgtctttggatctgccagcacggacagaccaggcagttcaggccacttgtgctgttcctggatctgatatttctccttggcatatgccgtcagctctgacagttccaaagcgtcacctccctgctcatcaaaagaaaggccctccattcgggcacgttcacggtcgtttgtgttctcaattcaggcatagtataattcccttacctgcatacgtcaaggagaaatcaggtgagctaaatgacatcattttcattgcagcacaaaacagtgcgtgtatggcctggcacggcgcaagcgtgtcccatcatctatttccacgcgtttgaagagatcagcgaacaactgcttcaacagctgagggccgcgcactgtccgcaagccacgctggtcatcatcagcgacctggactggaaccgcgatatggtcccctggaacatcccgcaaagcgatgccttccatggcagtgccgatgcttatctgcggctgctcatttcccgcatcatccccgaagcagagaagaccctcggcacaagaccgctttggcgcggcatcgccggctattccctggccggactgtttgctctctacaccctgtatcaaagcgacgcgttcagccgcgccgccagcatatccggctccctgtggtttcccggcatcaaagaatactgcctgtcccacgaaccgagacgcacaccggaccatctgtatttctcattgggcaataaagagcataagacgagaaaccagataatccgctgtgtccgggaaaataccgaagcgatcgtcgatcatgcccgtaaacagggaatcgacaccacattccagctgaatcccggcagccattataccgatgtcatcaaacgctgcgccgatggcatccagtggctggcgatgacaaaagccgtctgtgtaattacggatttctttatttatcttgacccccaaatgaaaagcacctcctttttggcataaaaaaatcgccacctgcagtcaagtgacgattttcattctttatattctgttgtcagcggatgagccatccgtaatcctgcctgcaatccaccacataatccgcatagacggtatcatctatgatttgaaagattatcatatagcgtttttcaaacaagataaatcggtaggcatgtttagggatatattcccctgaaagccacgggcatctctggggcattgtttccagtgagtttgccgccttttcaaattccacggtcagcttttccgctgcttctggactgacctgcgccaaaaaagcggcatggaaaacaagcatctgcgtcgcctgctctgatacaatgacacggtatttactctgattttccacgacccgtcgcctccttgattacgctgcgcatcatggctgcgacttcatcgacagaataacctttgcttccgtgcatcctgtcctcctcaaccgcaaacagttcctcacggagcttcagcatcttctccctgcgattgtaggtttcaatatccataacgactaaatctccctcgccattcttggtaaggaataccggctctgcggtctttctacacaattctgcaatctcgttgtaattctggcggattgctgcggatggacgaatattcatagccacacctcccttttatatttgatagcaatatcctaactatattatgcccatttcatgctatctagtcaatatgcgcagaaaaattcacctgaagtaaaaaagtaaatgcaacgctaagagagccgaaattgcatttagtctccacgaactgcaagttgcatttactcttcctgcgcatatcattatctttgtccggatctggatgcctcgctttgatcggaggtatcttttccagggcatgaccataattgtagggcgtcatattctattacagaaaaaatgcagtttattttgacctgtcca

SEQ ID NO: 92 - DNA, 3696 bp, Unknown
  16S sequences of unknown bacteria
ggcagctgaaaaaattccgaaaaaactgtatgtctatcttgacacaaccagaggggatggtgctgggccttgccgccaagctgtttgtaattgccgggccggttattgtttacggcacagtggccagcgtgctttacgggctggtgctggttattttcggtatggggtagacccggtgccgggcgcgggatacgggcggccccgccccggccgcaggccgggggaagccgccccccgaaagggggccggctatggggcgctgcgcgcccctgcggggccgcccggcaagctcgcggtgagcagaaaagcgaaaatgggaggaaaaccaatggcaagacgaatgggtgccgggaccatccggctggagagagcatccgcgatagcggcagtggcggcggtgggcagccgcctggagcaggagggcccgctgggcgcggaatttgaccggacggtggaggacagcagctttggcgaaaagagctgggaaaaggccgaaaccaaaatgcagcagctggccatggaattggcgctgcaaaaggggcagacggccccggagcaggtggatgtggtgctgggaggagatctcctcaaccagtgcatagcctcggcttatgccgtccgggcgctggggaggccgtttttagggctgtacggggcgtgcagcaccatggcagaaagtttaactttggcggcgctgctggtggagggcggtgctgcggagaaggctctggctgttacctcctcccacttctgctccagtgagcggcagttccgcttccccctcaattacggcggggtgaggaccccgacggcccagcataccgctacggcctccggggcggccttggttggaaagcaggggagcattcacatcgaggaagtctgcattggccgggtggtggacctgggggtcaccgacctgaataacatgggggctgccatggcccccgccgcctgggataccctgcggcagtactttgccgataccggcaccggccccgctgactatgataagatcatcaccggggacctggcgcaggtgggcagcgacctgctggtgcggctggcggcggaggagggctgcgacctgcggccgcgctataccgactgcgggctgatgctgtacgaccgggagggccaaaaggtggatgccggggcctccggatgcgggtgcagcgccgcggtgatgtgcgcgcattttttgccggcgatgcagcgcggggagtacaaaaatattctgtttatggccaccggggcgctgatgtcccccacggcgtgccagcagggggaatccatcccgggggtggcgcacctgctgcacctgacggcggccggagaaccgttatcttaaagttccgccaaaggaggacaagaacaatgcaagctattttgccgtatttatatgcatttctggtgggcggggcgttctgccttatcgggcaggtgctcattgaccgcaccaagctgaccccggctcggatcctttccggctatgtggtggccggggtgctgctgggggcgctgggttggtaccagcccctaatcgattttgccggggcaggggcaacggtgccgctgaccggctttggcagtctgctggcccgtggggtgaaggaagcggtggccgagcagggcctgctgggagcgctggtgggcggactgcaaaagggggcggccggtattgcggcggccatcctcttctcggtgctggcggcgctgattttccgctccaaggaccagtgctgaggggtgagctggcgggtttcggcgcagccgaaacgctccgccgccgggcccggaaagctgctgggagaagcggagagagggggcagggagccgggcggaagccggggatgagcggccggaggagagctggcggagggcgggcccgcagggccggcggcggagccgccgtaggcggggtggagccccgccaaagccgtccgcaggacggcttgccttgcgggccgctggccccctgtagaagcccgataatttgttagctttccacaagaaaacgatacgggatttgacaaagtggcgaaaaccctgtataatgcaacccgaacttgatccaaaggagaaatttgatgagtaaatttaagctcggcgcatggttccatcgcgccgggaagctgctgcggggtcggacatttaccgcagcggggctggcagtggcggttggtttgtcgctgtgggctgtggccgaaaatgtcaagattctttacattgccgacggggcggagaccggtgtgaccctggcgctgcgcagcgatcccaccgagcaggcgctttcccgtgccggaatcacactgaaggaaaacgataccgttaccacccgggagaccgccctggtttacagccgggtcagcatcagccgcggggtttcggttacactggtggccgatggccgcgagaccccctgcaccgtgaccggcggcaccgtagcggagctgctggagcagaacagcatcacgctgggggaaaacgactattgcgataaggaactttccgccctgctggaggatggcgatgtcattaccgtgcggcgggtggaaaagaaggtagtaaaggagcaggtagcgatcccctgcgacaccgtctataaatccagcagcctgctgcgcaatggccgcagtatgttgattaccgaagggaccaacggactggccgaaaacacctacgaggagctgtggagcggggacaccctggtttctcgggtgctggtgagcaccaaggaggtgacggccccccgcagcgccctggtgatagaaggccagcgaggcgcggcgatctcccggctggactggagcgaccaatacccgctggacgccaatggcatcccggtgaactatgagaaggtaaaggccggccaaaaggcgaccggctattccgccggagagaacagctacggcagcagcggcggatactgctattacggcaccattgccgtgaaccccaaagagtacccctatggcaccaagctgtatatccgcagcagcgatggcagctttgtgtacggctacgcgctggccagtgataccggtggatttatctccggcgaggtgggagtggatgtggacctgttctatgagacctaccgggaaagcgctctgaacagcctgcgcacggtggatatttatgtgctggagtggggcaacgggacactgtactactaaagggatatcctaaaacaataaaacaagcatcaagtttaccgcccggggccacaaaagcttcgggcggggtttttatggttggatatagtgggtgcgggcttttgcaaaggcataaattgcacggctaccgccggggtggcacttttggatcgcctcgtcgggcgcaacctccgcttaagtcgggctgaccctacgccttggttcgggcagccctccccgctgcggtgcgccctcctttccccacaaggtcttacgaccttgcgggggccccaattcaaaagcgacttggggtaaaccccaagaccccgacgcaccggaacgcccgcccggaagggctaacgacctcccggagcgtaggctaaacggtgcttataaggtgcagcgggcgcatctgcccccaccgccttgcggtgcccgaaaaaatcttcgcgctgctcgcttgctcgattttttcgaccgctgcgggtgctccgcctcgctgcatccgccactggcggcgctcggctccgcaccccct

SEQ ID NO: 93 - DNA, 5050 bp, Unknown
  16S sequences of unknown bacteria
ttcaaaggtctcgaaccctatacatactgctgacagcaaagggattgcagccgagaatccattccatctgacgaaccgcgacctgcttgatttctctgtcgtttaacgcacgcgccagctccatagcagcaagggctctgcccatcagcgtagcatggaacccgcggaactgataagcaacgggaaaaacacgcagataaaagcggtcgttcagccggatgccgtttctcacctgagcattgtattcttcaagactcggcgctccagcggcacgggctccttcatgcgttatcgtcgaaaaatccgtattgtccagttcatatataccgttgggcagcaacccgtaagggaccgtgcgtgaagtgagcgctacatattcccgataaagttccaaagagtttttccagcgggctgcgtcctcatgctctggagccaagcgatacagcatagcgaatgctttgatcggcgcatgctcgtaagaacgatgataataggtctggattcgctcatgcgtttcattctcatagaaatagcctcttaatgggatagaaaaactggggtctaccgcggatgcctgacatgccatcagaattcttgcaaaggaaacgccacgggaaaggtattcagtttctccaaacgcttcatataactccatagctgagattgcagcttgagcgttcatctgaagctgcgtatagcgcgcccctgccgactcgttgtcctgagactgatgcattgcggccagagcaaatgaaaaatcctctttggcacagcgggcgcaccaatctgcgaatctcggatcttcatcccggaaaagggagattgctttggcgcacacgcccgcaatcataaagttatcgaaagggcggttgccggaatcggcattgatatcatccaaggtcccctgaatgttgtcgctccaaaagccgatgactgttccgttgtgtcggtatccatcgccccagcgggtgcgcatcagccagttcaatccccagcgggcttcttctttggcacgctgcgacagttccggttgggcctccctctcggcgattgccaattccagcatggcgaaaaccgattcggccgtattgatggccgcctgcgtcaaatcgcccgcgtcatgccaccccccacacaccgggagccgcctcccgtccggatggacgctcataacatccatgtggcactctgtatggattccgggtacgtcaaagccacaacgttctgaaaagaaaaagttcagtgttttccatgcggccgggatataggcctcccttccgatacggaaaggacggctcttctttccatccacttcaagagtataccacccttccgctttcaccggggaaaaatccatttgccggagtccattcgcctgagggacacaattgccttggaacgtcacttcgccgctgctgtttctcagataaaacacccctgaaccggattgcgcgtaagcctgtttgaccgcttccggacggtagccgctgtggcaataagcaattgcacccgcacgcaggtcaaaccctttataatgatctgcttccacctgctccagacacatattatccacatagaccgttatgccctgcggcgcaggcaccggagtgcggtgtgcatggattgccagagaaatacctgtgacaaaatcgcgatagacataagggaactcccaaacgacatgctgccactctccgtgtgggattcccaatgtatgcgtgccttcaaaccgccccgggagcggcatgatatgctttccctgattatgtatagaaagctccatgaagttattcgcaatcgccggtgaatcgacatagatccaaagcgaaatacggttaaacctctccaaattttcgccaggaagcaggcgcatcatggtcgtgaccgaaaatgcgcggttgctgggatgtctgcggcaaccatccgtaggcacatccagccttatgctgcctttgccggaaatggtatgcttttttcaaagctcataactccggggccttgcagcctcacattatccgaatccagcggcagagcgcggaagtctaatacaggctttgccagccatcgtgcctccgcacactcttccagatctttctccattccctgcctgaagcagcggctgttctccaattgtcttttcatctgtccaagcatttttgctcctcctatcacattcaataaggctttgccgtccacacggagctacacgccttatacattcctatacgcttgtttccaggcaagatctatgcaaataccacgaattcttacacgaattcatttttcactgtacattatatcattcatcggtttttaatatagtatgatttttcttcagccgtaagcggacacgatccatattgcagaacaaaaagacggtgctgcaaccgccgcaccgtctttaaatatttaaaaatcaaaattctgttgttttcaggctatcgctgccgcatgccttacaggcattccaaaagagggatcacatccgcaagcgtcgccgcgcgggccgcccacagcccttcgctttccggcgggatgggagtgatatcaggcacaacgacagccttacagcccgcagcccttgccgcccgcagtccgttggggctgtcctccagcaccaggcactcctctgcgggtacgcccagtgcctttgctgccgccaaaaagatatccggtgccggttttgcatgtgccacctcgtcgccgcacaccgcagcttcaaaaaagccgtctacgcctgccatttttaaatagagcagcgccttttcccgcacagtggccgttgccaaagccgcagggatgcccacagcccgcaaatgctccagaagctgccgcaggccgggcttcaccggcagcccatcccgcgcgatggcctcatctgcgtacgccacacgcagtgcacgcaatgcatcatagtccacctccgggcccaagcgttccagatacatcgcacggctgtcagccacactcatgccgcggcccgccgcgatcacctcgtcgggcagttccagccccagcacctgagctccatacttccaaccccgatggccgatgcgctccgtgtcgaacatcaatccgtccatatcaaataaaactccgcgtatcacagcttcccgcctttcacatcttttgtaccgcttcccatatctcccggatcacagggattcccttgcatctgttttcccggatgttccgcagcgaaagctcgccgggataaactgtctgtccgccttcctcaaccggctcagaggccttcacatctgccagaatcgcgtccacgatggcgtccgtctgctgtgccgtattgaatttttggggatcgatggcgatcatgacctgtgtcagacccacttcgtcaccgaatgttccaatcttctgcaccgaattgcctgccgagagcaccgtggcgatgaggtccagcacgatggaaagtccgctgcccttccaataccccatgggcagtacgcgccccgtcttttcaatctcagccgggtcgcgcgtcagttccccttttgtatcgtaaccgcccggcacgggcagctgcacgccccgcagccgacagtcctcgatctttccgtaagaaaactgggataccgcgcagtccagcacaacatgctcgccgttggagcgaggcaccgccaaaacgaacgggttgtttccaatcctgcggtctttccctccccatgcgggcatattgggcattgtgttggaccagcagatgccgatgaagcctctgtctgctgccagccagccataggtaccgccgcgcagccagtggttgttgtttcccagcgccaccagaccgacgccgttctcttttgccagcacacaggcgcgttccatcgcacgccgggcgttcagcgggccaaagcctctatggccgtcccagcgttccagcacgccggaacgcagttcacaggtcgcgcgggcgcggggatctatctcccctttgtccaaataacggacgatgcgagggaaacggtttaacccatgtgaatatacgcccgcaaggctgttttgagcaaaaatatccgccgcatccgccgcgtcctgcgccgcaaagccctttttttcaagcacacgggcaaattcccgcgccatttcctcataagcgactctcatacgtatccccctttaccagccggctcacaatgggctggtactactttgcacatgacgtttctgcagcggtgccaaaccggccaatcacaaaacagagcccgcgcccgcctcgaaagagacgcagtgcgggctctcttttacgatttggccggcagccgccccgttttattccttgcgctcggagccccaaaagaacagggccaccgtgccggggccggtatggctgccgatggtagtacccacgtgattgatttccactttaccgttcagcttggggaacttctgttccaccaggtcggccactgcgcgggcgtcctcataacaggcggaattagaaatatagcactttccattgtaattcgtcccgccgtcggcaaactgttccatccgggaaacgatctctttgataacggctttctttccacgtatcttggaacgcggaatcaaacggccctggtcatccatattcagcagcggacagatattgagcaccgtaccgaaccatccggacgccttcgaaatacgcccgcctttcacatagaacgtgagatctgtcgaaaaaaaccagtggtgcagacgcagacggttggccagcgcccattcatatacagaatctacatcttcacctttatctcttaagtccgccagacggtccatcagcaggccgtaacctgacgaagcgcccagagaatctacaatatagattttccgatccgggtatttttgcagaagttcttcccgcgccacacaggcggaattgtatacgcccgagatacccgaggaaagcgtgacatgcagaatatcttttccctgttccaaaaacggcgtgaaataagcagtaaattcctctacgtttacctgggacgtctgcgtctcggctccgtctgccatcgcttggtaaaactgatcgaacggcatggacttgccc

SEQ ID NO: 94 - DNA, 2136 bp, Unknown
  16S sequences of unknown bacteria
ttgttcttactgcattatcccctatgccagaggtcctgttcgcagcagagcaaaagatgatgttgtaagagaaatcaaggagcttgcacacaacggctttaaagagattatccttgtcggtattcatgttgcgtcatatggtgtcgatctcggtgacacaactcttgaaagtttaattatggacgttgacaagattgacggcgttgagcgtatacgtctttcttctattgagccaatgactttaaatcaggaatttatagacagtattaaggattctaaaaagctgtgtcaccacttccatatatcgctccaatcaggttgtgacgaaacattaaaacgtatgaacagaaagtatacaaccgctcaatttaaaggcattgtggacggtttaagagaagcatttgacgatgttgcaatcactaccgatataatggtcggttttcctgatgaaagtgatgaagaatttaataaaacagttgaatttgtacgcaatataaaatttgccgacgcccatgttttccaatattcgcaacgtcgcggaacacctgccgcaaaacgcccaaaccaaatttcaccggacataaaggaaaaacgaagtaaaataataatcgccgaaacacagaaaacgcgtgatgaatttataaatcgttttataggcaaaacaatgcgtgtactttttgaacagcctgcaaaagacggactttttgagggtaaaacagataattacattacagtccacgcaccgtccgatatagatttaaacgaccaattcagaaatgttcttcttgaaagaaacgaaaacggaattgttatcggaaaaatagttgaatagtaaaaggctgatgattttgatatgcaccccaaaagttagacacttttggaggtgcatatttttatggcaaagaaaggacaaaaatatagaaaacactcgccagaattcaaactatctgttataatggatatgcgagaaaaccatttgggtataatggaaacagagagaaaatacgatgttaaacatgatgtaatatcgaaatgggaacgcatattcttggaagaaggagccgaaggtctgatgaaagaaagacgaggtagagccagtaaagtaaatggaatagcaaaaggtcgtccacccaaacttgataagaaaattgaagaagatttaattgccgaaaatcagcgattaagaatggagaatgaatacttaaaaaaactcagtgccttagttcggaaaagaatgttaaaagaagagaaaaagcagcaatagtcaatgaattaaggcaaaaatatccgttaaaagacttgctgcaattatcaggtttagcccgtagtaccttttattactatatacaacatccaatcaaagataaatacaagaaagaaaaacaagaaatactatatatatttttagctaataaaggcagatacggataccgcagaatcttaattgtattaagacaaaaaggatatacaattaaccataaaactgtgttgaaactgatgaaagaacttaatctcaaaggaaaacaacgcaaaaacagtaaatatcgttcatacaaaggagaaatcggcaaaatagccgacaacttacttaacagagaatttacagctacaaaaccttttgaaaaactagcaactgatgtaactgaatttaaagtgtgtaatgataaagtatatttgtcacctgtaatggatttgtataatcgagaaattgtgtcatactcaatttcattaagtccaaatttgcagcaaattagagaaatgcttgatggtttattcaaaaagctgcccgctaatgcgaaaccattattccattctgaccaaggttggcaataccaacattcggaatatcaacgtttactgtcagaacacaatattgtacaaagtatgtcgagaaaaggaaactgtatggacaacggtgcaatggaaaacttcttcggaagattaaaagttgaaatgttttatggtgaaaaatttgaaagtgtcaaagctttcatagatgaattaaaaagatatattgattattacaacaatgaaagaatttctttaaagctaaaaggaatgagtccggtacaataccgaactcattcacaagcaagttaatatttaattttgtctaaattttggggttcacttcat

SEQ ID NO: 95 - DNA, 32759 bp, Unknown
  16S sequences of unknown bacteria
ttcgcctccctaaaaatctgaaatttctacttgacttttattagcaggtctttcagaaaaatataacgtttgctctgccaattttcttcccatttttttgccgaggtcatagaaaaaacatgtcatcatcctgacagtgatttgaccgtgaattgacatgctggtgacagtgtattgtcacttttcaagctgtgcgaatgcaaatataatttagacagaaacaaggagtcgcgactgatgtttcttgaaagtaaatgtaccagtattaacaaatggtgagcaatgaaaggggtaaactaacatggcagaagctaatatggcgcgtaacggtaagtttagcagggggctaagtggttggactacgagtggggtcgaattgtcaaacaaccaagggataaatggatcaaagtgtgccaagtttacatttaagaactcaagcatgggatatctgcagcaagtctttccgattgaacctgcatgtacctataaggtaacctgttgggtcaaatggacgggttgtagacaactggttattgcgcggtccggaagcaatggctgggaatactcgcatttcgcgtttgagaatacgcagtctaatacgtttaagaagtttgaaatcagttatctgagctctgaaaatccaagcgcaactggccttaatcttgtattctatgtttacaaggatagtaacgccacaggatcggaagcttacattgacaagattgaaatcaatggtactgtaccgacgagacgaggatgcttttggattaaggcaccgtgcccggtatatagcaaagcaacgggaaacaagcttgatacctgtcctacaggacgcagactatatgcgtactacgaagatggtgataccatttcgttgcattggccttccaaaggcaagccaactgctatcatcacacttgatgacaacttaattggcggctctgtcgaccctaatttcacgtggagtgactctgaacgaatcctgcaagttgttatgaacgaggttggtagaaccctggatgactttggtaatgtggccgacccgtggtgtcaaacttttgtcaattgggtctcaatccttggtggagcggattgcagtcatccggtatatgatatttctggttgtagctcagcaatcaaagcgttgggggatcgataccatccggttggagatactgttcagcccggcgattacactcctaccttgggtgattgggtatactatagggacattagtaagcccgaaaatccggataagcccgcagaccatgttggatttattttgggttctaccagcactggttttaataccgtagaagcaaaccgtggtgctgatgttgtacagcgatttgccattcctcgtcgtgggtgcgctgaaggttcgaacctgaaaatcattggctttgcacgagcaccatacaacagctaaaatctgtcagccctgattgcgagtaaccgacgctgacgcggaaaaagaacaacagaggacatgctgtcacacagcatgtcctctcagaccgttgacaaaccctccagtcaacggtcattttgttgtccaaaagcaagagaaagcgtggccttgatgttgcaggtgaaattatcactgctcaatgacaacgatacaatcaggttgcgtagggtctcacgcatagaagctcatccgccttttcatggaataagaaaaagcagccagtcggcatatttctcgaagtgtgattaccgccaacttcggccgtttctcggagtcggcgaaaaacgcccggatatcatgttgacaatttttacattttcgggtaaactacttgtggggtggaatttggccgaaaggagtgtggcatatgccctacatcacgagagatttagagaaggtcgttttttctgtgacgcaggagtatccggtcgtaattgtgacaggaccgagacaggtgggcaaaaccaccatgctggaaaagctccgcgagggaacaagccgaaattatgtgtccttagacgatctgaccgaacgcacacttgcgcagacagatcctcagatgtttttccaattgcataaaccgcctatcctgattgacgaagtgcagtatgcgccgcagcttttcatctacatcaagatcatggtcgatcagagccatcgggcgggagatttctggctgaccgggtcgcaggcgttcaagctgatgacgctggcaggtgaatcacttgcaggtcgagcctgtgtattgcacctgaatggtttgtcacaaaaagagctttacggcagtggcgagaaccagccgttttctgtctctattgatgccattcgggagcgcatcgcacaccgtgaagctgcggatacgcctgcgatctttgagaggatctttcgcggctccatgcccgcgtttgccagcggagcgatcagcaaccgaagcctcttttactcgagctatctccagacctacatcgagcgtgatgtgagggagttggacggcagcattgaagcgacagagttcctgcgcttcataacggcagtcgcctgccgcacaggtcagatggtcaattactcggatataggcggcgaccttgacggtatgcgcacggagaaggttcaagcgtggctaggcttactggagaaatcggacatcatcttctatctccacccctactcgaacaatcagctgaagcgcacagtgtcaaagccgaagctgtatttctatgattgcggtcttgtcgcgtaccttacccgttggtcaagccctgaaacgttggaagcgggcgccttgaacggagcgatcctggaaaactacacggttgcggagatcgtcaaatcctactactattccggcgagatgccgctcatcaattactaccgcgataacgacgcgaaagaaatcgacgttgtgatcgaatcagatggcgaaacgcacccgatggagatcaagaaaaccagcaaccccggtacccagctcgttcgtcccttccgattgctggacaaaggctctgtcaaacgcggacagggtgccattctctgcatgaaggatacgttatccgccattgacagccaaaacctgatcgtccccatatggtcaatttgatggtttgatattgctccaaacctcgtcgatataagtccgacgaggttctttttgctatacattgatgtggcagatctcatctcacgcagcgcacaaagactgatattttaacagtataggtcttttctccatttttgcataaagattacggtcgatcacagcaatatttcatatgacatgtatattgatgagccgataaagagagcgcctcccatgcttttcgtcttgatggcgtattgaaagtatggacagttttgctgtcggtaatctggcactactttgaccgtaaaatgtcagtgttttggcggtatactgtcacttttcaacgcttcttgggtgcggtattatacagttgcaaaaggaaatggtggccgccgaaacccgatgcaaaataaaagaaatcaaaggagaaatgaaaatagctgatacctattacgtgaatgttccctacggcgaaacggtgaatgtgcgaaccgaaccgagtcgtcagagtcccatcctcttcactttgccgcgtggtaccatggttaccagatggggtactttcggtgctactgatggttctggtgatcagtactacggtatcaataccgaagatggtcgctctggctgcatcaattccagtttccttacgacttcgtacgtcgatcctggcgatccttggattggcacttatggctctactgtttggaaaaagagccttcactctggtcagtatcatgcggaggtgcagaatatccagcgcgatcttcgtaaggttggctataccaccattacgaacgccgacggatactacggcaccatcaccgaaacagcagtcaagaactttcagcgcaactggggtttgaccgttgatggctactgtgggaacgcaaccaaatcagcgctttggaaccatcctgatcggacctaatcgaacaacctgatttcaacggaacgggagtgtctcaaaataactttgaggcgctccctattcttttgccgatatctaagccccaacgcacatttaaacaccctaaataatacatacaggctatttacaagcaaaaaacgcaacaaaaccacaaggcaccttccagagccaagctccccaacctatgccttgccaaactcacgaaactattttttcaaagagatgcgattgcagtcgacctacactcgtctttgcatagaatttgttcggattgaaagcaaggcacaacagcaatagctcaatggaaacaatacgcttgcctcttgtcaaggaaggtaatgctgaaagcaaagaacaaattgcgtgaactgacgaggcggaaccggggacagaatgtccgcaaggtcatgggcgaagtcaaacgctgcatgacagggtggctcaattactacgcgatagcatccatgaagcagagaatgcaggaatgggatgagtggctgcgtcgaagaatccgaacgtacatctggaagcaatgaaagaagccgagaatcaaattccgcaacctgataaaactgggtgtgccagaatgcttcgcgcggatggtggcgtacagcggacgaggatattggtttacggagaaaaccagatccgtaacgagagccacaacaaatgaaaggctcatacgcactgggtactttgaactttccctgacgtatgagtctattcaaactgcttatattggacgcgccgtgtgcctaacggtacgtcgggggttagtcacccaatgttattaagatagtatacttacatcaattttttacacaaagaagtatttcactgctgttagcatctaaagttacttgataatgaacttttgcttgggttgggctttcaatcgagcagaagcatacataccattttcgttggttgccaatgtctagcatgagagtagccgaacattcatatcggtcaaggaaagcacttgaaatgtcaaacttgttacataaagcatcacgagatgtttgaatagcagattcttccgaaatgtcgcgttcaatgggaagggtatatctcggaaacaaatcagaccgtcgatagagtgtgtcaaaaagtactaagtcttctagggaccaaagttcatgtgggagttgccgctgaagctcccattgatcgtacaactcaaaaaaatttgtttgggctgtcgagatgacttcccctgtaaacgcatctatggtaataagcaaatagggctcagcttcattttccacgatttggctaacaacccattcataagtctggtcttcttcgttatatatcaaattagctttggtttctaataatggcagttgagtgaggtcgtatcccacatcagaaacagcggtattagctttgccaattgcatcttccatcgtgattgagccgtccactactccttgtggcttaactatttgtgcctgcgacacgcttgaaaaaaacaaactagtcaaaagcacaacagcaaagctaccagacgccaagaattgggatatccttttcatgaggttcgcctccttcaaaatatgggaaatccattaatataatgaacgacaaatgagtcatattgcaggggacagaacttttatttgggctacttggtctagtagaacatagtgatagtacaagggacaacaatgtcgcttttttcattttcatctttctcgcccattgttttgactgatactcagccatccagagtatccagacaaatccttaagtgatttccaacacgctgtaccatattttgcttcttcgtccctctttgcttgtctttgcgaaagcgatgaaacaaagacatttttccttccctgcaagattaagccattgataacagcaaaaatataacgaaccaccattgcctttttatctcttttgattgtgcatatttctgtgtcatcatctttattccgcattcgcaaatgcttggattatctcaagtgcgtgcttatagtaccgcataagcgttcgactcgttttaccaaactccttccagcgttcgttgtactccagttcgatgcgcgtccatgtcacgccatcaagcacgtggcgacgcacgacatactcctcatcctcactcagaaggctcagccaccctgcaaccatcgcattcttctctttcagcagcgaaaggcgttcggtcagatgggagggcatcgtgtctccatccctgcgaaactgtgcctcgagcttcctctgcgctgcgcagttcttcctatgctgactgatttcatgccggatcagttcaaggctgtattcctccatatctcattacctcccttgagtttcctattttgcgcaacgaatcatatgcaaacgcttatgctgtctgtattgcagagaagcacctagtaaacaccgcaaaagcaggcagacgaaggcgtaggttgatttccatacggaaactcaaccattacctccttattgcgctctcatgattgcctgaagtaatatcgtcattgagcatttttattttggggatgccttgctcttgtctgacactcagcatttcctttcctgttaaagaagatcatgattgatccgcttgttaagtatccgagcaaccttcctcgatcccttctcttgcaaagctttcatagaacgaatcgatttttccacatccgctccccatttctgggcgaacagcaccatggtctgcggccagtccaattcttccatcacgtgatgtcggatcacaaaggcttcgttttcggacagcgccgcaaagagaccgtcaatggttagcagttcctgctttagttccaagattcgtgcggcttcctcccgaggcatttcttcttcccgcccatagtaccgcgcttggcgcaccttcaattccatttctatctcaccgcgttgcataaagagctttctaacgttttcttgcgtatacattagtcgccctcctctttctccgctgcgaaatgtccccagaacgacgtagacgggcagagggaaggtgcctttctatttctggtttttttcgggcttgtcggacatcttctcctccagatcgttcaacctgttctgaatattctcaatgccactttgaatattgccgctgagcttgtcaatggtcgattggtactgtgcttctctctcttcattctgtttcagcatccgaaagaacaaatagatatatagcccagcccagattccttgctgaagcgcaatttcaataatgttttgcaaggtagaatccatggctgcgttttccttcctttcctctatgaatccgagcaagagccgcaggtttcttgcatcccttacatcatagcggtaactcctctggaaagggagtgaaaaaaacgacccaaaccatacgtttttcgtgcaattttgacgcattcattggcaaccgtctccttggagaagctgcgacaagaatatacgttcctcttcacttcctatagtgctcgaaagctgtccattccactaccttcaaataaatttgtataaaaccgcgaataatcatcctcatagcatccacaccatgttatagcggcgtttgtttttcgtgaggcaccaagtgaaattgagacgaaatcaatgctatcgatagtaatcaatgttataaaaggaactggcacactaaggaaagcgttgctagcagacagaaaaacggcaaataaaattttctgtcatacaaaaagaaagtctatgttaagtgtatgcaaaagtagcgaagcctatatgatagatgcataatgcatcccaattaggctaagtcaaagagaggcttgttgtaaaatgcagcaagccccgtgatgctgccctccttatccagagggtaatgcagagcaagctctgcggttgtgaagtctgtctgcgacattctccgcctggtttgacgttacaaaacggaaaaaagccctataccgatcttcctcaacggacatagatcagtatagggccgctctttaccggccagtcttttctgtgcgctggtcgtgttcacgaggttttttctcactggcaaaatgctgctccaacgcaaaatgctcatcggcaagcagcgtatccaagttctttttgatatggcgcaaactctgcaattcctcgtttcgctgggccaacagcttaccagtctctcgtttttgaacgagcaggtggtcatattcctgcgataactccgagagtgtaggcagcttcccgtccgctgcgctatatacggcctgcgcctgtttgtgcgcttcaatggcttctttgttctcccgataaaatgcaggtgaccagccggattccttgtatttcgtgtaaacatcccgggtttgcctgtaaaccagaatcgcttttctttgagcgctgatctcctgcatccgtctttgcgcctcccggatctgatctttcaggccattccggctgtccagcgcaagctgtatcttttgcgtaaggtcagcgtaggaaccaatgtgattctctttcagatagatcatggagctggccagcgtgtcgatattgtgtttttcggcccagcgctcgtatctttttcctttcccggtacgcagcttggcttcaatgtcgatcagaagctcaatctgctttcgcgtgtattgggttctggaacgttttggaatgtgaacccgctggccggaaagcgatgcttcaagcgttgcttctgtgtactcaggtcccaatgtatccagtcggatgaagcgtttccctccgggtggtcttatgctgatttgcgccgcccgcttaatccggcatcctgcttcttccaagaactgcatcagcgcatcaaatccatccggccgcattcgcagcgcggcatcaatcgtcatgcgcaagatatcgcgttgggaggtctcggcgttctgtcccagccattgatcgtatgtgacgctctgattagcgggctcacggatgacagagaggcgatgctgctcacaaagctggtcactgagggcagcaaccactttccccgaacgccatacatccctgaatttccgcgagccacccagcgcagtcgcgcaaaagacgatatgattatgcacatgacggcggtcattgtgcgtggcaacgatgaacgcatgttctcccttgagaaattgggaagccagctcatatccgattttgtttgcttcttcgggcgtcacttcgccgggtttgaaggactggcgcagctggtaagcgatcacttcgttgtgaatctttctgccggtgatggccatatactcgctgcgcgcaagcaaaaactcctgatctgcggtttccggggagcaggcatatgccgagatcagcgcgccgccttctgtcttatccgggttcttcacgtaatccacccgcgctttcagacactgtgcaatggtcttgcccttgttgatgtgcatcggaatgatgcgagtcgttgccatgaacacctccgaatcaaaagaaaagcggcgatccgtgattcccacaaaccgccgcatgccaatgaagttcagtaaagcaagccttccacaaaaccgaggatacgatccatctggttcagcaggagatgcgcgattgccggcaatccgacggggctggccaggagcgcaagcaccagaaaggcgatcccgttctgccaatagccaatgaagaactcgattcccgctaggagcgcaaacagcgttacagacaggccgatcacggaagaagcgatcgaagtgacaaatgctgccagcccgagcatcaaccggaggacaagcatgaccggggccagcgcaattctcagcaaagtcttcatcgtgggacgcctccttttttatccggtacgctcgaggatggagagcagtttgcgcatcatctgccagagttcatcctgcttttgcagcatctcttccatttcggtgtcgtacatctgaccctgtgcgttcaagcgcctggcaatctgattgaggttgttggtcatgttgctgagcagtcgaatcatttcccgaatctgcggcagatccagtttcagaatgtagccgttcagggcaagcgcccgcatgtaagcggattcgtttgtgattccgagcgcatccatcttctttcgcatgattcttgcttcggattcggtggttctgaagttgtgttgaaccagacgcttttccttttccgccatgattatctctccagatcgccctttttgcaaggctgtcgccgggcggaaagcgcagcggcgcgttcccgctgatgcgcagaacgtctggcaaaggcttcggcaatcttctgcaaagcctgatcccggacatgttccattctggcggcaagctgctttgcttctccggctgtaagcagctccagattttccccgttggttctcaccacaaccgcattccccatgatgggatcgccatgctgctgtgttccatagagcgcacttgccgtcgcattgatgagcgctccgccgggtttcagcttaccctcttcgtcaatcatcatcagaaggtcatcctttgccagcggctcagcctcaaccagttcaatccagtcgcagccaatggcttcccgtgcgatatcaaacatttcccgttcgggattacacgcgatgattctcacatcctgcgtttcggtgagcaggacggcatattgcttttcattcaaacgcttcgcctccttatctttccatgtccagtgcttttttcttctcatctttagcagcaggcatgagaggcgaccgcgcatctgcccgggtctggggatgttcccgttcccggatctccttgcgaacctgccagatgaacccgtccaaaatagccggatgggaggagacggcataatcatgccgccggtccattccgccgtccaacaagccctgcgggagtcttacggaaaatgcccagtccttattggaagaagaaaaacggccatcccaggacttgtcctgaaccgtcgcagcaagcacaagggttgtccgttccatgccgaattgctcaagaatctccagcgccgcctttttgtccagacgccatccgtcgaaatagcgggaaatggcatcctgaatcgcgcgtttgcaatccagattcgcctgatgtgataagcgaaagctctccagctcgccatgctcacgcgcatatgccgacgattcacggtagacaggagtgaggttcttcggttccatgtctatagcctccttcattcgtttcttctgttcccgcagaaaatcccgtatgacttcctgcttttcggatagcgtgccggagagcaacgtatccatttgatcttccacctgatccagctgtgttagcgcctcaaggaagcgggggtggaagtcgtcgtggtgcgacttcggtgcatagttttctttccatgccaggagcctgtctctgtaggtggccagttcatgaaaacagtatcccacctgatgatcaaagagatctgaagcacgacgcaaacgctttcccgatctggcgggcgcttgctccggttcgttttgggcgatacagaagtcagtggccagtttcaaagctgcttcccggggtgaaagatcaaaaaggcggctggcgaagctgatcacatcgccatccgcctgacatccgaaacagtggaaccgctcatcaactatcatgcttgggttccggtcaggatggaaggggcacctgcacatcccatttcggctgacgcgaatcccatagcgttccgctgcttctcttgtggttaaagcacttttaatggacgcatacagtcccaattcatcacctcaaatcttacccacgcggccaggcgggcttaccgttcttcctccctgtgcggacgatctgcctgcctgctgcttgaagtgtgatccatgttcagcgcggcgtccagctctgccaggcgcgcgctttttgttttgagctcggcttcctgcgggaagggtttgctgacttcggctttcgcggcctcaatctgctgtcgtaccgtcgcaagatgttcctccgtcgcagccagacgtttgggaatctgggcgatggtattgtccagccgggtgatattgccccgggcatcgttgcccacttccatcgggtgagacaccgcgccatgcagcgtcagcagaaatctgttgacgaaggaatcatactgtacgcgcatgttcagccctcgataggagccgatttcgacggcggttcccctggcggcttccttgcaggcggtgaggatagctttgcccgcttcttccttgtcggtgatgagcgcacctccgaccgtcatgcccacgaaatcctcctgcggaagcggatgagcgttgagggtagcgatgtccttttcaaaccctgcaatcaggttcatatcgcgttccacctcctgcgggaaatatttgagcagctgatcttcgagcctgaactgcttgctcagatgatcggcccgcatcagcttcagcctggccacatccacgtccaggtccatcttttccttgattctcggatcaccggcacacagcgctttgatctccgcataggacagtgccgtttcgtccatgtcctcgcaggaacgcaccgggctcttgctggtcataatctgcgaaatgaacttctgcttgttttctaccgtctgccaaaggtaggcgtcaaacgtagcctcggtgacgtagcggtagatggagacttccgggttcatgttgccctgacggacaatgcggcctgcgcgctgctccaagtcaccgggccgccagggacagtccagatcatgcagcgcaatcagcctgtcctgcacgttggtgcccgcgcccatcttggccgtgctgcccatcagcacgcgcacctgaccggagcgcacccgggcaaacagttccttcttcttgacctccgtgttggcttcatggatgaaggcgatctgttccgctgggataccgcgttctacgagtttctggcgaatgtcatcataaacattgaagtcgttctccagctgcaatccatcggtaagctccttggatgacggcgaaggattcaggcccgcgcctttcggggtggaaatatcacagaacacgagctgcgtcagcctgctctcttgcccggattcccagatgcgaacgatgttgcccacgcaggcattgaccttgcttgccggatcatccggcaacagcggattgatgagccgctgatcgaggcccagcttgcgtccatccgacgtgtcgggtaggataccggcgaggtagcaaaagccccttttccgttatcccccctcggaaccggacttgatactttcgcatcatccggctccccagtaatttcatttcaagaacgtatatttaatgttccattgtggatagctgtgtggcattcccgacataccaccagcgtttttctctgccgcgcagccataatctgaacccaaaccggcggcgctgacttacctttggtctttaagtccgctagcttgcggatatgatgtacttcaatatctttgctgcttccacataactcacaagtatctgctgtcaaccgcttaatgagttctgtacgccctccatataccttgtagggcgtatcctctatgacagctttacgcttatgggcaagtgaaattcctccccaggtagccaccaatggctttttcccagggcgttctacaaccacttgcaggcagtgtacagtttttccgcttgtgcttgtggtcgtagttttatactttgccttttgctttttgatagatgaccgatgtttgcaagccaaggttttcagcagagaggtttccattgtccagtagagtttggaaaaccaggataggttttgagccagaacatagtattgtaccaaccctctatattcctgctgaaacctttggacaatagagaaatcatcatcgtgaagcaacgcatttctgtgggtcactttcccatatcgcatgaacgacctgcatttatcctcaattacccttgctggaacaagcaatgcaatagcgccattagcgcctctgcgccctttggggtcgatgtaatcgttgcaccgctgcgccttaatttcataaccgaggaattttgccgcttgactgctggcactggtaatcaaggtcttttcctctgacagttctaagtgaagctcttgctttaagaaaccgtgcatttctgctttgattttctctgcatcggcttttgaaccggtgaatccgatgaggaaatcgtcagcataccgaacatagcggcatctgcgatagttctcgtcataagggtcaaccgagggaataccacgtcgttctacttcaagtctgtgggcagtttgaatatcaccacgctttcttgctttactgatttcagcattcatccgactatacacaggattcgccttttgccgcttcccccgtgtgttattaggaatcagaactttctcaatccattggtcaaactcattgaggtaaatatttgccagaagtggactgataacgccaccctgcggagttccgctgattgtctgattaaacttccagtcctccaaatatccggcttttagcatattagataccaggcggataaatctgccgtcatggatatttttctcaagtattttcagcagaacagcatggtctattgtgtcgaagtatttagaaatatccccttcgataaaccagcgtgttcctttccatacttgaatttcctgcaaagccgtgtggcatcccctgttgggccggaatccatgagaatgtgtgctgaattgcggttcatagtacgcttccaaaatctcgcgcatcacttcctgcaataacttatctccccatgttggaatgcccaggggacgcttcttcccgtttttctttgggatatattcacgtcttgccggtttccactgatatttttcttctctgagaagttcaatcatcctatcaattttctgaattgacattccatcaaccgtttcttcagtgacaccttttgtcaatgctccgttattcgggtataactttgcataggcgtttagataaaattcacggttgaataagagcttataaactctctcgataggtttgtgctgttttccacgttcttgaatgactgttaaaatagttttggctgtacgcatctcacgcacctactcctttctaacaaatcgaaattacctgccgtccttcgccatgtgagcggctttcccgcttccgattttacggctatccctgtcatttcagggttctcggactactatgacggctccgtgaccatgggggtctccccctttaggccatcctgccattcgtcaaaagtgtacgtttcgagcatcccgtaggtccctcgttcgttcctttattcccgttcactacgggctctttcactgcaaaaagttactcgcccaaaatcaacaacagcgagcatacagtgacaccggtatcagtcgctttccggtgggcgatgctttgcaccaagtcagaactgaggttcaggcagtttagctttaaccataggacgcggaacttgcggagcgtcaggaccttgcgactggtcccttatccgctttaccaacatgcgattgtcccctttgagtttcctcgccaggtaggttggtcgttcccattattcacttttaataatgtccccctgcgggggagatacacttttgcgcgtagcagcgcacaatcttgagcatgttatcgaccgtaggatcgaccatcttcccatggacggctgcggcccgctcagaaagggcctgcaccatttcctgctgctgcgcggtgggcttgacgaccaccgtctcataatgcacctgcggcgtcggcagatgaagctgatccgcggtcttgatgtccgcgacctggcgaaagacattcatgagctccggcaggttgaaaaacttggcaaaccgggtgcgcgcccgataaccggtgccctccggggccagctcaatggccgtcgttgtctctccgaacgtcgatgcccagcagtcaaaatgcgtcatgccgctgcgctgcaaggctccgtattgcaggtaccgctgcatggtgtacagctcggtcatagagttgctgaccggtgtgcccgtagcaaagatgatgccgcggccgccggtcagctcgtccatgtagcggcatttcaggtacatgtcgctggatttctgcgcttcggaagtggaaatcccggccacgttgcgcatcttcgtgtacagaaaaaggttcttgtaggcgtgcgcttcatcgacgaataggcagtccacacccagttgctcgaaggtcaccacatcgtcctttcgatcttcggcacggagcttctcaagtctggtctccagctgtcgctttgatttttcgagttgcttgatcgagaagcgctcgccgttttctcttttcagttcttcaatgccttccatgatctcgtcgatttcttcctgcaatagccgttcctgacgctcatgggatacggggatcttctcgaactgactgtgcccgatgatgacggcgtcgtaatctcccgtggcaatgcgcgcgcaaaacttctttcggttgctcgtctcaaagtcttttttggtcgtgaccagaatgcgcgcggatggatacagccgaaggaactcggaggcccattgctccgtcaggtggttgggcacgacaaacatgctcttctggcacagccccaggcgcttgctttccatggccgcggcgaccatctcaaacgtctttcctgcccccacctgatgggccagcagcgtatttccgccatagaggatatgcgcgacggcgtttctctggtgttcgcgcagcgagatctccgggttcatgcccgaaaagacgatatgccttccgtcgtactcgcggggccgaatcgaattgaacagctcgttgtactgtgccaccaacgcctgacggcggtcgggatctttccaaatccattcccgaaaggcgtccttgatggcctgctgcttttgctgggcaagggtggtcgccttctgattgagcacccgctgttcccgcccgtctgcgtcctggatggtatcgtaaatgcgcacatcccgcaggttcagcgtatcctccagaatcttgtaggcgtttgcccggtccgtgccgtaggtggtgtatgccgcgacgttggtgcgcgatacgacattcttgccgttgatccgccactccgccgtatgcgccgaaaagtgtgcctcgatggcgcggcgctggtagtacggcgtttccagcaattcatacatgaagtcctggacgtactcctgcgaaatccacgtcgcgcccagacgcacgtcgatgtcggaggcttccagatctttgggctgcgccgcttccagcgccgagacattgacctgaaacgcggcgtctgcctgcgcggcagccctggcatcccgcagcttctggcgcacattgccggagaggtactcgtctgccgtgacgtgttgctccgtgccggggattcggaagatgacgccgcgcagttcctgaacgatctcctcctcgctctttccggtcagcccggccatgaagcccagatccaccctggcccgttcgccaatggatacggccagcgcatcggatgcggtgtccacgtgatcgacgcggtgctgctgcttgatggtccgtctggtgaacatatccgctttgcgcaagagccggtgctcgtcatcgagaatttccaacgagcagagtagatagtaggaggaatcctccgcaaacgcgaggcggtttgcacggtcattgatcaacccaaagcgcgcagaaaagccatcatacagggtgttcagttcgcgttgaagctgcgcaatctcctcatcgccccgctcatccagctgcgcgtcaatcaggcggtgcacctgatcgcgcagggcaatcagccccttgacgcgctcctgcgccgtctgtttgaggcggggtttcaccatgcggctgttttcgcggtagtagacaaacccatccacaacggtatacgagaaattgcggaccgtgggatcggcgggaatggaagcatccagggcttccccctcgcccaaatccgggagggacgcttcacgatagacgccatggatatgcccgatcgcctcatgcagctgatcggcaaggtctgcgccttctgccggcaagaccgtaaagctctccctgccatactgcgtgttttctttggacaagacgcccaaaaccatctccgggtgctcgatgaagtagctgttcatcgtaaagccgtccgcattctccccgacatgcacccaatccggttcgatgtcgatggggcggtcccgcctttgcagaaacaggatgtccgagacgacttccgtgcccgcgttggcacgaaaggcgttgtttggcagccggatcgcgcccagcagttcggcgcgctgtgcgatgtattggcgcacctccggggactgctgatccatcgtatagcgggaagtcacaaaggcgatcacgccgccggggcgcacctgatccagcgttttggcgaaaaagtagttatgaatggaaaaaccgagcttgttgtaagcccggtcgttgaccttgtaattgccgaagggcacgttgccgatggcaaggtcgaagaagtcccgtctgtccgtcgtctcaaagcccgcaacggtgatgtcggctttggggtaaagctgccgcgcgatacgccctgtgatgctgtccagctccacaccgtacaggcggctgtcctgcatggactccggcaacaggccgaagaaattccctacgcccatggagggttccaggatgttgccgccggtgaatcccatctgcgcaacagcatcgtacatggcccggatgaccacggggctggtatagtgcgcgttgagcgtcgaggcgcgcgccgcttcgtattcctgcggcgtcagcgcagcggagagttcccggtattccctggcccatgcggtcttctccggatcaaaggcatccgccagaccgccccagcccacataccgggagagtacgctctgttcctgtggcgtggccatgcgctgcccggcttccagccggtgcagcagatgaatggcctccatatttctctgaaatttgacctttgcgccgccttcgcccaggtgatcgtccgaaatgcggaagttcgccggaacaaaaggggcaacggatttatccacagattcggcgaaattctgtggaaaaccctgtggataaggctgtggagaaccttcatgcgccgtattttcgctttcgggaagataggcggcattgcgctcatcgagggccaacagccgaaaaaagttttcccggctctccgaacgcaggacaggatagcgcagcgaggggtcctgcaattgaacattgaaaagcccgatttgggtgatgacaaagggcgtatcatccagatagacggtatcgcccaccttgcaggaaagcgccagatctacgctttgcctgtcatcgggcgcggccatgctttcatcgggcggcgttgtgtcttccagtacctgcatccggccggcaagcgcctgatccacgctttgtctgtcatcgggtgcggttacactttcatcaggcagcgctgcatcttccagcgcctgcatccggctggcaagtgcctgatccacgctttgtctatcatcgggcgcagctacgctttcatcgggctgcgctgcgtcttccaattcctgcatccggctggcaagcgcctgcacttcctgaatgaaagggctggcgttcagcgcgtcctcgtccacaacttccccgttcacaattcctgcctctgccaaacggctgcgcaaggcttcggtgtcgatgggttcttcatcatcttgtgcgttcccgtgttcgtcaccgtcgggctcttcccgggacagctgctcaggcaccggttgatcggccaactgctgcgcctgttcccgctgtgccaagtgctctttctcctcaggggtcaggtcacgctccaaccgaatgatttccgcaaggcgggaagcgacttgggcccaggaaaggcgaatctcttcacagttttgtttccgccagcggatgcccttgccatcaaaggattcttcgctgtgtgaagcgcccgaaaccgcgtgggagcggccgccggtgccatattctctcttgagaaaatccgcctgctctctggatgtgtgcgtctgtgtgaagaacgcatggatgcgcagcttgcttcctacagtaagcccgccgctgcccaacgcggcatccagttcgtcatccgtaataaaggctgctggttgggccacctgggtgagcaaagaattgtattccctccgtggaagagtcagttcgcgaagcgcctctgcaatctgctccgggcggtgataatgatagcgcagaagcgcacggttatgggcataagcggcagaaaactgttccgcctcttcggtgagcgcggacaagaactggggttctgccagctgaccggccaaccgacttacagtctccgggaaacttccgctgtggatcgccttcagggaagagaagaagtcgtcagcctcctgcgcgagatctccgtacaggtacaccagatgctgcgccagctccgtgcgctcatggatgggacaattcgccagctccatcatgctcagaaactggccggcatccatcagctcacctacccgccgggccgcatccctccaggaaatgatctgcgcgctgttcacataacgggccgacctacccggtgcgatgcggatgccggatgcatcgtaccatgcgctgtagggctttccgtctatcaccaggccgtttccgccccggtagtcctgcgcaaagtgtgctgcaagaatgtccaatggcaactgcttcataaaatccacgccaatgtgcagccggaggtcatccgtgttgccacctgaccgcaggaattcgtcaatcacctcctgagaaaccaaagaagcgaagggcatcctggggatgctctccgcttctgtcgtgtctagccactggatttgctctgtttcggaggggatcaggaagctcagctgttccacagccggcgcatgatccgtcaggcgtaaatcagctccgagaggatcatctcctcggcctgcgctttcaggccgttcatctgcctgacccaatccattgggttctccgctttcaacgcttctgtaaggcccgcttgcctggacagcaggtccatcaggctgtaaagacggttctgcgccgtccgttccgtctcctgcaggtgctccatcagcctgccgctcagcatcagccgcatgtacagtcccggccggttctgctccagatagcgctgtctgagcaggctgtacttgcccaagggctgctgttccgcttcggtcaggcccaggtcgggcagaagatagtccccgctctgcttgtacatcagttcgctcatgttccatgctcctctctgtctgtcgaatggttctctcaatctggcgcagcacctggcccgtgatcatgctgacagcctggccaagctccgtgacggtcgcaggggtattccagtcatacacctcggtgaagtcctcccgaagcagctccggttccagaccgcatcgcgtttgcaggctgtaagagatgctggccgttgcagccttgcgaaacgacgctccgatgttgaattcatcgtactccgaaaggaaggaaccgtcaacgctgtcgatgatgtcccgccggtgatcgcgccagtaggaaagcgcctgctgactggcaatctgctccaactgcgcggcgaggcccatggcggcgtccgcataaaagacctcttcaagcatctgcctgacggacggttccacttgcccggagatctgccagggttccactctccgggaatcctggcgcgcgcccgtgtcggacacgtcaaagacataccgcacggacatgccgttggctcccggagacagcagggcaatgccctttgcgccgcgacggacatatctgcgcatggcgctattccagaggtcgtattcggcacaggccgtcgcatccgggcgctgggcatagatcagcagctgatcgttgtaagggtatttgtacaatctggatgaggtgttcaggaacgcggcccaatccagataactggctgtgatttttcgggcggtatcctcagccagcttcgcataaacctgtgcctttgtggccatgagattgcctcctatccgctgatgattggggaaaaatcggggatgatttccgccgatagctgcttgtacccggcgtcgctcatcgcttccagctttgcaataacccgcagggtcagccctttgagctctgtctcgtcaaccatcagatactgcatcatgttccgcagctcttccacggcccccagacgggtgccaggatcatacagacagatcagggtcagttcttccggggtaaacgtgctcatctgttcctccgtccgtttccggttgtgcttcctccatgccgtaccaccgcgcataggcgatgaggtcctgcatattccagccggcgggcagcatgtaccgcaggaaaaaatcgcagccaatcgcttcccgaagggaatcgctgtggggatggacgacatggcaaggccgtctggttacgcggcaggattcgccgtcgtggtgaatgcactctccctgtgcaagggctctgatgctctcaagaatctgtttgtttgtcataaacgcctcgattctcccggcgcagccggtttgggctgcgccggggctcaacgcatcacgccgggcggccgatgtcatcctgagtcatatagatgccaaagtgtgccagctcaggaatggcctggttctgcgcgtcatccaggacattcagtccgccgcattcggtcttttcgagcgtgtgcagggcgtataccggcttgtccaggcgcactttgcggtattcctcataccggacatctttgcggacctggttcttcctgcacaggaaatccaccatccccagcaggaacagcgcacaccggtactgtctgccgttaaagaaacgcctgatccaatcgctgctgtaaactccttgaacaaaagcccgctctcccatcgcgtgcagctgttccagaaaggtttccgtcagcatataaaaagaagccagggaacccttgtcctgtacgacggggcggctggcctcgggagcgttcatctcctcccagtaattttccaggatgtcctcaatgctgacctgcagcgcagccgcaaggtcgtacagggtcgcggcttcacagcggtccagctgggttttaccgctcaaaatgtcgcgcagcgtggattcaggcacgcggctgcgcgcgctcagttcggtccggttcatctgacaggcgttcatcagttcattcaaatacatccattcatcgctccatttcctgtttcttgtgtttgtggattgacgcaggggaagcaggttcgctctgttccctgtgcgcccgctgtgcctgcttgtcttccggcgcttctgcgtccggttccaggcggtcataatggctgtcacgccaattttcaaaggattccagggattgtcccatgtacattcgcttcatctctccatttcgttggaagtagatgttattcgcagaccaccatatcgctggttctggttccgtcggagatcaccaggatataggcgtcgtcttccagcgcctgccggcaaatgcgcaggccatactgctccaccgctgtgccgcgtgccagcgttagctcaaactccgcatcattccagtagcggccgcgccgggtatcgtaaaagttaatggaccaggtgcccgaccattccacctcgcgtccgctctccagctgggacttgccactcatcgttccatcttcattgaacgtgatccggcttgcattgatggagctccccgaataaagccgccagctgccggccatggccctgcgcgcctcgctgaggtccgtcaccgtagcatagaggcatacggtgggcacaaaaccgcgcaggcgcacgccgtcttcttccgcctcgatgtacgtccattcgcccagggtgcccaggcaaaccaccttggtgttttccgtcagcctggccagcgcatctcggctgaccagcgggtcatccgtcacctccacgtcgtaatgcacgactgcgggcatccttgtcagattcagttcgggcaccaccgtgccgtccggcagggcgtcctttttgatgtatccgatgcggttgtgcgtatcggtgatgtcgtattgaaccagaatccagtcgccttcgctgccaaacacctgtatccagccattggtgctcacgcgcgcccgtccctttgcgccgcgaaggctcttgctgtccggcgcggcatacacgggataggtgtgattggaggtaaaggagacgagggacgccgtaagcgtcccgccgggaagctcaggcgcattggaggtgtccacccagttttcgtcatcttcggccagcgcaacacaaagcggcagcatcagggcaagcagcacaatcaggaattttttcatgatcccgctcctttcttcaatcaaacgtggggcgaaggatgggcttacccccttgggtgtaggcgagatgcagcgtggcgttgtagagggtatgggtcttggccgagcgaaggcccgttttgctgacctcgcctttttcaagcagcgtcctgacctcccccgaagtcaggggcttttgcgcattggccagcactccgccatttttccagagcgcaaaatcgcaggtgcggttttcgcacatgaaccccttggcgcgttcggtaatggcggctccgcacttggggcaggtcccgattttttcgcgcagcggcggaaacaggcgctctgcctgctcaacgcgctttgtactccgcgtcagctccgaaacgaattgccgaatatcgcgcatgaattgctcgggcttttcctggccctgctcgatgcccttgaggcgctgttcccactgtgccgtcaaaagcgccgagcagagcgtttcgggcaataccgcagccagcgcctttcccttggccgtgggcagcagcacctttcttcgcctgtctccggcgcgctcaatcagccgggtttcaatcagcttttccagaatggcagctcgggtagcgggcgtgccaatgcctttgtgctccgcaccctcgggcatatcttccttgcccgccgtttccatcgcgtgcaaaagggtgccctcggtgtggtgcgcaggcggcgtcgtttgcccttctgcgatactggccttggggaacgggcattcatacccttcgcccatgccttcgggcagggtgggtagatgctccttgcgttcctccacgagccggtttccaaggcttccccggaaggccgcccagaaccgcttgaagcccatctgcaccatgcgctttcccttggccgtgaagtcgtgaccggcgcattcgatgtgcaaaacggtttcttcctcgatgcaggcatcatctaatgcgcacagcagccttgtacacaccaggaagagaagatcccgttccccggtggtcagcgccctgaccgccccatcctggcccggcatcgtggaggtcggtatcagggcgtggtggtctgtgacctcgctgtccttgatcacctgctgcgtgcgcatggccagctcaaggccgtttgcaaacggcaatgcgccgcatacccgtgccgccagttccgcgagttccgcctccagctcttggggcagaaaccggctgtctgaccggggataggtcaaaaggcgcttttcatacagcccctgggcgtactccagcgtctgctgggcggtaaacccgtagagcctgttggcgtcccgctgaagggaggtcaggtcgtagagggcaggcgggttttcgcgtttttgcctgcgctcgatgcttttcacgactgccgggctgtggttgcaggcgtccatcagcctgcgcgcttcattcagatcggcaaagcgttccgactcggcgacaacaccgcagccggtatccagcgcgaccttgtaaaaggtttccggcttgaatgccgagatggcctcctcccgctgcgcgagcatggaaagcgtcggggacatcacgcgcccgacatgcagcgtagggccatagagcagcgaatacagccgcgtggcgttcatgccgatgagccagtcagcctgcgcgcggcacagcgccgcctgatacaggttgtcgtaggccgccatgggtttcaggttgcggaagccttcccgaatggcgctttcctccatggaggagatccagagacggcgaacgggcttgcggcattttgcgcattgatagaccagcctgaagatcagttcgccttcccgccctgcgtccgttgcgcagatgatcccggtcacatgctcatcattcatcagggacgcaagcaccgcaaactgcttttgggtgcctgaggaaacggtatactgccatgtttccgggagaatcgggaggtctttgtaccgccagcgggcgtacctggcgtcataggcttcgggcaaagccagctcgaccagatgcccgacacaccagctgacccaaaagcctttgccctgaaggtatccatcccggtgctccgcagcgcccagaactgcggcaatcgctcgtgccacactcggcttttcagtgataatcagttccatgttctatcctccgtatatatgtaaccccgaacagggatgttctaggaatcctttacggctgttcggtgttcccggtttcatcgtcctcgtccaaatcaaagtcattgtctgtgcggcgggcggcggactgctttttgctcctgataagaagcaccccacccgcaaggcccatgcccaccagggcggcaagcgcaatccatgcgatggttttgtcggacgaatcctgcgcatcctgcgaaggctgcggcgtgatggccggtaccgtcgtgggttccggcgtcacatagataatctccggtgtgggcgtggggacttcttccttttcctcatcggacatgagcgccagcagatcgcgctcatccacaaggttcaggaagtacgtctcgtacatctccgcttcctcatcgaccggcttgtcgtagtcgatgaccaggtaaaaggtgttcccgtttttcgtctggagcgtgataaactgcttgttggtcgccgcggagtacagcacgtccagcgtatggctgttgccgtcggcctgatagggcataccggggccgatggtgatgtactccgtcttgatgatcgtctccggcgtcggtgcggccgtcggctccggcgtaggggaaggatcgtcctgaacgtagatcagcgaactgcccaggccgttgtaacggttggcagaggataccggcgttgccgtcgggacaggagatgccgtttccttttcgccggtgggtttggccgtgggctcgggtgtagccgtgggcatcggcgtcggatcagcgggccttgtgtagtgcgggttatcgagcgataccggctcagagaagttgcccgcatagtcaaacgcgcggacagccagcttctcaaaccggttcatattctcgtccagctccacatgcagcgctccgtttgtcagcgtggtgaacagcatgctgttcacctgcacgcccgcgacgccggacagatcgtcctccacgaacacctcaagcaatgtgccgttgatggaagcggagagcaccggcgcggccaggtcgatgcaagccacctgggcgctctcttcaaacgcatggccttgcggatcagtcacccgcagcgtaaaggtgccgttttcatgcagcgccagttccgcctttccgtctgcaaactggctttcacagtcaatccaggcgctttcgttcattcgatactcgattttctgccagccgatgtggttgatatccgttacggataccttcatcacggcgctgttgccactcgaccagcctccgggcgcggtcagcacgattctgtaaggggatgcgctttccgcatcggcaggcaacagcgttgcttctgccaccggcgctgtttccgccgctgccccaaggggaaaaaaggctgcctgtacagcggccagaaaaagaaatgccgccaaacacagcggccatacgcgattacgcatcgtcatcatcggcagatgcctcctctttttgcggggtgagttcctcctctgtggaaggcacagcatcctcattccgggacagcccggaaggcagaccgtccccgaacatggactgcatgatctccgcaagctgttccggggtaacatggtagagctccgctgtcgcatggatggccgtgcggtccgcctgttgcaccaggcggcgcagttcttccacctcttcctgtagttcgatcagctcctgctcgcgcttttccagcagagcatggagtttctggcggtcagcgggatagcgttttctctttttttccgtcatgtttcctcctcagtccaccggcagccgcccaaagccgtagatcttgtccgaccatttgctgctcttgaggtcggcaaagcctaccgggtcgccggcgtgaatcatcatgtcatttcctacgtaaatgcccacatgggtgatgccctcgacatccgcgcccatcgtcttttcaaagaagaccagatcgccagggcgggcgtcctcccggctcacctcgctgcaaagggagtacagcccattggcgccccggcgtcctacgtcgccaacccccgactgattgaacacccagcacacgaagccggaacagtcaaacccggtgtccgggttgctggccccgtacacatacggatagccgatatacttttccgcctcgaccatcagcgcgagaaagtcaggatcggcgcttaaaagctgctgcgggatcgtgtacttcaccagtttgtttttggactgcacgccgttgaccttcacattgctcttgccgtccgacgtgatgacaggaatactgtcctcgtcacatccatccatgaaatactggggatcttccagaatcacggattcgccctgccagccatccatgtcaaagctgttgacccaactgccgtcctctgcccgtccggtcaggggcgagatggatacgagcagcgcggcgaccaaggccatgatccgcttgtgcaggaagtgcgtccggttttcgttcattcgaatcatcatcaggggaatgctcctttctttttggggaatgacaaaaggccctgcggatgcaaggccctttcattctcagcttggtattcttccaaaagagtgaaaatgcgtttgccaataggcgtcctcaaggtcggcgaatccgatggggttgccgcagtgcagcatggtgtggttgcccacatagataccgcaatgcgtgatcccctcaacgtcttcgcccatcgtgccttcaaaaaacacgatgtcgcccggcttcacctcgtcttgagaaacacgggagcacaggctgtgcagccccttggcccccagccttcctgtattgtacacgccgctgttggtgaacacatagctcacaaatcccgaacagtcaaagctggtttccgggcttgccccgccccagacatagggatagccgatgtacttgcaggcttcctccatgagcgttgcgaaggccgggtctgcatccagcgtctcctgcgggatgtcgtagagcgtcggatcgcgcagcggcaccgcatagggattaccggagaaaatgccctccatgttgccgtgggaggccatgtacagcgcatacatgcccatggtatggtggctcatgctgaccacgggcagatgggagaggttcttgttttccagcctgacctcacagatggtgtacgcatacggcacctgtacgtcataggtatatgtctcggttcgctgttggccggtttcggggtccgttacgatttgcgtgccggttctcgtctccgttcggtatcgggtttctgttgaaaccgtctgcgtgacaacgtattgcagcgcaaagtacttttcgatgaccgggtacgcggaatcaagcgtccattcctgtccgtcgaagtacgcagagatgatggcgatgagcacatagggatcgtgccagatttcatcggcatcgacatgatattcgtcatagccgggatgaacctgctcgtagtgatccatttcatcttgcagcgcacgctccatttccgcatagacacgctccgcggcgcgaacgtcgtcctctgtcgccgggtaggtgccgatcaccagcgattccagcaccgactgcgccaggggcgtacaggattgcagcccgcccatgaggatcagcagcatcgcgcacagcagaaggatcagcaaggaggatggatggctttgaaaaacctcagccagccttcccgtggcattgccggttctgcgcgcggcctttcccgcagcggtttgacccgccccgcccgcggctttcagcgcggcatactccttgcggatggcccgcttttgctgccagcgggacaagggattgctggccgcctgcggattttcgacacgttgcttggccgtgagataccgaaggttggcgttgtccagcctttgttccgccttttgggcttttctgaacgggcgcagcttgtgcgcatgataggcgtgctcgcccatctgcaaggcagaagtcccgagcccatcgccctggagcgctgcgcttgccgcaacgttgtcatcctcgttggcctttgcaagctgccggtgcagctgatcgtgtgccgactggatggggcgctgtaccggatgccggagccgggagggtggtttcgcctccgcttcctcaaaccgaaggcggattttctttcttcctttcggcgcggccgcatgggccgcttctcccactgcccgtgttttctcctttccgtcaggtccttttccggagggttttgcatcaaccggaatgcggcctttcttgggtgcctgttgatctttagtctcaaacccggacgctgaaaaatccggttcaagaacagccggcgttttggcttcatcctgccgcaggatcttctgctcctgctgaacctcctgggccgtcagcttcaggcgatgggtttgcagtttctttctggcatggtcatagcgttctgcggcctgttccgctttttcggcctttcgcgccagttttgggttcgccagctcctctttggagaaccggagccggggagagtcacgcttattcgtcaatctgcatcacctcctggggtgacatcatgacgtatgcacctccgtgggcttggtcgtcatgatgctgtagagcctggtgttcttggggaagcgatcctggaagggcaatatgacattgccatagaaaagcagcccctcgccttcgccggattgtgtcacataggacagctgatgcggggaaatgcccagctttcgggccagaatttcgcggtcgcctgccgcctgattgagcatgtagatgtagtcgctgttttcaaagatgttctcaatctcctgactggccagcagatccttgacgttttgcgtgattccggtggggatgccgccccacttgcggaaccgcttccagatttccacggaataggcggcggtttgctcctctttgagaagcaggtggaactcgtccatatagtaccgggtggacttgccctcggcgcggttggcggtcacgcggccccatacctgatcctggacgataatcatacccagctttttgagctgcttgcccagctccttgatgtcgtagcagacgagccggttgttgacatccacgttagtgcggtggttgaacacgttcaaagagcccgtcacatagatttccagcgccatggccagccgctgcgcttccttttcctcctgcgcgcgcagggcattgtacaggtcttccagaatcgggatgttttcaggccggggatcgttgaggtaaggctgatagatgatgtgcaccgcacggtcgatgagcgtcttttcaatgggctgcaagccatctcgcccgccgacaatcagctcacaaagcgacaggatgaagtccgacttgagggacagcgggttttcctcctcggagtagttgaggttgatgtccatcggattgatgtagctgccgctggtgggcgaaatgcggatgacctgtccgcggaacgtgttgaccagcgggaaatactcgccctcgggatcgcagatgatgatgtcgtcgtcggtcaggagaatgacgttgcagatttcgcgcttggcggcgaaagatttgccggaacccggcgtgcccaaaatcaggccgttggggttcttcagctttttccggtccaccatgatcaggttgtgggaaagggcgttcaacccgcagtacagggcctcgccgccggtctggaagagttcctgagaggtaaagggcacaaaaatggcggtggagctggtggtcaggccgcgctggatgcgaaccagattgtggccaagtggcaggcacgacaccatgccattctcctgctggaaatccagcggaatcagctggcagttgtgctgctgcgccaggctctgcgcctgcttgacattgagtgcaagctgctttttgtcgtccgccgtgttcatcaccaggaaggtgatgagaaacatgcgctcgttgcggctttgcagatcttccagcagtttcttggcctcgccgccataggtggccaggtcgctggggatgatgtccatgtcgtatccggcgcgcacggccttcttctgctcttcaatcttcatcttgtcaaggtccgtgatcttgcgcttaacgtcccggattgccgcaatctggtcaatcgcgcgaatgtgcagggatacgacgagactggattccatcgcgaggaaatccgccagacaccggtcgttcaggtccgaggccagaatggagaaaaaactgacctcggcctgctttttgcccatcccgaaggtgcgcttgtcgcggaaatcaaagctcgacggcgcgatgaagtccttggtggacagccccgaaggcgcaagccatttccagtcaaagaggaaaggcgcctgcgtatccatgtggaacatgtcgtgcatgagcttgagccgttccctgccgtcaagcggggcggcggctacgcccagccgcttgaagttgttcagcaaatcgatttcaatgcgctcaagcctgggcttcgccgctttgatgccctcggc

SEQ ID NO: 96 - DNA, 22800 bp, Unknown
  16S sequences of unknown bacteria
ccaccgcgccggaggaggagcccctcctccggcagcctcctcccgagcaggcccgaagggaagcgccttgccgcgccccggcgcccgcaccccgcccgccgctttttccctgccgccccaggggccaaaaccggcaggggacccggaagtccacttccgggtcccgcatttgcttaaagaggagctgcgccttacttctggagcagggccttggccttctgcgcggcgttgtccgcggtgaagccgaagcgctcgaagagcaggttcgccggcgcggaggcgccgaagtggtccagggacagcacgtcgccgtccaggcccacgtacttgtgccagccgaaggaggtcgccgcctcgatggccaggcgcgcgcgcacggccttgggcagcacgctctcgcggtaggcctcgtcctgctggtcaaagaccgcaaagcagggcatggagaccacgcgcgcgtcgatgccctcggcggcgagcttgtccttggcgcccagggccacctcgacctcggagccggaggccagcaggatcacgtccggcacggccttggcggaatcggccagcacatagccgccgcgcatggccgccttgccgctgttcttgtagaggggcaggttctggcgagtcagggcaaagcagctcgggccgtggagcgtcagggccttggcataggccgcggcgacctcgtgcgcgtccgcggggcgccagaggtagacgttgggcgtggagcgcagcgcggccaggtgctcgacgggctggtgggtcgggccgtcctcgcccacgccgatggagtcgtgcgtcaggacgtagagcaccggcagcttcatcagggcggacaggcggatgccgtgcttcatatagtcggagaagaccaggaacgtgcccgcataggtctgcaggcccccgtgcacctgcatgccgttgacgatgccagccatggcctgctcgcggatgccgaagtgcaggttgcttccctcgggcgtctcggcggagaagtcgccgcggcccttgatgtaggtcttgttgctgggcgcaaggtcggccgagccgccgatcaggttcggcatgcgctcggcgagcttggcgaggacctggccgctggtgttgcgggtggcgtccttcttgtcctcaaactgccagtaggcctcgtcgttctccaggtccgggatctcgcccgcgtaccagcgctccatctccgcgtagaggtcgggataggcggccttgtagccctcgagcatctcattccacgccgcctcggccttggcgccggactcggcggccttctttgtctcctcgtagacctcgggcgcgacgtcgaagaacttctccggatccaggcccagctccttcttcagggccgcgacgttctccgcgcccagcggctcgccgtgggcggagttcttgcccgccttggccgggcagtgcgcgccgatgatggagcgcaccacgatcagggagggccggggatcggccttggcgcagtcgatggccgcggcgacggcgtccacgtcctcgccgtccttgacctcctgcacgtgccagccgtaggcctcgtagcgctgcatcgtgttctcgcgcagggcgagctcgaccttgccctcgatggtgatgtcgttgctgtcatagacgaggatgagcttgcccaggcccagcgtggcggccagggcgctcgcctcgccggagatgccctccatcacgcagccgtcgcccatcaggcagtaggtgtagtggtccaccaccgggaagcccgggcggttgaacttggcggccaggtgcttttcggccatggccatgcccacggcgttggcaacgccctggcccagcgggccggtggtcgtctccacgcccacggtgtggccgtactccgggtggccgggggtcttggagtcgagctggcggaagttcttcaggtcctcgatcgtcagcccatatccgaacaggtgcagcagcgaatagaggagcatcgacgcatggcccgccgagagcacgaaccggtcgcggttgcgccaggcggggtctgcggggttgtgcaccatgcgcttggcccagacggcgtaggccgtgggcgcggcgcccagcggcgtgcccgggtggccggagttggccttctggatcgcgtccgccgcgagcgcacgcatcgtggagatcaccttgacatcgattggctgcatgatttttcctccctttctggaatgcgttgggaatctatgaaaacgcgctgccttacggcgcggcgagggccgcaagcggcgcaaggtccacgccctgcgcgccctggatctgctccaggagctgctgcgccaggatcttcacgcccccgggcgcgtcggattcgaagttgatgggcagaaccgggtcgtgcacggagaggcgcaccaggatcagcccctcgcccccgccgggcaggcgcacggtcgcgcgcacgccctcgtagtcgcggttcgcgccccagtccggccgctggccgatggccgcgcgcacgcgctggagcaccgcctcgcccgcggcgcggaagtcctccgccgcaatcttcaggcgcacctccgcttcctcggccggctcctccaggtccgcgatctttccctccaggtcctccccgtccgccaggagcgccagcagccgcgcggccatgtacgcgccgtcgtccaggaagtggttatcggcaaaggcgcagtgcccgctcgtctcgaccgccagcgggcagtcgacgccctgggcgcagagctccttggccttgtcgatcacgttcttgtacccgcgcttgtagcgcaggtgcacgccgcccttgcgctcgatgaagcgcgtgaggccggcgctggtcaccgagtccgtcacgatcgtggcgccggggtgctcctccagcacgatcgccgccagcagcgccagcaggcggttgcggttcatcggcgcgccgcccttgccgacgatggccgcgcggtcgcagtccgcgtccaggatcacgcccgcgtccgcgccgctgccgcgcaccatgcggcaggccgcctccatcgccgcgccgtcctcggggttggggatgtggttcgggaaccggccgtccggctcgaggaactggctgccggccgtgtccgcgcccaggggctcgagcacgagcttggcaaagaacccgcccgagccgttgcccgcgtccacggcgatcttccgcccggccaggggcttgtccccccggcccgcgcgcgcccgcacaaagtccgcaagccgcgccgcgtactgcgcgaggaagtcgaccttgggcaggtccccgaccgcgcagggcgcgaccggctgcatggcccgggccaggtccgcgacctcctcgtgctccaggcccccgtccttcgtcacgaacttcatgccgttgcgctcatagggcaggtgcgaggccgtgatcatgatcgcgccgtcgctgggcagggccagcaccgcctcgaacatcgcgggcgttgcgcacaggccgaagtccactgcgcgcgcgcccgcggcgcacaggccctcggccgccgcatgcagcagcgcctcgcccgtgaggcgcgggtcgcgcccgagcgcgacgagcgggctgctctgccccgtgcgcttcttcaggaactccgcaaatgcataggccgcgctgcgcgcctggtccgggccgagggtgacgccggaccccaggtccaccgccacgccgcgcaggtcgctgccgctgacgagcttcaaatccttctccatgccgttcctcctcctagaatccgttgtaggagacgacctcctccaggcgcttcttctcccgatgcgcctcctctgccggcacgccgacggagaacagcgcgtagatcttccaccccgcgggcaggcgcagcaccttgcccacgcgctcggcggtcgcgttgccgttggagccgatccagcagccgccgtagcccagcgcgtgcgccgcgttgagcatgttgcaggccgccgcggcgctgtcctcgttcgggcaggcggcgtccggtccgatcgccacggcgatgacaaccggcgccgacgcgatgaacttgccatagtccgtggcctcggccaccgcggccttgaccgcggcgtccgtcaccacgatgaagcgccaagcctgccggttcacgcccgtgggcgcgagcctgccgtagtccaggatcttgcgcaggtcctcctccttgaccgggtccgccgtgtacttgcggatcgaccgccgcgtgcacatcgcctgaatcgcatccatgagaaaaatccctcctcgtccgtctcttcgtctcctgcgccgcgcgcgctcactcgccttgggcgagcggcgccagcagcgcgtataccggctggagcagccggaacccctccgcgatctcctccgcgtagcgcggggagaacacgcggccgtccaggccgtcgtcgtgctcaaagtagacgcccttctttcggtagagcgcgtccgcatagggcggcagcgccaccggcggctccatccgccggtagtcctcgccgagcatctggaaccgctcccggagctccgggtccgagagcgcggcctcgaactcgtccgggttccgcaggatggcctcgcggatccgccgcgcccgcgccggctcctcgtcgtagaaccccgcgccgtagcagcagccctgcggaccgagcgcggcgtagagcccgaagctgccgctcttgcgccgccccatcggccggaaggagagccacgcgtggtcccggtagggcgacttgtcccgggtaaagcgcgtgtcccgccggattcgcgccaggatgtggcccggccgctgctccatctccccgtcgagctgcagcgccgcgggcgcgagcgtttccgccaggtccagcagcggcgcgcgcacctcccgctcgtagacgtcctttgtcgcgaggtagtattcccggttgttgttcagcgcaaggccgatgtaatagtccagcatcgcctgcgtcacgccggcgaatttgccttccgccatcgcacacgcctcctccttctctcttctttcgccatccgcctgcaaaatcctgcttcgccctgtgccagcttcgctggcccagggttccggctggcttattttcgccctttgggctcaaaacgctcagcctgcaggggcttcgcccccttcgcagtcgcgccggaccagctttgctggtccggcgttccggccggcttattgggccattcggcccaaacgctcggcctccaggggcttcgcccccttcgcagtcgcgccgtgccagctttgcgggcccagggttccggccggcttattttcgcccttcgggctcaaaacgctcggcctccaggtccgctggcgcggacccttcggcttcgccctgtgccagctttgcgggcccagggttccggctggcttattgggccattcggcccaaacgctcgaccttcaggtccgctggcgcggacccttcggcttcgccctgtgccagctttgctggcccagggttccggccggcttattttcgcccttcgggctcaaaacgctcggcctccaggtccgctggcgcggacccttcggcttcgccctgtgccagctttgctggcccagggttccggccggcttattttcgcccttcgggctcaaaacgctcggcctccaggtccgctggcgcggacccttcgcagtcgccccgtgccacctttgctggtccggcgttccggctggcttattttcgccctttgggctcaaaacgctcagcctgcaggggcttcgcccccttcgcgggctgtccgcgctccctgcgagggcatctgcgcgcaaaaatgcggagcgcgctcctgccgctccgcatgttcttcccgcgcgtccgtcaatcgttgcgccgcgtgcggggctcgcccctctggggttcgccgctgcggcggccgtcccggtagaccgtgggcgcgtcgtcgtccgccgcgctctgccgcgggcccgacttatagaccgttgcgatgtcctcgtcgtcgtccagcggttcctgcatccgagccgggcggcggggagtccgcaccgggtctggggcccgcaccgggtctggggcccgcaccgggtcttggacgcgcgagtattccgttgcggcccgccggatctcgtcccggaatccatacgggtcgtcgtccgcgccgtaggcaccgaagttcgacgccccgtctcgatacgcatttcccgggtactccgcgttctccctgccgtagttcggctcccggccgaggttcggctcccgcatcgcttcctcgcggcggcgcaggcgctcgcgctcggcctgaagctccgcctcctcttcctcctcctgggcgcggcggcgtccggcgcgcacctgcagccagatgagcaccagcacgcaggccacgatcagcaaggcgatgcagatcagcagcatcagcagccagggcgagatgccgccttcgccgctgacggccatgagcggcgtgggggtgggcgcgagcgtcagcgcggcgttggcatccagagatgccgcaggcgatgccgtcagcggttcgccgacctcaatggtcaccggggtggtgatgcgctgcaccgtgctcccgtccgagagcgtcccctccacggagaagaagtactccccggtctcgttcacctgcacggcgatgggcaggacctggtcgccgctgggcagggcggagatcgtctccaccacctcgcccgcgcggtccgtcactgtgacgcccgagatcgtgcccacgcccgcgttgcgcagcacgaggttgaacgtcacctcgcccggggcgtccaggtgcggggtgttcgccgtcacggagacctgcaggtcctcggccgtggccgtcgcgcccacgccctctacctccacgcgcaccgcgttggactgcttttcataggttttgccgtccgcatccacggcgcgcacggtgaaggcgtagctcagggtctccacgggcttgattactttgttccagctgtacgccttccctgcttcaatggtcgcgccctcgatgatcgtgcccagcgtctcgtccgtgatcgtggcgctggagaagtccacgttcccgtcgttgaccacgttgcaaaccagcgtcacgctctgccccgcgtccacgagcgaatcgtccgccttgagcgtcacggtgaggttcggattgtagaccacgatctccaggttttccaacacgtagaccgtgctctggctctgcgcgtccgtgtggtaggtcaggcgcgggctgctcgtcttgtcctcgtccacgatcacctgcaccgtcagctcgcgcatatttccggggtagagcgaatcgatcgtgcccacaaggcccacgcccggcatgtcgtcgtagacctgcacgtcccgcagggtcacgctgccctcgttggccacgcgataggtcagggtcacggtctcgccctgcgcggcgcttgtggccgaggccgtgcgcgtgaagttgatctgcgggtctgccgaaagcgggctcacccacatgctgcgcgtcacggtcttgccgtcaaaatccgtgtagctgacctcgatctccaggtccgcggtcatggactgcaggctcatgtgcagcgcgttggaccgcacaaaagtgctgctgcgcgcgttcacgctctccacggaggcgatcagctcgttttcgtatcggaattccaggtcctggatcgtctgtccggtcgcgccgttgcgcacggagacgtcgatctccagcacgacgtagccgtcctggttttccgcaggcttaaactccgcggaaaaatccgccgtgtcctcctgcgcggagacgatgaagccgtcgtccgtggtcagggctacgctctccccctgccagatcccgtcctgccagactgacgcccgggccggctgcagcagcagggacagcgcccccatcaggagcagcagcgccagcgccgcccggctggttcgccggattccggcgaaccggactccggcaaaccgggatgccgatttctgaatctccatatgcaaacgggcgcttgacgcccgtcacctcctcaccgcggcgggaagccgctgaatgaattcaccttcctattttatttgccgctgccctctttgtcaagcaaccccgcgttaaacgcggcttttcacgcggttcacactataatacgaggcagccatcccccgcgcttcaccgcgccggcgcagaaaaaagaagggactgcggcatcgccgcaatcccttcttggcaaacctctattccgcgttggccaggcctgcgttcagttcgtcgagcacgggctgcacgcgcggcatcatttcctcgatgaaggcgtcccactcggccgccgggtcgcagttgggatcggccaggatctgcgtcatgcgctccttggcgtcggagccgaaggtgccgtagcgttccttgttcgggccggagaaggtgctcatctcgtagtccaggggcttaatggtcgccttgccctcggccatcttgtcccagacgatctgctgcaggtcatactggaaggagatctcggccgggttgccggtcggggccaggcccgcggggctcgcctcgttaaaggcgtcgttgacgtaggggctgatgtaggtctcggtctcctcgtcgtactcccagaggatctccacgtcctcggggttcgggccggtcacttcatagtccacgccctcgatgcccagccagcgcaggcggatgccctcggtggtgttcaggtagttccagaacatcagcgcgcggtccatttccacatcggtaatgttgtggttgaaggccgtgaccgtccagtagtcctcggtctgggtcatgtaccacttgccgtccatgccgtagaccaccgccggggccacgtcgccgcgctcgtcgatgatgccgtcgcggatcatgtccgtggtccagctgttcatggagcccgccacgttgtaggccgcaaaggcaaggcccgccttgaacatgtcgtcagactccgttccggtaaaggagatgttgtcgcggtagatgagaccttcctggtacatgttgtaggtctccacgaccgccgccttgtactcctcggtcgcggccggccagatgtactgcccgtccaccttgatgtaggagcaggtctcgttgccctccgccgcgggggcgttgaggaaggtcacggcgccgttggggaagccccaggtcggcagcacgatgcccgcgttggagacgccgtttccgcccggatcctgcgcgatgatggcgcggagcagttccttccactcctcccaggtgtactcgttatcctcctggtagaggcccacggcctcggcccagtccttgcggatgacgtagtaggaggtgtagacgttgtcgatctccggaggattgttgcggttggccggccagcagtagagctcgccgttcaccttgtaagccgcgacggactctgaggtctggtagaactcgtacagcttttcatagggcgcgaccttttcctcggtgatcggggcgaaggcgccctgcttggcccagtcgaagtactcggtggacgaggcggccttcaggtcccagttgatcaggtcgggggcgtcgtcggtggagacccaggtgcggatcttctcgttccagtcgccccaggaaaccggaatgtactcataggtcaggttgaacttttccttgacgaactcgttgcgggcatggttgccgtgcttttccgcatcgagcacgttctgcgagagcaccacgggctccaggtccgagccctcggccgcgggcgcctcgccgctatcgccgccatccgcgggcgtctcggccgcgggttcctctgccgggctctccgcgggcgtctgcgccggggagcaggccacgagcgacagcaccatcagcagcgccaggaccagtgtcaacagcttcttcatgtcgtctcctccttctgtattggggtcttatgtcagccccggaacggggcgcataattcggtcgtttgccttactccttcaccgcgcccagcgtcatgccggagaggaagtagcgctgcaggaaggggtagaggcacatgatgggggccatgccgatgatgatggagctcatcttgatggcgtcgccctgtatgtcgggcttggcctgtccggggatgttctgcgtggccatcatgttgacgtcgttgatgatggtgcgcagcacgttctgcaggggccagttttccacgtgcttgacaaagagcatggcgttgtaccactcgttccagcgctccaccgcgtaatagagcgtgaatgtggcaagcagcggcagcgacaagggcaggatcacgctccagagtatgcgcaggtccgtggcgccgtcgatcttggcgctctcctccagcgccgggggcagggacttaaagtagttgctgatgatcagcatgtacatgatgttaatgcccgtgggcaggatcatggaccacagcgtgtcgatcagcccaaggtcgcggatcaggaggtagaaggggatcagaccgccggagaagtacatcgtaaagacgatgaggaagcggatgattttcccgcccggtatgggctttgtcaacgcataggcgcaaaatacggtcaataccatgttgtagatcgtgccgatgaccgtgatcagtatcgaattcttaaacccataccagatcaagctggactggaaggtgaagctgtaggcttcccaggtcacctccggcggccagagcatcaggccctgatagcgcaggtagacggtgttgggcacgagcgagaccaggagcgcattgtagaacgggtagaggatgatgagccccagtatcgtcagcagcgtaagcagtatgaagtccgcgacaccaaagcggcgaatcttgttcttctttgcgatgtgcacattgccgtgtttgtccacgcgggcgtgaacctctgccatgattgcccctcctttctacaggaccgtctcctgcccgagcgccttggtcacaaagttcgccagcacgagcagtatgaagttgatcacgttcttgaacaggccgacagccgtggtaaagcccatgtccacgcccgtgttctccacgaagctcaggcggtagatgtaggtgtcgatgatgtcgcccgtctcgtacaccgggggcttgtagaggttgaagatctggtcaaagccgccctccatgacggcgccgacgcgcaggacgaactggatggcgatcatgttgatgatgcccggcagcgtgatgtaccagatcttctggaagcggttgcagccgtcgatcgtggccgcttcatagagcgactggtcgatgccggcgatggcggccaagtagatgatcgtgccccagccggcttccttccagatgtcggagatgacgagcaggctgcggaaggccgccttgttgtagagcaggttccagttgtcgccgatgcccgggacgaagatctcgcagaccttgcgcaccatgccggtggagccgagcaggttgagcatgatgcccgccatgacgacccaggtaagaaagtgcgggaaggtgtagatggtctgcagtacccgtttatagcgcggcatgtagacctcgttgatcatgatggccagtatgatggggaacgggaagccgaagagtatgcggtagaacgagatgaccagcgtgttgcgcagcgccggaatgaactcgggctccgtcatcatgtacttgaagtgctcgaagttgttccaggggctctccgcaatgcccgcgatcatgtagtccttgaaggccagctgtatgccgtagagcggcacatacttgaagatgatgaagaacgccatgcatggcagcagcatcaggtagatccaacggtagtcccacatcacgcgcagcgtctttttgaaaggcctgcgccctgccttgaccgatcgagccgtcaagattcattcctccttcgtcgtctcctccccttaggcgcgggaaacccgcggttcccgctcgccgggtgggcgtggtggtttgggtacgcctgtgttatgcaagtacgttcctatttgtttaatgtatgttatcacgattcgtgattactgtcaagaatctatgaagaatttttgtgcgatgtgaatgaagattccggaggattcccggatctgcgggaaaatcccctggaagctctccctcttcgcgcttctcttttgttgattttttgttaattctcggcgtcggcttttcggcttcctccgcgtccgcccagaaaaaaacccccggaagtttccttccggggggcgctaaccagggactaggccgaaattctgcgcaggtgtttcatggagatgtccaggatcggcgcggagtgcgtgagcgcgccgctggagatgtagtccacgccgatgtccgccagggcctgcagcttctcccgcgtgacgttgccggagcactcggtctgcgcgcggcccgcgatgcggcgcacggcctcccgcatgtcctcgaccggcatgttgtccagcatgatgacgtccgcgcccgcggcgaccgcctcatccaccatctcgagggtctccacctcgacttcgaccttctgcaggaagggcgcgtactcccgggccaggcgcacggcctcccgcacgccgccggccgcggcgatgtggttgtccttgagcagcacgccatcggagaggttgaagcggtggttgtacccgccgccgacgcgcaccgcgtacttctccaggatgcgcatgcccggcgtggtcttgcgggtgtccagcaggcgggtgttcgtgccctgcagggcggcggccatctcccgcgcgcaggtggcgatgccgctcatgcgctgcaggaggttcagcgccacgcgctcgccggagagcagcacgcggatgtcgccccgcacgcggcccaggagctggccgctgcgcaccgcgtccccgtccttgcagaggaaggtcacctccgtccgctcgtccagcagggtgaacacgcgcgcgaacacctccagcccggcgatgacgccgtcctgcttggccagcagctccacctcgcccggcgtctcttcgcggatgacggcgttcgtgctcacgtcctcattcgaaatatcctcccgcagcgccgcgagcagcagcggatcgatctgcgctttcatcgtgatgggattcatcttgtttccttcctttcccctccgctcgtcggaggagcggaagcctgttcccagtatatccgcggccgcttcgccctgtcaagcgggcataaaaaaacgccccgggaaggaaacccttcccaaggggcgcaaacaaatgcgaaatcagcgcttgctgaactgcggagcgcgacgggcagccttgaggccgtatttcaatcgtctgagcgatgattttccttgatattccgggcttttttgagcctcggcccctcggttgtcctattccttaaccaaaaaacaggccacttttacgaggggacagcttgatgaaatgcagaatttactacatcgaatagctgttctggtttattatactttactcttgcatagatgtccatagttgtcttgctgttctcatgtccggcaaggtactggaccgtcttggggtcaacacctgcatacagaagattggtgatgtaggtatgccgcagcaggtgcggtgtcacatcgaagtccaggctatacacaatgttgggattgtttttctgatgtcctcccagactcggctgaacagtgtacttgatgctctgtccgttcacatacttataataggtacgctccttggtagaccgaacaacgatgtactgccagacacgtttgaactgcgaatatgacaagggctgtccctcactatcggcaatcacatattccgatttggaggcagccttggcttcccgcagacaattcacaaggcatttgggaatgggaatatcccttcttgctgctttcgtcttaagcgttgtagagataaccggtctgttatgctctgatcgccatgcgcgccgcacagagatatatggagtgggtgcatcgaggaacacacaatcccattgcaaggcgagagcttcttctcggcgcagaccggcatataagccgatcatggtaaacagatacggcggaagtcctttgacggtttccagcagcacttccacctgctggtctgtcagcgaatctttcttttgggtcggtttccctccttttgccgaaatcccctcacacggattgtattccagcaactggctccgctctgccgagtaaaaaatgcacttgaggagcatattcaccgtattgtgcaggctctcggacttattggacaatgggatcagcgccagacgaatatcatccgctgttacttcctccatatacatatctcccaaaggcttgataatgtagttcttcatattggaggcgtagcccttcagtgtagccggcgacacttttgcggattgcatcaacagccacttctcacaatactcggccacagtaggatgctcccggtggaagatgatctccgctacctggcgtctcgcctcctgctctttatcgtacagttcctcgcaggtagtcccatacaagctcacctgcttgccgtctgcgtccagaatccgggttctgtaatacaggacaccctttcgtgtgacggttccatattgaggtatgttttttttcttctttgccataattaatttcctttctcgcgtggtgatgtatctacacctcctttttatcagagatttcaaattgaatcaaagatacggccaaggaaaaactaagagcgagacatccttgtctcgctcttacttcattttctgaattgttcggaacttacacagcgtcccataagtcaaaggcacagcccattgctttgacaagatcatccggcctgttgtatttgacctttgcgtaaatgtccatcgtgattttgctgctttcatggcccgccaaatattgtaccgttttggggtccaccgaagaatgaatcagattggtgatgtaggtgtgccgcagctgatgcggtgtcacttcaaaatccaggctatataccacatggccgttattcctggctttttctccaagtttcgggtaaagcatatattttacatactttccgtccacaagttttctggccattctcggctttgcagtccgcgtcacaatatactgccacagccgcttaaactgtgtataggatagcggatcaccgtcccgattggcaatcacataatccgaagtggattttttctttgcatctttcagacattcaaccagacagaccgggagaggaatgtttctttgtgccgctttggtctttagctcggtaagaatgaccggcctgttatgttctgtgtgccatgcccgccgtaccgttaagtacggagcctctgcatccagatacacagaatcccattgcagcgccaggatttcttcccggcgcagaccggcatataaaccgatcatcacaaatacatagggcggcaaatcccggatcgtgtccaaaagccgctcaacctgttcatccgtcaatgcctgtctttcttcctggggaactcctccctttgcatccaggtatatggtcgggtcctcgtcaatcacatggctctccttggccgcccggaaaatggacttgcagagaatcaccacagacttataaaccgaagccgacttcttggaaacaggtacgagggcaagttggatgtcatccagggatacatcagccattctcttgtctcccagccctccaataatgtgcctccgcaccttagaggtataatctgtcaaggtggtggcccgaacatggacggactgcatcagcagccacttctcacagtactcagcaaccgtaggcgatcttcgacgaaacgtagtactgtcaatctgctctaacgcctccagttccttgtcataaagcttttcgggcgtctttgcataaagcgccactctgtttccatccgaatcttcgactctggttctataatattcaatgccgttaagcacgaccgtaccatattgaggaattgccctttttctttttgccaattccgtcacctcctaagaataatgtccagcgctgtacctttgttttatcagacatattaggttccagcaaggatacggaacagctcaagctcggacacttcgcagcttgcggtatgtagcgcttttttccactggctttgcacgatgggtgcattttgcgatatactcctgaaggccagcatctgtaaagtacacgcaaccattttgcacatactgaacataggaaattagcccactgtttcgagctgcatccaaagtggcaatgctaatccccagtaatttggcagcctctttccgcgaaatcaatttttccataggtggtccccctttctgtcaaagatgtggttgttgctttcaaaatcacatgaatgcgctggcaaccgaagctgccagcgcatggtatctgactttgaaaaatttactcgccacatttgccacgcacccctggcgatggggacattccggtctccgctggcgcggctgtcataactccacagcgtcgttttactcgtgcgccgcagagttccccccaagtctttaggaggccgtgaggaagtatctttaacccctatgcagtcatcgcgccctgaaatgccactttcgggtatcaggctgacgtggatcgctcggaacagtcctattcatcacctcctggggctgtccatcttcgcggcgtgcctgattcgctcgtacataggttatgtaccggaaatgccgtctatgaaattgtcaagctccacattgggagaatgttcttccctcaatgggtaggcactgatacgcttcatttgttaagtgttattcaaaaatttttttatttttttaaatctttgtgcaacagcacttctggaacaatgccaaagacgtgctacatcaatttgacgataaccatccacaaaaagtaatgtcaatagctccaaatctttcttcgacagcttcttcaatctcaacagtagttgttcgttttccaccgaagccaaccatccatatcgcgtttgatcaatcttatcaacatcccattgataagataacgatgcaaactttcggaacagctgtgattgaccacatacttcatcatattgttcacaaggtattggttgcgtatggttttgaaaaaccctttgactgcaaaaccatgcccagtcatattctttcatggcagcaatctgttcttcgctcatccctgcatcacaatactcaacttctaaacgcttccatctactatcaaacttctttttctcatatccataattaaatcccattattaacctcctgtagattcaatttgcaaaattcaccatgcaaactaaaatcaggaggagatcgacaacgagaatctctgggttgttttccatccccagaaacaaaaatgccagctgatcttaaggaccaactggcatttttattcgcgcacaaagaaaacgcattattaagattttataagtacaacaagtataccaagcacaattcgataccaaccaaacaccttaaaatcatgttttttgataaagttcattaggaatttaattactaagacagataccgcaaatgccacagccataccgagaacaagagcgagcagttctgcacttgtaaattcaaacccgaattttaacagcttaaaagcacttgctccaagcatagtaggtactgcgaggaaaaaagtaaactctgctgctgccactcgtgaaactcctatgagtaaagcacctataatcgttgctcccgaccgtgatgtgccgggtataagtgataacacttgaaatgcccctatcaagattgctgttttatagctgatgtcagaaagtgccatagtagtaggagtacgctttttattccaattttctatgagaatgaataacaaaccataaaagattaacatgattgaaatcacaatgggggtttggaggtaagcatccaaataatcatcaaatagaatccccataatagctgacggtacacaagctaccgcaaccttgaaccacaacgagaaagtatcctttttaacaattgactgtgctttgttcttaaattgaaagggaaacatcttgttccaaaacattacaaccactgcgagtatagctccaagttgaataacaacaaaaaacatttctttaaatgcttcgctcatattaagtgtgataaattcgtccacaagaatcatatgtcctgtgctgctgataggtagccactcagtaataccctcaacaattccaagaaaaataacttttaaaatttctataaaatcaagtaccattatttcaaatcctcctttttaaaatgatgaaaggtcataagaaaaccaactgctgatacaagaataataatagatacagacagcagtgtaggatagccggtactctgaagtttaccctgcaccaagaaataggtggctgtccacggatacaacgctccccattcttgatttgaaagtgcggcacttcccatgacaatcacggcagagccaatcatcggggcgacaaatccttttgttttcatagcaacaaacacaaaaggagaaactgttaaaaacatcaggatactgccaaacaaaaacttggggagccatactattgccactagtaagctatatccctccaatgtaaagacagcgtcatatagcccacaaacgataaatatacctgcccatgttacaagggttagcataacaatccaaagaagcagggtgcaaaattttccaattaatagttttgtccttgaaatgggtatgggcaatatggttttgagggtgctttctgtgtactctctgctaaacaagtaagctgcaattgccacatatatcataatgtttaccagcagcatgatatacagtacactgtcgctgtatatgtcagacaaggtaaagataatctccggcttatcaaaatgtgtttgcaaggcttctattaacatcaaaagtggggtagataatacccctgccacactaattagcaccatttttgaacgctttagttttaataattcacaagaaataagattaagcaataccgccacctccaatcagtttagaaaagtagtcctctaagttttcctcactatcatttatccttgtcacgagcagtccatttcgtgcaaattctcgattgatttctccaacactttggctaaagtcataaattctcaccgtaccgtcctgcactgtaaaatccgtcatgtggtagtggttttctaaaatctttccggctatctcactgtcagataaatcaaattgaatgtattttcgattccttttgtgaagctcggatatattcacttcctctactaaatgcccctcgtgcataacgccgataatatctgctatctgttcaatctcgcttaaaacatggcttgagataaaaatggtaatgccatgattgtgactaagttcagataaaaatgagcgtatttcaactattccaatggggtcaagtccgttaatcggttcgtcaagtattaaaagctccggctcgtgcataatggcggcggcaataccaagccgttgcttcattccgagggaataatcggaaaagacttttcttttctccttatgcagccccacaacttcaagagctttttctactccacttttagatactccccctcgcagtttagcgagaatttgcaaattctcataccctgttaaattactgtaaaatcccggtgtttcgataatagagcctactttgctataaagggtatggatattttccttatagtttgtgccaaacaagcgtaccgttccctccgttgggaaagcaagctgcaacatcattttcattgctgtggttttgcctgctccgtttctgccgagcaaaccataaattttgccctttggcacatgaagatttaccttatcgacaacggtggctgttccgtatcgcttcgtaagattttctgtttcaatgatataatccatatttgattctcctttccgtgggttgctgttcttgttttcgctgaccacaatcttattatccacgagtattgcatagaagccaagaaatctaccgtcacaatgccgacacaatagatgtcagcacgaaaaaagctccgacacttatcgtgtcagagcctattttaaagggtttatggcattttactttgtttgggtttgctttatccagacaaatattttagcaacaaatagcagaaacataagggcggttacatagggttgtcttgccgcagcgaagaagcagataaaaagcgtactcagcacgagagagcattttgtgattatgttgctccatgattccttttcaaaacaaacacacatcagtttcgctatcccaagtgcaatcaaaacaataaaaacaatccaatagattgcaagatatattggggtagtgtctgtaaatgaaagtagattgacagaataaatatatccgtcaacaaggttaccatacaacggcaaaagtataaaagtaaccgccatcatatctaatattccataaatgaaactgtaaatttttttcaagttggaacgattttcagtttcggcaagtgtaatcagttcttcgcccgatagcagttcatctatggtcacagaaaagaatttagaaatacacttgagcgactcaatgttagggtaacccttgccgctttcccattttgaaatggctgttcttgatacatataattgctccgcaagttgttcctgcgttaagttctttccagtcctaagctgttgtagcttttcattaaattccatgattctcctcctgtttgttccttgttttcatacgtccatcaacgggtttttctgcatcttttggtatcatccatgcacgaccaaatttttcagttccgtcaatgcgattttcctcacataatttttgtatccgtctttccgatatgccccatttttcagaagcggctttcacagaaatgtaattcataatatcaacttcctttcgcaaagagtatataattattatatacggaatgacgaataatagcaagtttctctccactaatacgaaattatacactactaaacataaaatcatacttcgttcaaatatcatcacccgaaatgtacaatgatataggatgatattaaaatgtaccaagatgaaagaaaacttgattttaagccgttaggtatagcgataaaaaaagctcgggaagcaaaagggtggacacaggaatatcttgcccaactggtagaccttacgccacgctctattatgtatatagagaacagggggcagcacccaaggcttaacaaattttatctcattactaccttgcttgacatctctgtagaccagttcttttttccatgcaatgaagatggcgacaacaatcgccgcaaacaagttgatgtactgttgaatgatatggaagaaaaggagcttatcgtgatggaagctacggctcaaggcttgaaaaaggcaagagaaactgcggaataattaacgctgttttcgtaagccaagccaactgaaaaaagtgcgacacctacgggtctgtcccaaactttgtgtaaagtccaaacaagggtaaaacatggtagttggggggagcgtttttgctccctgctttttcaatataacagaaataagatgaataatcaagccttagtccggcagccggtcagcgaaaaacacctccagctgggagtggataataccccaatcacgccgtttccccgtccacttcttggtgatgtccatcatcgccaaatacagcattttcagcaggctgtcatcggtcggaaatacggattttgacttggtgaccttacgcagctggcggttgaagccctctatggcgtttgtggtataaatcagcgtccgaacctcctgcggatacttaaaatacgtggataatttcggccagtttgcttcccacgattgtgcaattttcggatatttgccgttccatttttcgccaaaggattccagttcatacagggcggtttcctcatcgacagcggcatacacacgcttcaaatctgccatcagcgccttgatgtctttgtaaggaacaaaccgagtagtattgcggatttggtggatgatacactgctggatttccgttttgggatagaccgcttctatggcgttgtcaaagcctgttaagccatccacacaggcaatcagtatatcctctacaccacggtttctcaagccatttaggatagacaaccaatattttgcgctttcattctcgccgacccacatacctaagacttctttgataccggacatattaatgccaatggctatgtagactgctttcttcataatttgtccctcactgcggacatggtagtgaatggcgtcgagaaatacgactgcgtaaatttcttctaacggtctctgctgccattcctttaccacaggcaatatcttatcggtgattcgactgacggtgctgtcggatacctccaaaccatagatttcacggatatgcgcgtcaatatccctcgttgtcattcccttggcgtacatggataatatcttttcttcaatatccccgctcagactggtctgctgctttttcacaagctgcggttcaaactctcctttgcggtcacgggggacagcaatatccacctccccaaagctggttttcatcgtttttgtgctgtggccgttgcggctattatctgtgtctttattgcggtaatcatacttgctatagcccagttcgtcatccaactctgcttccagtccgttttccagaatatctccgacaaattccttgaacagcgcgtttatatccgacatatcgttgatatccagttcctgcatcaattcccgcaccttctctttacgcgcgatttcctccggtgttctttttcttcttggcataataaaacctccaaacttgtatttattatacacctgtttggaggtttacacaatctttgaagaagactcacacctacacaggctatcgcactttttaggttatttttttattctccacacaaat

SEQ ID NO: 97 - DNA, 10907 bp, Unknown
  16S sequences of unknown bacteria
tttatactttgacgggctgttctttgtcaccattgaaccatctgaagcttctacgtgatccacaagatatggcttcatcataataccaccattcgccaccgtagcggtaatcaatgccatgtgaagcggtgtcacaagcgtattgccctgaccgatagccgtcgtcatctcttcaccatctgaagagtcgccatccaatacaaactgtgaagtactgtgctgcaatgccgtcggcaatgacttgttaaacaggaattcctcacacatagagtgaaattcatcattatccagactcagaccgatttttgcaaatgccgtattacaggagtgggcaaacgctcccttcaggtcctcttctccatgcgcattgttgttgtagcagttgatcgtcatgtcaccgaccgtcagcctggaatcacaggtaaaatcgaacgttttatacgcgttcggctgctgccgcatgaacgccagcgtcgtcagaatcttaaatgtcgatcccggcgggtataatccctgtgtcgcacggttcagcaatacactgcttgagctgtctgtgactacgctctcccatatctccgcaatagagttcggatcatagtccggcttggataccatcgccagaattttcccggtcttcggctccagtgccaccactgcaccattatagccgccaagcgcctgatacgctgcattctgaagtgacgcatttaacgtcacgataacagagtcccccatctgcttttcattatcagactcttttagctgtgtcagtacggatgcgtgggagtcaagaagatcgtagttgcacgatgcctccagcccggcctttccgttggtcgcatagccgatgacatgtgcaaacgtatttgcataaggatacacacgggtctcactgccatcgtctcccacacgcgtctctgcaagcacgctgccatccgcagagaggatcggcccgcgaatgtacttatcaatattcgcatcctgcttcgtattgtacatatttgaattcagttcttttgccttaaacacattcagatagatcagatatccagccagcatcagaaacagaaacacaaacgtataagtgacaattccaagctccgtatttctgcctttgccttcgtgaacctccgactcctggtcaaactgtacctcacgcacccttacctttttacctgcgccctgtccttcggtcgattccctttttctgtccgtactgtctgtctttgtacgttctgttttcttcctgctcataatcgcctccgccatttccataggaatatccgtcgtcataaccgttctcatagctatccggacgaccgtctccatagctgtcatcatagccgtatccatcctgcggatagccgtcatcgtcatagtagccgtcatctccgtatccgccctgcggatagcctccgtatgcatccggatatccgttatagccgccattgggtggagcagtcccatagccatcgtcatagctgccatacccgctgtttaccggataattgccatatccgcccgctccatagcccggtgccgcatagccctgattcggatatccatagccatggtttgcataaaccgccccggctgccatctgctcctttatctgtttttcccgatttttcttttcttcatcccgctgcagcatgtaaagtccctgcacgactgcaaacatgatcagtgtgctcagcatcgaactgccaccatagctcacaaacggcagcgtcacgcccgtcatcggaataagcttgataccgcctccgatcgtcagaaaaatctgtgccgcataggtgcttccaaggcccaccgccaccagacggtaaaagcggttcgaaagctgcattgcgatattcacaaacatgataaaacagctcatgcagacgaggatcaggcagatgccaaagatcgtgccaagctcctctgctatggcagaaaacatgaaatcctgttccacaaacggaatcgcattcggtgagccctggcacagtccggttccaaaccagcttcccgcactgatagaaaacagtgactgacatatctgatatccaccgccctgataatccttgaacggatccttccacgcctgcacacgcacacgtatatgtgaaaacaggaaataagccccgactgccgctccggagccggccagaatcccggtgagtacaagaaacgggttccgggtggaaacgaacagcattaccagatacgtgacaaagaatatcatcgcgcttccgagatccttagatacaacgaggatcaacacatggatcgccgccagcgccgtcgcgatcacaagctttttaaaatcttttgcattcgtcagaagacctgcaattgcaaatacataaatgatcttgacaaattcggacggctgtatggaaatgcctccgaaactgaatgatagctttgcgccataggtcgcggtcgccgcaatcgcgacaagcgccagaaggccgataccggcaagggtatagaaccagtacatttttgtgataaaccggagttttcgtatgataatcgggatgagcagcgccacaactgttgagatcaccgcaatcttgaactgcttgatgctcttgtcataatccaggcgggtgatcataatgaatccggtacagatcagcatacacatattattgatcagcagacgggaagccagcggatacagattccggaataggataagcactgccgccagataaagcgcctgcgcaccgtaaaacagcaaaagtgtcagctccgtctgctgcagatacagtactgtaaacgccacaaaatgcatggcaaacatcagcatgttctgccgcagaaacaggtattcccgcgcatcctcatccttcttgccgaatacggtatagcactgtaacgtatacagcgccattaaaataataatcaggtacttcgaaacctgtatgataagattcgtcatagcctattcgacccctcttctgaaatgtccccgtgttccgtcctgtccgtccggtgcgaaaagcattcgaccgccgacatacaactgctttaaccggtccaataccgcagcagtctcctctcctgattccacggtaaataccgcgcgcacataattcggagacagcgcctcgatctccttccgacagccgctcagatccagcggaacggaattatagatcgtattgcagcaggtgacacaccggttcacgaccggaaactctgcattcttccggtcctttaaataaccacactccggcatctgtgtgcagacagaagtattcttcgtcacacactgtgctgaatgcatcagcgcctgccggccatagacgacaagctccgtctctccatccgatccggcattgcaaagccgcatcagctctttgaaattcagctctgccggaagcgttcgtctgccgactccttcctgaatcagaaatccggatgctttaccattgtatgcataaaaggtatcatctccgatccatatctgaccgtcccttccgcgcagctgcacatagccaagctcatctaatgtatggagcaaaaagccgtcaaactccggcaaaagcgcctgcattgcctccagctccagcagcctgcgatcctgcgtacgaaagaccggcggaaaattcagccagcaggatagtcctgcctcttttatcctttgcacaagcgcacgcagctttccgacatctagctggtatcttccggtaccggctaccagcagatccacatacaccccggcaatttctcctggctgccgcacgactgcctccagctgatccaatgtctggacagatacagtaagctgcatccctttctgccttggcaacactttttccacgtccgcccgcgtcaattccccgcattcctgctgcggctgcccgtctcttgtataatggcccagcagcttttccgtcagcgcttcgattccctgcctgcgcaattcatttaatgcacgcagcggaaaaaacagaccatcctccacagaaaccgtaagctgttcaaatatacacatcgtatttccggtcttttcgatctgcttcctggctgccacagcatctaccggacgcgatttcgccggctgcgcgatctcttcggaacggacttccacccgcacagtaccacaatacagctccagcatagcaggttcccatgcagaaatctttaagactccattaatttttatcttctgctcctgctccacataggcttcccgcagcttgcgcagcagcagctccgactttgtgcgataaagcaattcatttccatttgggcgaatgctgtttttcggaagtacaaaacgccctcctgtctttatctcttctttcaccgtcatactgaaagaagtatcatgactctccagcacatctcccggatacagatattccagtgcctgcgcctgtataccgccttttttctgtaaaatcagccgggccgcctctgtcccgaaatgattcgggcgctccattgacatcatcttcggcccattgtgctggtgataatagccttccgtaaagccaccgcggttgtacagatccataagtgtacgcagatcctccggatctgctttccaatgctttggctttccgcccatctgttccagacgatccagatacttccggtaaatactcacgactccggccgtgtactccggccgcttcattctgccttcaatcttcagggatgcaatccctgccccgacaatctccggaagcaattcaagcgtacacaaatccttcatgctcagaagatatttctggctgccaagcatgtttcgctccccatcttcccgtcggaacggaagccggcatggctgcgcgcatcgtccccggttgccgctcctgcctccgatcatgctgctgaaaaggcactgtccggaatagcaatagcaaagcgcaccatgtacaaaggtctcgacctcgatccctgtctcctctataatctgctgcacctcgtccagcgacagttcccgtgccgggacgacccttgtgacgccgtgccgctgtagtacgcgcacactgtcacagccggtaatcgtcatttgcgtgctcgcatgcaccggaagcttcggaaaatgctctgccagatactgcaccacgccaaaatcctgcacaatcaccccatccagccctgcctgataataaggaaacagataggagtacagctcctgttccagttcttcctcctttagaagtgtattgactgtcatatacagctttttcccatgcaagtgacagtatctgattccgtccagcagcgcatcctcatccggattgtccgcataggcacgtgcgccgaacctgcttcctccgatatatacagcatccgcgcctgcattcacagccgcgcgcagactctcgtaggagcccgccggtgcgagtaattcaaccattctatcctcctgataatgaaaaagctgcagccatgccataccctcttctgcaaaagaatatgtcaataattgcagccgtgtgatttatgcgtctctttgtgcttccagccggacaagctccttttgcagctgtgcatttcgctcttcgagtgcctttgcctctttttccgcattttcgagccggatctgtgccgtgatcatttcatgcttaaactcgtaaatctcctgatctttttcggaaagctcccgctcaagctcttccacctttttctttactttaaaataatcatccgccgtattcagattcagcagaatactccgcatctccggtgaaagtctgtgatacccgtccagattccggaactccgaaatctttccattcagataagatgctaccctctgcagatactcctcactttcataaccgcttaaggtataaatctttcccgctataattacctgtgtattattcttggccgacatgaatgtgtctgttcctttctggtgatatgaatatagatattctattccggacgttttgcgcaagcctcagacacgtttgcttcgcaaactatccgttgtgcaaaactgttatactgaacattatagtcgaatttgagagaaatacaacctttttattcggtttgtgggcggactttgcccaagtgagtataggccaggtcagtagcaacgcgcccttttggggtgcgattgatgaaaccgttcttgatcaagtatggctcgtaaacatcctcgatcgtaccggaatcttcccctatcgcagcggaaagcgtatccagtccgaccggacctcctccaaacttctcaatcatcagaagcagaatagcgcggtcagtcgcatccagtccgtggcggtccacctccagcaaatccagtgcctctgacgcgatctctgctgtaatccgtccctcatagcgcacctgcgcataatcgcggacacgctttaaaagccggttggccagacgcggcgtccccctggaacgctttgcgatctccagcgcaccgcgattgtcgatctgtacacccagcaccgccgcagagcgtatcacaatcgtctgcagctccttttcggtataaaactccagatgatgtacgacgccaaaccgatcacgaaggggagccgtcagcatgcccgcccgtgtcgtcgcaccgattagagtaaaatgcggaagatccagtcgaatggaacgcgccgctgccccctttccgatcacgatatcaatcgaaaagtcctccatcgccggatacagaacctcctccacctgacggttcagacggtggatttcatcgacaaacaggacatctccctcctgcaaattattcaaaatcgccgccatctcgcctggcttttcaatcgccggcccggatgtgatcttgatattcacgcccatctcatttgccacaatcccggcaagcgtcgtcttacccagtccgggcgggccgtatagcagtacatgatccagagagtcatgccgctgccttgccgcctcgataaatattttcagcgtatttttcgccttttcctgtccgatataatctgagagcttctgtggacgaagccccggctctgtccggtaatcctcctccgttacatcggtactgatcattctctttgacatttttcactccataaacagccatttgccttgccgttgaatcagctataaaaacgatatctgcttcagggcaagcttcaggatcgtctctgtatccatatcctccgtaaccccggcttttcgcactgcctttaatgcatcgcttgccgaatacccaagcgcagtcagcgcctcgagtgcctctgtcttcgcatctgagtctgccggaagcggcattgtttccgacgccttccccagcttcttttcaaatgcatcctccaggctcagcttatccttcagctccagaataagcttctgggctgtcttatttccgatacccggagcctttgcaatcgcctttgcatcgtccgcgagcactgcaaaccgcaaatcatccggcgtcaacaccgacaatacgccaagcgcggccttcggtccaatgccattgacattcaaaagcagctggtacatctccagatcatcttccgagagaaatccaaacagctgcattgcatcctcttttacattgaggtacgtatagatcttcacctcttccccacggcccggcatattcgacgcatcccttccggaaatataaatcagataaccgatatcatttacatccagaatcagtcggctctccgtcacttccacaattattccttttaaatatgcaatcatcgtatttactccattccacttacctgcccaacagtttaacataaaaaaaggataaaatcaatcatatgttcgattctacccttttccatgtatcataggggcaaaataccttttgtccccagcttatgcccaccttgcaaaaaatacgtggctgccgatcttccgataggttgcagaaagcccaagactgcggtacgcgttctgcgtcataaaatacagatagctgaaggcgatctgttttccgccaatggtaagtctggtgctcgttccctttttataattctgcagacggttcatgacttccgctgctgcctttttacagtccgcactcacaagtgacggcttctttaaggctctggtcagtgcgccatctctggccggcgcaaactgatggttctgataaacgacctcccgcagttttgacggaaatcgggagcttttcatccggttcataatcacgagtccgacaccgagctttccggtatagctctggttccctgcttcgcagtagatcaaagctgcaagcaatgtctcatcatctacatacctgtcggaataatatgtactctctaccttaatctttgtcttaggaggcgttgcctccgacccggaactgccggaatcctctcctgatacctttttggcctgtcccttctgatttaactcataagtgacaccttttaccgtaaccttcgtcccggtctgcttcttatacgtcttcgggtcaaaataataggtatgacttttgacttttacaagaccggtcgctgcccttccgtttgaaagcagataacagttatccttccacgtgtttttcagacgggcgccggtctttccgacataataacatccgacccagcaattctttgcgagtgcaccattctctccgtaatagtaatacttcttgttttcttttacccactgattcgtgagcatctttccggtcttcagtccaaagtaataggtcctgccaccgaacgtgcgctttcccttcagctgttctccggtcctgccaaacgcataccacgcaccattaatctgacggcggcatcctaccacaagagatccgtttttcgtcgcataatacagcttgccttttgcacggatccagctgtttcggatcaccgcaccgctcttgccaaaataataataacgctttccgatcttagtcacaccggtactccgaatcccctttgcatttacataataggtaccgctgatccagctgtttttctttaattttccattctgataccacgaatacgtgccatccgtattcttctcccacgccgcagatacccgtccgggcatcgcgaaaatcatcacgagaaccaggacaaaaaacactgcactcctttgccccgtattcttccatgcttccatgtaatttctccctcaccgtatacatttcatgcatactcttaatgtttttgtaataaattattcacattataagccacatattataatctgtcaactgaaagtaaagcggacattcgcaatccatccctgcagctctgctgacaggggctagatagcacacctgtaaaaggaatgtatcctggcacattttggtgcctgcggcggtcgcttacaacctcttttgcttgcgccgcagtacacatccttgcaatgccttccttttttctgcctgtatcaccgttacaggataatgcagataattcggcccttcgactcgtttacaatccgtttcattgtatcctgcagcttcagctgactttcttctccaattgaggaaagccgggattggatcccctcctcaatcatctgctcaaccgattttccgaaaatgagtgtattccacattccatcctcctgctcgttttgcttcatatattcgatcaggtctttcgcctgctgttcacttccgacgatcggggcaatctctgtctcaatatcggcgcggatcagatgcacggatggcgaggtggcacggatcttcaccccataccggctgccctgcttcatgacctgcggctcttccatccggatttcttccttctgcggagcaatcacaccgtagcctgtctgacgcaccgcctccaccgcggtcgacactgtgtcatattcccttttccgctttgccatctcccgcacaatcgaaatcagctgatactcactctcgatttttgtcccggtcatctcactcaggacctgatagtaaagcggttcctgcatccagacgatgacctctgcgcttccggttgataaatccatctgttccagttttgtccgctttatgtactgtgaagacagctccagatcaccgcccgcaagatctcttaccgtattccatttctgcatggcctgctttgccacctcaaacagctccttcttcagccagtgtgtatcctccagcatctccacccacttcgggatctgaaaagcgaccctggtcagcggaaattccagcagaaactgttcaaacacccggtacagatcatttttgtccatctgctcgcagttcagaattaccggagtaatgccatacgtctgctgtaaatacgcagcagttgccttcgcctcctcaccggatggtcttgcagaattcacgatgacaagaaacggcttcccgatccgctgcagctccgtaatcgtctcacgctctgcatcgagaaacgccgcccttggcagctctccaaagcttccatccgtagtcacgacaagtgcaatcgtcgcatgctcccgtatcaccttctgcgtccccattctggcggcctccaaaaacggcaccggctgttcctgccacggggtctgcaccagccttggatgcccgttctcctcgacaccttctgcaccaggtacgagaaaaccgacacagtccacgatccgcaccttcatatctgttccatcaccaactgcgagtgaaacggcttctctcggaataaatttcggttcaactgtcgtcaccgtccggccggacgcgctcgacggcatcgcatcacgcgtcatgttccgctgtgcatctgtcagctccggaagtaccagcaattccacaaattttcttgcaaaagcggactttccagtgcgcaccggtccgacaattccggcataaatttctcctcccgttctcagctgcatgtctttgtacaaatcaaatttttccatgaaaagaccccctgcatatactactctcagtatatgcagggggatcttgggatatgtcagagtatcagcacatacggccattgtccgcctgacttattgtttaccggaat

SEQ ID NO: 98 - DNA, 32759 bp, Unknown
  16S sequences of unknown bacteria
aaaaatgcagcgagccttaaaagaatttttattactttgaacattttattttttttatggtgccgatggatattttttatatgtacttttacggtaaaatctcaatgtgcgttaaggctatgtcaagcaaaacgcaaaactcggcctgaaacttcttgaaaagagcggtaaaaattgcaaaccttggattatgccgcattttatagattcgcgcgagcctctcgcaacggcatttgcgaaatggctcgtatcgcattttgagagggaattgtcatcgacgccgccgtccgcttgcgcgacagtcatagtcccaacccatacggcggcggagctattgcgcggagaatttatcgccgagcttttgcggagcggaaaaagcggcgcgacagatttaaaatttacaaccctcgaatctgaaatatcggatttaattggcgacagtaaagttttgaaggggataaggaatctgtcgatatggacggacattttgtcgaaagtaaaaaaaggcgaatttgagtatatatttccgtcgggactgccgactgatgccgaccgcatgacctttgcccgcaagatagcgtctttgcagtctgcccttgcggaaaatctccatacgatatcttccgcctcaaagattctctcgcagtcggcagattctcaaaaatgggaagatttggctttgcttgaaaagcgctattttgccgctttgagggcgcagggattccctacgagggcggaggccctcgaaatggcgtttggaaaattgaaggaaagcgggcgcaagtatatagccgtcggctttcccgacgtatccgggatttttagaaggttcgcgcgttccgcgttccgctttgaaactgccgtgtacgcgccggagggagattcggagttctttgacgaatttggggctcctgtcggctttgatccgcaccgcgcgcttggaatcgaggacggatcgattacagtgtgccagtccgttgcggaggaggccggaattgttgccgaattggctaaaaaatacggcagtgaggcgcataaagttttggctttggcttgcgaacagaataaggcggcgccggttttcagggcgaaactcgaagcaaagggttttgcggttgcgcctctaaatgtggatactctcgcggagaccgcactcggacggttgctgcggctcttggggcagatttcggagggcggagattttaatgttgcgggcgaactttgcaaaaatccgtattttagcgaaaaatatttgccgggtgaaaatgccgatgaattgtttgcggatttcgacgctttgtttgctgccgcaataccgggcggcacagttgccgctctcgactttctctcatcgcgaggagcgcgcttagcagggataaaaaatatcgatttgcttggacgcgctttgcgcgccgtttccgctttagagacggagatttcaaattgcgcgaatcccgccgtgtggctcgccgcggaaataccgctgatggcggaggcccatttttcttcaaaccgcgctccgaatgccgagagggctgcgttcaaaatattttcggaggctgcaaaagagctttcaggctgccccgaaaatgtttttacgtttgccgactgcgtaaaaatatttattcaacgcctcgcttccgaggcctcgggaagggcgggaaacccgggcgatatccggctgcttgattggatagacgtcttttggtctccgaatccgcatattgtgctctccgatatgaacgacggcatagttccgctcgctgagccgcagacgcttctactgtcagattcgtcgagaaaaattttggggttgcgcaattccgaatcgcggcgctcgcgcgacgcgtatatgctatgggctctaaaacgctctcgctctgagccggggcgcaaattatcgataatagtcccccgcaaaaatacagattccgaccctctgatgccttcgccaattctaatgtgcgaagacgacctccctgagcgcgtcaaactgctatttaaggatctcccgtcgggttcgcgcaacgcgcactttacgcctctgtggaaattctccgcaaaaaagctcccatacagccgcccgctctcgccaagcgcgctaaaaacatacatatcctccccgtgggatttttatttgaaatacgtattgaaggccgagattttcgatagcgaaaaggaggaaatggacgccgcacaattcggaacgctttttcattcggtaatggaaaactttgcgaagtcggcggttgcggacagcacagattggtcggagatattctcctttatgtccgagaggctcgatgcgctctcaaaggcgacatttggaaggttccaaagaatgcagataaggatgcagattgagaacttgcgcaacaggctcaggagcgttgcaagcgttcaagcgcagcgccgcgcagagggctggaaaatatctgaaacggaagtcccgtttgaattttcggaaggcgggcgcaggttcgcgggcagaattgatagaatcgacgctcgcgaaaatccggaaaattccccagaatacgccgttctcgactacaaaacagccgacaaagtgtcgcccgattacgtcgaaagggagcatttgacaagcaaaggcgagtggaaaaatttgcagcttccgctctatgtgcgcgccgccgccgatatttatccggggcgcaaaatatcgtgcggatattttctcgtcccaaagaacctttcgcagacaggagttcagatgtgggataatttttcgggcgaattgctcgattctgccatggaaaaagcattggaaatagctggggaaatttctgcggaaaactttttccctgaaggcaacccgcctttttacgaattttccgacgtgttcggatttacctattccgagatgaaagatcttaccgagttcgacagatgagaaacaaaccgacttttgcaaacattagaagctcggcttcggctggatcaggaaaaacctacagcctcacggggcggtatatcgcaatagcccttgaagaggccgaccctgcgtcgatagttgccctcacattcacacgcaaatcggcgggggaatttttgagcgagattttaaagcgcaccgccgctgcggcagaatctgagcaggaggcaaagaaactttcaaaagaggtttccggcgacgaaaataaatattctaaaaaagactttgtatctttgctcgacaggctcgtaaaaaatctcggcaggctgaggctcgggacgatagactctttttgcgcggcgatgctcggcgcgttcgccccggacttcgggattttttcggacttggctttaatggattctttctcggaaagaagggagttgtcggccgtcagggagcgcgtttttagaaacggcgcgatttccaaaaaaactttcgaggatttttcagagctcgtaaaaaagacgacattcgggcaggaggaaaaatcaatctccaaaaaactcgcggaacttgtggaattgtcccgcaaatggctatggttgcacccggacatatccgaatggggaaatcccaaaatatttaagaacgtaaggcctgccgaatggaacggtgaaaaatacgaatgcgacttgaaagccctgcgcggcttggaggcgaaattcggcatggaaaaactcggaatgtccaagttttttgaaaactccaaccaccttagaatggcggattacatccctgcctttgttggcaggctgtcggaggcgtttaggctcgctgggcgcatagaggacaacgcagaaattgcatctggcagaaaaaccgtatctatccctcccgaaatggcatctgtgctgacctcacttttcgcggggttgctgtcttcgcacttgcacaggctttgcgaggcgacgcattctctcgcggaaatttgctcgaattttgagagcgaatacacaaagagcgtacgcgcaaagggcaagctcgttttcgacgacattcccaaaatactctccgcgccggacaacagcgtgacgaccctgcttttggaggagcggctcgactcaaagctaaaacattggatgttcgacgaatttcaggacacttcccgcgcccagtggaaagtatttaaaaatctcgttgacgaagccgtttttgacgattcaaaagagcgctcatttttttatgtaggcgacgtcaagcagtcgatatattcatggcgtggcggggattttaggctgtttggagaaatcttcgcaaattattccggcatgggattgatggaggagggcgaggagctcgtgaagtcttggcgctcgggtcttgacattatagttcttgtgaatgcgcttttttccgacagagcttcccttgagggcgttttcaaaaaaaatgcggccgaggtgttttccggattgtttaccgcccatgagactgccgttcccgacaggccgtcgtacgtccgcctctccattaccgaacgtgcgcaagggcgaaaatcagaggacctcgccgccgagaaaattgccgtgtacgagagagtttacagaattgtaaaagaggtcaacccgccgcttaggggaaaatcgtgtgcggttttgctccgcaaaaacgacgaagttgaggcgctcgtcgaatatatgcgaaggcgcgccgccgaggacggcttaaatattccggcggctggagaacttgacgcgcgcatatcttccgaaaatatgatagtgccgccgtttctccagattgtccagcgcctcgcacacccgtccgacagcgcatcaacctctatgctcgagatgaccccggtttggaaattctgccgcgggtttgatgccgaatttttaagcgaagcccgcgcggacatcgaatgcggaggatactcggccctgtttaaaaaatttgaaaatttcataaagactcccgaaaaatcggggattgagaagctcgacgaattttctctggaaatgctcgaacgcctgtgcgaggcttgcggcgagtttgacaaaaatctttctggcggcgacgacgcattcgtggaatttatccgctcaaaaacattcaggtccggaacggctgaaaataccgtgcaggtaatgacaatccacaagtcgaaggggcttggatttgatatggtaattttgcccgacgcatacaagaatgaaaaatccgctgcgccgaggcttggcgaaatatgcgaaggtaaatttgggggggacgaacggtacctcggaatgttaataacccctccggcgtccgtatgcgcgttggatgccctgctaaattccaattacgagcgcgtgagggacgcgcgggcttttgaggatatttgcgcgctttacgtggctttcactcgcgctaaaaatgcggtttacgtcgtaatgcctgagcggtcggaaaaatccgtgtctcctgtaaaggaatggatagggggcgcgtttgagtcgataaactgccgcaaaatctcagatagcgaatttgagcgcggcgatccgctttggtttgaaaagggcggggcggaaattcctcaaatgccttccatagttccggtcgaaaatccgaagattttatctgttggagcgcgccctgatttaccttcggattctccggtcgaagccaatgaaaaatcgctccaaaggggagctttgattcacgagctgttgaggcttcgcgccgactttggagaaggctttgcggggactttggagtttgaaagcgccgcgtcaagatttccggaatcggacattgcggaggcgcttgaaacagttgaaaggctcgccgaatctgaggacggcagaaaagttcttgaaaaacatggggagtcggaaagtttttcggagtaccaattcttatttactggagagccggtcgcggtcagcggaatattcgacaggcttgaagtttttaaagataccgacggatccgtgcgcgaagtgcgggttatagattacaaaagcacttctgccgacgcgcaaaaaaaatacgcgcgccaactttccatgtacgcgcgcgcggcaaagtcgctctttaacgcgcggatagtgcgtgcgtttgtgctcgggtacgacgaccgcaaacttgtggaattggagctctgaggattttgccaatcagtcccgctttatcgcgagcgactccgcccactccctgtattttttgagatcaaacggcggcttgccgtacagatagtggtttagctgtttcttgccgtcaatttcgtattttataagcagcattccgcgttccgacggcagcccggatacattcccgacgagcgtttttccgttaggaggtattttaaagtctgcttcaaacaagacttttccgccctcaatgtccgatatttcaactttaccttctgccggcttgaatgtgtcgtttacggcaattacttcgagcgcgtcattcacggcgacaatggcgttttcctgcacgcgctttatgtagtagtaggcgagcttctttgaaaagaaatagtcggttatcgcgtcggagagaatcggccagccgtcgcggaggttccaccagagtatcccgcatctatacggcttgcccgtccgccagaattcaataaaatatttcttcgcttccgcctgcactatttgcgaagcggatatgaaatcgtccaaatctctcgggacttccccaaagacttttgcaatttggtttgtcatcaaatagtttctcttttcgttgccaatattgctctcaaatggggtgacggctttcgcctgccactgcttgttccatttcaaattcttcgcgtcggtccacgggtagaggtgctttttgtcaaacatcttttcgagcgactccctgttggggcagccgtggtagcctatctcgcttacgaagtgggcgttacttgaagtgtagaagggcgctttgtagtatccgcgcggaccccataggtgaacttccgaagggtcggccttgttctcaaaaacgtcgctgctgtaatacggcgagcttggaagatacgggcgcgttgggtcgagctcgtacaaaacttccggcaagacctttcggcttatgcgctcttttgaagggtcgatatttagcctgttggaattgaacagccaatagaaagacgagtcgttttcattgttgcccgcccacagcgcaagcgacgggtgatggcggagcctttcgactacgcttcttgcttcaatttccatcgcttttgcaaaatcgtcgtcttgcgggggagttgtgcatgcgaggctgaaatcctgccatatcaatatgccgtttttgtcgcagaaatcgtagaatgcgtcggactcgtaaacattcccgccccagcagcgcagcatgttgcagtttaaatccaccgccatttcgagagtcttgtggagatgttggggatcgcggctgtgcagtgcgtcgagcggaacccagttcgtgccttttatatatattttgcgcccgtttacgtaaaatgcgaattcgcccttgtcgccgtttttaaagacatccgaccttttaaggttaactgtgcgcagccccacgtttattcgctttgaatcgagcagctttccgtcgggcgagagcagggaggcctcgaaaacgtagagggggctttcgccgtatccgcgcggccaccaaagtttggcgttttttattttgatgtcccgcggcgaaagggtgaacatgtcggcgggcatttttctcgaccagactgtctccccgccgatagacaactttgcaagcaccgaaagctttccgagcagctcgcgcggcaatgcggttcttattcttgcgctgcatacggcctcgttattttttgggtctgtatagaccgtcataaagaaaatgtcatcaatgcgggcgggtttttgaatttcgatttttgcatcgcgccaaatacccgcgctcaacatgcgcggcattatgtcccagccgtacatgtggggcgcctttcttatcccttcggaatcgtatgccgaagatattgccccaatttttctcccgttcgattccattatcgccgaacgtattaaaatttccaaattgtttttaccgcccttcgacataaaatctgtgatgtcgaatgtatgcggtataagcatattcgatgtctctccgacttttttgccgtttacgaatatgtcggcaaacgtatcaattccgtcgagccgcagtatcgcgcgctcgccgctttcgagtttgggagacgcaaactcgcgcgagaaaagccattggtagccctcgtattcgcgcagtttgtatgagttgtcgcccaattccggattgggaaccagtccggccctaaaaagatccaattcgacattgccgggaacttgggctttgatcgtttttgcttcctgtgcattttttgcttcgccaagcgtcctgagcgcgccggtgtcgggctgcggccagaatttgagggaccattgaccgtttaagtccgttccgcccgcacttgacgatttttgtgagggcggcaccgtcccttcgcggctgccgaagaacagaaatattgcggctattgcggcaagtaccgccactgtttgcgggaatttttttataatatttttcatatatattcttcttaataataaagcctaatttgcttcttgcgagtttttttctcccgaaatgcaaaacgagcaccaaaccagatataggcagacgcaaaccattactgccaatgctgccgacacccctccatacactccctgcgcaaaagtcattacggggggtattgcggcgcctccggcaatccccgtagtcatcaatccggatatttcgttctctgaatccggcatttcattgagcgcgcgggaaaatacaacggagtatatcgacgatatcgaatatccgacaagccctattcccgcgaacgccgccatttcagattccgaaaatattgtaaatacaagcgcaaagattgcgagtattatgtgcatcttaaaatacgcgaaggagtcgattttcgaaagtatcgcggcccccgcaaaagttcccgccgttctgcacgcaaaatacacgctcggcgcgagcccgacccgccttacggaactttcgagcgacggatccagcccgagcttttccatgagaaccattggggaggccatattcattcccatgtcaagccccacaacggcgacaatcgcaaaaaacaatgcgagaattgtcctgttggaaagcagccccgcaacctttcctatggaggccgacccgcgctctggcggttccggtatatcggtaaaataaagccagattccaaaaagtattgttatcgccccgaaaatcggaaaaatccatctccatgagccgagaatttccgccgcaaagagcgcgataaacgggcctgcaaacgacgaaagcgcctttatggattgccccgcggacgccgcgctctggcggttccggtatatcggtaaaataaagccagattccaaaaagtattgttatcgccccgaaaatcggaaaaatccatctccatgagccgagaatttccgccgcaaagagcgcgataaacgggcctgcaaacgacgaaagcgcctttatggattgccccgcggacgccgcgctcgcgagcctttccggaacgacgcatgcggacaaaagcggcatcattgaaacttgcaaaataacgtttccaattccgagcagagcgaatccggcaacgcaaaaccaaatggagtcgaagcaaaatgcgagagccgcggaaagcgcggtaatcgcggcgcttaaaagcgccgtgttgcgcctgcctattttgcccatgagcactgccgaaggaatcgaaaatacgagaaaccataccaagacggccgacggcaaaaaaccaaaaaattcgtccggcaatgcgcctgaaaattccgcctttacatagcttgttgcaattcctgcaaaatcgacgaaccccataacgtagaatccgagaaatagcggcaggagtagctttgctgtttttgagcgcgccatattttttacctcccaaccctcgcttgggcttttcccaattcgtattgcgcaaccgaaagcgccgcgtagtcgcctacattttcgccgagttccgccgttaaaattttgcaggcattaagcgaagctccgagcgcctcgcggcggaggactttttcggcgtgcggccacagcaattcgcgcgaccttgagaatacgccgccaattattatcgcctgcgggtttattatatcgactatcaccgagagcccgagtccgagcatttttccgctttcttcataaatttcgatggcgaggctgtctccggtttccgccgcttgggcgaggctttttgcagtcatggaatcgagctttgcgaaatcttcgcatatcgcggggcgctcgcccatttgcagcttttccgtaattttctctctcgcgatttttgcgatgcctgcgccgctgcaaaagccttcaaacgacccgcgcttgccgtacccgacagggccgtattccgcaagcctgatgtggccgacttcgccggcgtttccattcgcgccggagtagagctcgccgtttaaaatgagccccgcgccaagccccgtgccgaaagtcagaaaaactatgtcgcgaagtcccctcccggcgccgaattgccattcggcgagcgcgcaggcgttggcgtcgttttgcagcccgcatggagatttaaatacttttacaatttcagaaactatgccgacattgtcccagccgggcaggttgggcgggctcaaaactaaaccgcgctcgctgtcgagtggccccccgcaggctatgcctattgcggatatctcctccgcgtcaaatctgttttcgcgcgcaagctcccatatagaggatataattttttgaattgccgcattgggggcgcggtttggggtggcaaaaattttcttggctaaaatgctcaaagtttcgccttccgtttcgccgagagaaacggcgcattttgtcccgcctatatctattcctattagccggctcatacaatctcctcaatagcatctataattgtgtgcaagattagtccgtgaatttcctgtattctcgccccgtcgtcggagggaaccacgaggcataggtctgatatttttgaacattcgccgccgccgcgccccgacaaaactaccgacgttatgccgagttctctcgctttttttacggccgcaatctggttggccgaatttccgcttgtagtaaaaatcaaaacggcgtcggatttcctcccgagggcttcaagctgccgtgaaaatacgctttcatagccgaagtcgttagcaatgcacgtaagcgccgcggcgtcagaatttaggcataccccccgtagcgggcggcggactgccttgtactttccggtaagctcctcggcaaagtgcattgcgtcggcggcgctgccgccgtttccgcaggtgaatatagttcctccgcctcttatgcagcttgcgagcgcagcgcatattttatcggcgctatcggcaagttcgcgcgttttttccgccgccgcgattagcgaatttaaatttgttttcaaatttcgcatacaagaatttattaaaaaaattttatccaaaatctcataaaacggcaaagaaattatttgacatgtagttgaataaaaagacatattttataagactaacgctttcctcgaacatgcagttgccatgagaaaaaaaaccgcaaaatacgcatgggataaaaaatccgattccgagctccagctctggcccgaaaccagcactgaacgctatatcactcgcccgttcgtaaacgcacgcgtcctcggcggaaaaagcggaaagcagccccttttttcatggccggaatttttggggatagatccgctcgaaaggtatgcaattctttccgccgcccgcacaaagcatctatcggattactaccagtcgcgggcgggggcggatttccatcttgtgctatacacggtaggaggcggggcggaattgtcgtacgagtctggaaaatctcctcttaccgcaaacactttcgcttttgtcccggcgggctgcccgtatgagctgaggtccctacgttcgggctgggaggttgtatggtttcatttgcgcccgcgcggaaggcgcggaaagtttgacaatattagggtggattcttcggaaaattgcgaaaagatatccggcatattcaaaatatacgaaagcgaaatttactctaaaaaaccgtcggtccaaattctcgagcccttggctgaggcgctttttctcataatctcccgcgatatatcgccagcttttaaaaaaagcggcgaagattttctcgacgctaaaattgcgaaggtaaaaaataccttgcataaaaattggacgatagcgtcggcatcaaagtttttcgggctacccccgcgtaagctcgacgagctttttaaaagaaaattctccgacacattttcaaaaacattgcttttttggcgcatgcaagaggcccgcaggctgctctccaccgatgcaacgcccctcgaaaaagtcgcggctaagacgggttatgccgacgccttttgcttatcaaaagcttttaagcgctatttcggcaaatccccaaaggcaaaataatttttgcgcctgcgcaaatttgcgcttggattgccttacgacgcttttgaactattttgacattgggttgatttttacacgcggagtagtcaagaaattgttgattgcgcctaaactttgctgtaccttgcttgcgatttaatcccgctttttgcggttagaattttatataataaaaaggtacagtctatgaaaaaagtaaaagtaatggttgtcggctgcggaaatatgggctcttcgcacgcccgcgcgtacgataaattggacgaattcgagattgttggaatcgtcgatgcaaatccgaaggctgtggaggctttcaacgcttccgtaggcaagcaatatccctatttttcggatttcgacgaagctctcgccaaggcatctcccgacgccgtagcaatctgcacttatcccgcctcccacgagccgctcgcagtaaaggccatggaagcaggctgccacgtttttgtggaaaaacccatttcatctactgttgaaggggcgatgagagtcgttgaatgcgcaaaaaaattaaataaaaaagtggtcgtcggatacattttgcgccaccacccgtcgtggataaaatttatagagcttgcgcatacgctcggaacgccgcttgtaatgcgcatgaacctaaaccagcagtcgcacggaaaaacttggcaggggcacaaaaatcttttgaagtcgctgacgcctattgtcgattgcggagtacattatgttgacgtcatgtgccagatgacgcgctctaagcccattcgcgtaagcggcataatggcaaatctaagccccgagctcacgcccgaccagcgcaattacggccaactgcaagtgactttcgaggacggctcggtcggctggtacgaggccggctggggcccgatgatgtcaacaaacgcattctttgtaaaggacgttataggtcccaaaggctgcgtctcgatatgcgcgaaaaacgcgggctcggaaaataagtcggacgacatagattcccacactaaaaccgaacagcttcgcttccattcgtccgagatgcttcccgacgggagctgggcccacgaggaccaatggatagatacgaaagacgagcctaagcacgacgacctctgcgcccgcgaacagctttatttctacaaggcaatagtagatgacactgatctcagcgaccacctctctgatgccgtaaacagcctcaaaatagtgcttgcggcggacgagtcggcccgcacgggaaagacgatagagctttaatgttttcttgaagctttaccacagcgcgcttttgtatcgcaaagcaagcgcgcaataaataaggcggcgaaaagccgccttttttatgtttcgtttcccatttgggggaaaggcttgcagaggtcaggggatttttttctttctattcgggcaaattgttttcctcccctaatcatgcgcttgcgggaggaaagcttgacgggttcggcgtccccttattgcgaagtgtttttccataacatagctatgcgcagggttggaaatcccagtatggcgcctttattataacttcgcgcttcccatgcaacagcaatgcacggtgcctaaaataaagtaaaaaaatttcagtttatagtggctgctttgacgattttttccctgttttcccggcatactccaaaagcaattgaggcttggcaaaagcaaaattacttggctgcttttattttgctttttatgaccgagagttgcctgtctatattgtcgagcagctgggcgagggtggaatcgcgcgatgttttaagagtctggcgcgtgattttcattatttcgtcggtctcgtctattttgcctttttttagaagggcgtttataatgggaattgtgatgccggttgctgacattgcggcgtcgcttttgaaaacattaagcaggcgcttgtaggaggtggcgagcttttcagcttcgccagaggcaatgtcgccttcaagctcagagcgggcgaatgacatcgcaatatcggggcgcgaggattttgtctttaatattatagaggttgaaagcttgcgggcttcgtcttcttttgaggccgcttttaatttcgatattagttcgcggcggaattcggcgtctatatcgggatatttaaaaaatgcctttaccgcctcgtcgagcgcggcgaagacttttctttcgtcgccgcttttttgcaaggcgtctattaatatcctccatgtttttgcgtttctcttgtcgagcgacaaggctttgcgcgccgacttctccgccgatgggtagtcgcccgatttgaagaatttttcggcgaaaatggtgtggagttcgttttcgcggtatttagctccgttcctaaaaccctctcggaggctttcaagatcgtggtccgaggctatttcccaggtctgggggtctattgttgtgccggtgacgtatcgcgcgccctcgtaccggcctatgccgaactcccagttcccgggctttttcattgcggcagtccacgcgtgaaatccgtccgatccggcgcccgtaaatatgaatgcagggactccgcgcgccttggcggcctcggacgcaaaatacgcctggtctgtgcatattccgcccgtttcgcgtatcgtctttaagcggtaatcggatccgtcccagtcgtactgctttgcggttattctcgaatagttgtaggcgacagaagagtaaagcttgcctatgtttgaggcgtttatggatatgctcttttgggcccactgcctgtcttcgctcgtggcgaggcttgcaacgagatattttagttcgtccagagacattctctcaaattgaaacagcaacctgccgcggtccctcgcggccttccattcggcaaacgcttccgaaggcgcgggaaatttgcgcggaaggtatttttcggaaacctgcgcgtgcggccatctctttggcgggggagtgtcgaacaccaaggctatggcgaacgcgagccgcggatattttctaaagctatcggggtcggacttatagatatcgataattgcgccggcaacttttgaagcgtcgtcctttggggaaatcgtggagaaaaaatccgagagcagttcgggcgacgcgagcatatattccgcaagctcccttggtacatccggcgcgtttgcgccaaaaaatccaaaaaacttggcggcgaagtacgatgccgcggcgtcggtaaacttattttcggcatacaatttttctgtgcggctttcaaaatcggcggcgcactttttgaaatccgggttggcggacataaattctgccgcggacttcgcgtcgaacggagcattggcactctcggcggcgtacgagggtaaaattgcaaattcagcctgcagcgcggcaatcccaaaaccgcagatcattaaaacttttcttatgcgctccatttgacaaatttatgcccatttactgccatatccaagttttttttcgaaaattcccgcttttcttcaataaattaccggacgattttaaaaatgctcgacactcttatgcttttcataaaaatatcgttgtatcgaaaataaatatatttaggctcatataagtgaaaaacaaagtaatattcctctgcacgggcaatatatgccgttccccaatgggagaggctctcctaaaacacgccatagccgcgcgcccgaaaacctccccaatacacagtctcgaaatagtatccgccggcacttccgccgttgacggcatgccgccgagcgcaaattcggtctcagccctcgtgagagtaggcatcgatattagctcgtacagggccacatcgcttacccagagtatgctcgacgaatgctatgcgctttttgcaatgagccgctcgcaccttgaagaagtcaaaaatttctataaaaatccgccggagcggatgtttactgtctgccaaatgattccggactgccagcacccggatatcccggacccgtacggcggcacgctctcggaatacatcgaagtccgcgacgaaattgcaagggccattccgcacatagtaaaatatcttgaacatgagctcaaaaaaaattcttagcatagcttccgaccacggaggcttcgccctaaaaagcgcaatattaaaagatctttcgggcgaatattgcgaatttatcgacaggggccccgaaacttccgaaagcgtcgactatccggatttcgccaaactcgtgtgcgacgacgtaaactccgggcgggcttcactcggcgtattgatatgcacttcgggcataggaatgtcgattgccgcaaataaaatacgcggaatacgcgcggcgctctgcctctcggaagatgccgcaaaattttcgcgcctgcacaacaatgccaacgtcgtttgcttgggggcaaaatatctgacgcccactctcgcggagtcgatagtgaagatattttcctccactgaattcgagggcgggcgccacgaacgcagggtttgcaaaatgatggattttgaaaatttgtagaattaaaataggcaaaggagtttttattaccgtctttgtgttgacaaaaagcgcgagtaagtgcgaaatagggaaaattttttattatgaataaggcgattcaggcaggctcattaaaagaaattgacagggaggtcttcgacgcaatccgcaacgaaaccaaccgtcagcaaacgcatatcgagctcatagcgtcggaaaacttcgtaattccggcggtcatggaggcaatgggctcgactcttacaaacaaatatgcggaaggctacccgggcaagaggtattacggcggctgcgagttcgtggacgtcgtggaacagctcgcaatcgacagggcaaagaagcttttcggagttaaatttgcgaatgtccagccacactccggctcgcaggcaaatactgcggtctatgcggctgtcctcaaaccgggcgacaaaattttaaccatgagcctcgaacacggcggccacctcacccacggccaccccaaaaacctttcgggaatgctctttaacgtggtgaactacggcgtcaatatcgacactggctttatcgattacgacaagcttgaagaaattgcgctcgccgaaaaacctaatctcatcacggtcggtgcgtcggcgtatccccgcaaaatcgactttgagagaatgggcaagattgccaaggagtgcggcgcgcttcttatggcggacatagcgcacatcgcgggcttggtcgccgctgggctgcatccgtcgcccgttccgtactgcgactttgtcacaacaacaacccacaagactttgaggggcccgcgcggagggctcattatgacaaacgacgaggcgctcgccaaagccatagactcggccatatttcccggcattcagggcggcccgctaatgcatgtgatagcaggcaaggcggtgtgcttcggagaagccctaaaagattcttttaaggaatatcaggcgcagattgtaaaaaatgcagccgccctcgcggaagcgctcaaaaagcgcggctacgggcttgtctcgggaggcacagacaaccacttgatcctaatcgacctccgcaagagccacccggatctcaccggaaaggacgcccaaaacgccctcgacaaggccaatatcacgacaaataaaaacacggttccgggcgagacgcgctcgccgttcaaggcaagcggtataaggctcggcacgcccgccgtcacgagccgcggaatggtggaggcggatatggagaaaatcgctgaggcgatagatatggttctaagcaacccctacgacgaatcgcagattgcaaaggccaaggaaatcgccttggagctttgcaaaacgcatcccctcccgtattaatccgtccgccgaatccgtcttgagcggcggattcgcaggaattttttagcaatcggcggacggtttttatcgtccgcttttttttataaaaaacgaatattgccgaaccgccgacgcgttggcggtctgtaaaaaacccgcatagataaaatttatggaagataaaattcaacaccttagaaatctcgtttcagaggtttcggataaaataatggagagttcgtccgcgaatattttgtcgtggatagaccatggctttcttcccgaatgggcgatagacgcgcttacggagcttatcgaagccgggcgctacgatgaaattaacgacagattttttagattcctcgcatttggaacaggcggcatgcgcgggcgcaccatcggaaaagtcccggctatggccgagcttggaaggcagtcggagcagggaactcccgagcacgcggctgtcggcacaaacaatatgaacgactttaatgtcatacgcgccacgatgggtctttttaactattgcaaatcgtacctcgcatcctctgggggcggaactccgcggctcgttgtggcttacgatgttcgccacttctccaagagattcggcgagctcgcggcgtcggtgtgggcgcgcctcggaggcgaggcgtttatattcgattccccgcgctctacgccacagctttccttctctgtacgcaggctcaaaactacggctggaatcgtcattacggcctcccacaacccgccttacgacaacggctacaaagtctatttctcggacggcgcacaggcaataagcccccacgccgagggcattgttgccgaggtggaaaaagtcgaatggaaagaagtggacaaatttctcgaacctgatatgtccggcgtaaaaaatgtccctgccgaagctgaggcggattatattaagtctatcgaaaattgcgtggtggactctgaaacgctttcgaagcacaagccgaaagtcgtttacacttccgtccacggaacgggggtgactatgtgcccggcggtaatgcgccacttcggtctcgacccgtattttgtcgagccacaaatgaagatggactcccgcttcccgactgtaaggcagccaaaccccgagtatgccgacaccctcgcaatgggaatccaaaaaatgcgcgaaacaggcgcagaatgcctaatggctacggatcccgacgccgaccgcatgggggtggcaatccgcacgcgctccggggaaatccgcctattaaccggaaatatgattggctcgctgctcgccgagtaccgcatatcgcgaatgattgaaaaggggctgattacaaatcccgccaaatgcgcaattataaaaacttttgtcacgacgcccctgcaagataaaatcgcgcagtcgtacggtgtaaagtgcataaatacgctcaccggcttcaaatggataggcggaaggctcgagcactaccgcaaagagctcgaaaaagccataggcggctcggcggactcgatgtcttacgcggaaagggcaaagctcgcacagcagtattcgacattcttcgtattcggaggcgaggagagctacggatatctcggcaccgacctcgtccgcgacaaagacgcgaatgcggcagtcattatgttctgcgaaatgctcggatatttgaagtcaaagggaatgacggtcgacgaatatctcgataaaatttacctcaaatgcggatattacctcgaaagcctccgcagcgtttaccgcgaaggggcttcgggcgccaagcaaatacaggactttttggcaaagcttggagagtctccgctcgaatcggttggcggagtaaaagtggcaaaatctgtaaactttgcaaaagacgtaatattcgacgcggacggcatacgcattcctccggaaaaattctatttttacacgttggaaaacggatacagtttcgcagtccgcggaagcggcaccgaacctaaaataaaattctatgcgtttgcccacgaaaaagcggaaaatccagaagaactcgtcgaagccaaaaagagggcgaaaagcgagctcgacaaaattcttgacgacctcgaagcgcacttctaacaaagccgcgaatgaaggctcggacgccgcgcttgtgcagttgagaaaaaaactggctgatgcggcggagcccgagtataggcggtttgcgtcggccctgttgccgggcgttgagggcgtactcggggttaggcttggaacacttaggcgtctcgcgcgcgaaagcgcgtcgagggggcgcccggagtttccccgaacgggcggacttggcgcatcttttgaagaaaaaatggtagaggggctttcaatcggctattcgcattttccggaagccgatatgtttaggctcatcgccgaatttgtcgaaaaaatcgataattggtccgtctgcgacagtttctgctcgactcttaaatttatgcgggcaaaccctgccgcgtgggattttatcaagccgtacttcctggcgaaaggcgagttccccgcgcgctttgcgagggtttgcttcctgctctactttatagacgccgagcatgttgacgagggtttaaaactttgttctgtgctaagtacgcgcgcaaaatatgcggttgcggcgacagcttgggcagtcgcggaatgctcggcgaagtttcctgaaaaggcgttggatttcctcaaaagctcggattcgcaaataaagtcggcggcagtgcgaaaaatatgcgaatccctaaaaattcccccggaatataaatcggcggtgaaatctttgtagtgggcattcgcctatttttagaggcgctaaaaaggatttttttcgcttaattttattcagcgttttgggcgcaaaattaagaagtgaaaaagtgcggctgcgcgaaatccggcaatgcaggtttgcgcgtaaatacccagctattgcacggaggattctggcaggcgctttgctatgattttatctatgcgcgcgccgtccatatccactacttcaagttcaaatccgttccattccgccttttctccagctttcggaatgcgctttaatagggcgagcaccagaccgccgaccgtgttgcaagtctgggtttggtcttccaatccaaaaaatatcaaaaagtcgtggaaggggcattggccgtcaacgagaaaactgccgtcggagcgctgcactatgtccatttcctcgttggcttcgggcatatcgccgaggacggcgtctattatgtcgtttagcgtcactattccaagggtcacgccaaattcgttggatattatggcgttttttaggcgcaactcgcgcatctgttcaagcgcgttgtaaacctttgtgtcctccttaaaataatggacgggcttgatggcggattttatggagaaatccttttcgtcaagccttccgaaaagatcctctatggatacagtcccgagaatttcatccagcgacccatctattacgggatataccgtgtgcggagacttgcgtatgagttcgcctatttcacggtttgaaagagatatgtctatttttacaatatcgtttcgcggggtcattatcgattcgacaaacctgtcgccgagggaaaataccctctcaacaaggtttctttcaacgggctgaacctctcctcccgcttcggcctcttctacgagagattttatctcgcgctctgtgacggtattttttatttggctgattcccagcaagtttaagacggccgagctcgatttgctcaaaatccacacaaaaggcgccgtcgcctttgatagcgccgtcatgggggctgcgattatcttggcgaccctctcaggcgcggcgagcccaattcgctttggcacgagctccccaaatatcagcgtaaggtatgtcgccgccagcactatcacgccctgcgcgctcagtaccgcccatttttgcggaatcccaatttcagccaactgttcgccgaatttaccggcgagggcgtcgccggaatatatgccggttaggattccaattagcgtaattcctatttgtacggttgaaaaaaatctatcgggattttccgccaaagccagcgcctcttttgccgatttgcttccgttttttgcgtccagagcgagattcgacttcctcagcgagactagcgcaatctccgacattgccaggataccgtttgatataattagtgcagcgattatgacaaattccatattttgccgccttataataattccgcgtattttccagtcaacaactaaaaaggcgcgctgaaaccttgaccttttatgcgcaaattacgatattgtgcagtatggacgtaaaaagagaaatatccgaagatttgcccctcggcggatttgcggcggcggtaggagggtatgcgcgcaagcctctggatttaaatgaattgcttgtgcgcaatccgccggcgactttctttgcgagaatgtccggcgacgatatgacgggaatgggtatcggaagcggcgacatattggtggtggatcgctctgcggatcccaaagacggagacatcgttgttctttacgaggaaaacgagtttctggcaaggcgcatacgcggtgttaaagacgggaaaatcattctcgaatccgacgacgggagggcagggaaaaagacgatttccccgcgcgggaatctcgatatattcggcgtggtgacagcctgcataaaaaagtttaggtgatatggtagggcttgttgacggaaataacttttttgtttcgtgcgagagagtttttgaccgttcgctcgtcggcaagcctgttgcggtattgtccaacaacgacggctgcgtggtttcgcgctcaaacgaatttaaggctctcgggatagcgatgggcacgccgtacttccagttgcgaccgcgcgtgcggcagctcggaatcattttgaaatcgagcaatttcgagctgtatgctgacatgtcgaaacggctaatgtgcgtgcttggcgaggcgtttggtgatatagaacagtattctatagatgaggcttttgtctttccgcccaaaaggccagatttgtttgaatacgcactggctgcccgcgcgcgcatactaaaaaatattggaataccatgcgggattggctttgcgccgactaaaactctcgcaaaaatcgcaaaccacatagggaaaaaaagcgaaggcggagtttttgtaatgccggaaaaaaacggagaaatcctaaaaaaaattcccgtcggcgaggtttggggcgtaggccgccgtctcgggcccaaacttgagcgcgatagaattttgacagctttagatttggcggaatatccggaggataggctccgcaagaaatatggcgtgactctcgtgcggactgccttggagttgcggggaatagattgctcctcgcatttgcgcgattctggggatttttcgcaaagcatagcgtattcgaggtgttttggcgaacccattagggattttgattctctatcggagtcggttgcgtactatttgggaagggcggcggaaaagctccgcgccgaggggcagcgcgcgggaggagccggagtttacttcgtgtattatccggagtattctccgcggaaacttgagggcggagtagcttcggcaaatgtggtatttccgagggcgacagacgatacgtcggaaatgctaaaatatgttttggcgaaacttcctgatattttcttggagggcaggcgatacaagaagagcggagtcaccttatggggactcgaaaacggagccgtccagggagagctatttgagccttcaccgcaaaaaagcaaactatattcgtcaatcgacaaaattaataaaaaattcggcaagggcacgcttttcccgcttgcggaaggtatcgacaaaaagtggaaaatgcggcgcgatatgctaagcagggcttatacaacttcttggaaagatataatttccgtccgataaattttgcccctaaaatgcaaaacattatatcggattttaaaacagtagtattgttaaatacttatatgaaaaaaaatgcataaaaatgcttgaaatatattttttatatgctacaaagtctgcataattttataggaaaaaatggcagatataaaaaatgtattatacgaagaaatccgcaggctcgcccgcaaagaggtaaagctggcggtcgcgcccttgcaagcgaaaatagttgaactgcgcaaaaccatctcggctttgtcgaagaaagtcaaatgcgcaccttctgcgccctccgcagaagtttcaaaagattccgatgaaaataccgacggtagaaagtcgaaatcttttaggtttaaagcggcagctatcaaaaaattgagggctaaattcgacgtgtcgcaggcggaatttgccaagcttgtcggggtgagcacactgaccgtaagctgctgggaacttggcaaaacttcgccgcgcgccggcgccaaagaaaggcttgcgcagttgcgctcaatgggcaaacgcgaaatagctaaaatgaacaagcaaactcccaaagctccggaagagcctgtcgctcccgaagaaaaataatgcaatttatggcgctgcgctatatgcgcggcgctttttttttgcttatttttgccgtattttgagaattggaaaaaatttttcggaaggttttattaccgcaatattgcgcgccggttactgcgattttgtgcgccttgctagcttccgacttttagttatgtaatttaaggcaatatataaaaattgcggaaaatacggtttagttaatgactgtctgtaatagggtttattctctaattaaaatattaattggaagaatggaggacgtcggaataatagagagttgagaaggggattttctactcttatatataaatatacgttttttttaatgcgtattatctgggctctggctaatcttttttctcattggacggctatgttcaatgctggctgttggagtcatacaaaaaaatccgccgctttatacgtgtgcggcggatataaaaattatctcattctgggtcttgaaaccggccgcggcggcggtgcagggcgcgagatctgggggcgcggcattacaattaccgcgggtgagcggggcgagtatggatgcattctgtgccttccggtcgggattaccctcaccccattattgtttattattaaaataggtctgcttgcccctatgcaagggcgtaaaggtctgaaatgcggtttcattattgcccctgtgactatcgtttgggagacaaccggctcttcctcgtattgcgaatttccgggcacgagcattatgctgtctttccaaacagtctttttgttctgcactatttccagctgcattgagtaagccaaggctttctcgttgccaatcattactgacgaattgtctatcgaaccctttaatataagtccgttaaaatttgccgggaagggctcgtccgagctttgccgctcgcattcaatattgtcgtcttccaataattcgcaaagtctgtcctctataaatttgtgttcgttgccgtttgtcaggttgttttttattccgtcaaaatatatttttttgtttccgccgtcgggggaaatcagcgcatcggctttaacaagcgattcacagagggcgtctatgcctgctatccattcttctcgcgatacggatttatttggggttgccgcatccttcattgcctctatcaagtctgaatttattgaagcatttacatgcgggcataaaattgctgcgcataaaaggcaagcggcggttgttatagtttttctcatatttttccctccaatttattataaaacaaatttgccgtatttgtttcaatattttttttataactttgttcatgcgcaatatgggtgtggcttttatctgcgatgtctttattgcaaagaacatttttgaaattgatgcgtcgattttagtgcgtaacaattttgtaatgaatcgcgcgcatataatgtgttttcttggcagtaaaatttcttttttaagtggggttgtcggattttgcctcgttatctctacttaacgtttatacttgcaatatttggcgggcgcaaattttggaattttgtcttttatctgtaagttcgctaaaaaaacattttcgtgaagtatatttattgcccttcgttgcgacaattttgtagcgaatatttgccttactacaaaattgaagtatttttcttgcgctaaaatcaagaagtttatttttgtaattaacttattataaatatattaaataaaaattacaaaactggcacgcgttctgctgtacattttttaccaaccaaaactcacaatgaaactaatcatagcatacataaagcctgaacaattgggtgacgtgaagaaggaactcttcaagaaccaaatttacaggatttcggctacaaattccctcggatgcggaaggcaaagaggttatagcgaaaactatcgcggaaacgagatagaggtaaacctcctgaaaaaagtccgccttgaaatagcagtcaacgacgaatttgtcgacctgactatcgactctattataaaaggcgcccatacggaccacatcggcgacggtaagattttcgttttaaatcttgaacagtgcatacgcgttcgcacgcgggaaactggccccgacgcaatcggttaatatgtgatttttctaatcggagtttactactatgaataagatatttctctcaacattagccgcgactacggcggcattgccacttgcggccgaagaagctgcaaaggcagccgaaccggccgcagccgccgcagccgcagcagccactaaggcggcgtcggtaagcgcggaaatgtttactataaacaacctctggatactgctcggcgcggttctggttttcgcaatgcacccgggcttcgcgctcgtcgaaaccggtctttccagagctaaaaacagcgtaaacattctggcaaagaatgtcattaccgtggcaatcggcttgattacctacctaatcataggtttcaatctgatgtaccccggagatagctggattctcggacacttcctcggattcggcggattcggtctatcctgcccggaaggcgacgccggcgcaatcgcatacaacggcgggctttactcctactggacagacttcatcttccaaggaatgttcgccgctaccgctgtgactatcgtatccggcgcagttgcagagcgcattaagtttagagcctacataatcttcgcaatcctatatgcggctttcgggtacaccctcatcggctcctggggctggggcggcggctggcttaaagagctcggcttctacgacctcgcaggttcgacattcgttcattcggtcggcggttgggctgctctcgtgggcgcgatactcgtaggcccgagaatcggcaagtacatcaacggcaaggctcacgctatacccggcagcaacctcggtttcgcaaccctcggcgtattgctactgtggttcggatggttcggattcaacggcgcttctgtattctcggctgacccgattatggttgcgtatgtattcactactactgccctctcggctgcattcggacttatggcggctatgttcacctcttggactacccaaagaaagcctgatttgtccatgatcctcaacggttgcctcgcgggtcttgtgggtataacggcaggtgcggattgcgtgtcaatcacttcggcttgcgtaatcggaactatatccggcatcgcggttgtgttcgcagtttacttcttcgacaagatctgtgttgacgacccggttggcgccctttcggttcacctcgtgtgcggcgtatggggtactctggcagtcggtatattctcgcctgaccacgcgtttatgccgcaacttatcggagtaatcgcagtggctgtcgcaagcatcgttatcagctccataatattcctagctatgaagtatactatgggcataagggtctcccgcagcgacgaactcagaggcttggatatctccgaacacggtatggaagcatacaacgggttccaaatcttctcgaacgaatagttcagtcaattccgcaagtccgcttagtacgggcttgcggttcttcttgacaaggattggaaaaaaacaattttaatcaacttactaaccaaaacaaaacgaaaatgcaaaacaaactaatcatatcaatcgtagcaatattcgcttctgctgccgcgacttttgcagcggaagccgcagcggctgctccggcggcacagggcgcttcctgcccggcgggcgcgcaatgcgcacagaaagaggtgaatacgctcatcgaaaatgaattgttttcaaaaccgtttgaaaacttttctgcttccgcaacgatggcttatgaatcggaatacatcttccgcggtaaggctcagtcaggccacggcgtaaacccgatggtagacctcggatacgacttgggaagcggatttgccgcctacgcgcagtattggggattttatggcgtagataatagcttcggcgaaaacgatttttatgccggaattacttacaccattgaaaatatcacttttgatgtcggatacttgggatacacttacaccagcagcgattccaaaaatgaaagcgaaataatggtgcaagtttcctatgacacaaccgatttgctcggagacttcaatgtttcgccgtacgccgctttctactataactacacttatagcggaacgactgttgaaggcggtctttcttatgaagcccctgttacgaaatggctcatcgacgaaaattggggatttgtcaatctcgcggcttatgttggctacgccgactatcgcggcggactcacatacggcgggtacgtttacaccggcatttctgccgacgcggttgtgcaagtgaccgacaacatggcaatttccgccggtatccgttgggcatgcaacaacgacggcgatgccaatgcagacggcaaagaacagaacctctggttcggcactgccgttgtattcggcttctaattgcagctcaagtgcaaacgcaagctctgcgggctctataaagccactcgcagggcaatgcgcaaagtctaaaataaaagcggaatctcaaaacggttccgctttttttgtatttatatctcttaaccctaaactatggattgattggtataaaagccccaaaattcttttacgcgcgtaaaaatttcttaaatctaagctcaatttgcgcggcgcaaaaattttaaaggctttttttttcgtatcaaagatttctataccaagaaagattcggttagcaaagcaggggggagggcgactattgagggcagaggcccgcagacttaaaatctccaagtggcggaaaattgccgcatgcaataatcgtgtaaatattcaaaaagcaaaaaacgcaacccgcctcagtgcaatacaacttcgcgcgtcagcggttttcgtcagcgcagcttgcaaaaaacattcccaattttttcaggaattagagcgtttttacatattcttcgaggtcgcggagatcgtcgtctgttaggtgggacgtgtggccgtgtttatcgtccttgttgtagagcttaaacatctcaaaaattgttttagctctgccgtcgtaaaggtatggggctgtccgccatacttcgcacagcgtcggagtgtcgaacgcaaaacctttgtattcttcaagccccgaaccaacatcgtggcgcttcatgtcagtgtagtatttgcccgtgtggcatacggagcattttgcttcctcaaaaacaacttgcccgcgcaatgcggcgtctgaaagctctccgttttttatgtgcgggctttcaacggcgcgcagagagctcaaatatttgtcgattgcctttgcgtcggactcggggcggcgcgtaaattgtatgtattgtatccccttgcggactgcaatattcgcgtttttgcgaacggccgttatcattgaaggcggcgtaaaatgcgcgtagagcattgattttgactgcttggggttgccgatgccgtcgtttagcaagtcccagttcaacgcgtcggagcgcacttccgtgtggcatgtagcgcaggacagccattgttggaagcacaggcggccgtcgtggtaaaacagatcgcctttcctaacctcgttcaaattctcgttgccgcctattgctattttttttgcggaggaatcgccaaagtctatctcggcgaggatgtcggaatagtataggccgacaatcgcgcgttcattgtccgcgtctatatggcgcgggccgctgccgggcattgctatccttttgcgtatattggataaaaatgcgagatcgttgcatatgtcgtcaaaaactttttttgagtccgggtttgcggcgtatttctctgccagccgtttttcgagtgcgggcaaatctatgaggcttacttcgtgtgtccctgcgtgggtgacgagcagttttgagccgtcgggtgtaaatgcaagcccgtaggggttcgccgcgcccaattcgatgtcatctaacaggaatgtggcgtagagagtgtttttttgagtgtcaaccaaacttacggcgttggtgtttatccagcctctttctacttgcgtcgtggggacattgaagcgtgccaccacatgggttaagtacgcaaactttccgctcggcgacacttttatatcttgcgcgtttatcgagccgtttggaaggtctatttttgcgagcgttttgagcgtctttgcgtcgaaaaccgatactgccgcgccgatattttcttcataaagtccgcctttggattcgggcaactggtttgccgcaaaaagttttgagccgtccttggaaagcgccagggagaacggatcgcgcacggcttttccccgggttttttctttcagcgttttagaatcgaacgcgcggacgacattttcaaactggttcgcaaaatatagagttttcccgtcggcggaaattataaccgcgcgcggcatgtgcccgacgggcgcgcgttcggctattttagaatctccgagagaaattttcaaaatttcgcctttgggagctgctattgtcacatacgcaaacttcccgtccggcgaaacggctatgcccgacgggtgccctccaagctctatccgcgactcgaccgccttagtttccggatttattttgaggagctcgtcgccggtgcggcatgctaccaataaccccgcttttttgtcgagctttacgaaatcggggctcagatatttttccccataatcgggtatatcgccgtaaacagagggattcggattatcttgcgcggcagccgttagaattacaactgcaaacgccaacaatggaattagttttttcataaatcttgcatgcatttatatggtttgggagcggtgactttatcccagtattttttgtcacattcaaaggcattgaaattatcaaaattgtcgcccttgattatgccgtaccttttcattgccttcaggtacgctcctttgggcttgtaattcggggagtcgtagcgcggattttgcgtttcaacatagttttttgccttatttatggcttttaatattgtttggtagcggacgtcgtcgcgcgaagtgaatataacggggtgctgcccgtcgccggcgcgcccgcccgcttttgccgacagcggcgcattcaagacagccgagttttcggggtatgtcaaattaaacacagctcccgccgacaacctccgtctcggatcatttttacccttcacataaaaggtgaaatgccagttgagctgctcgcgggaatccttgcttatcatgttgggtaggcgcttttgcccgctatggcacgacgcgcaattctttttgaacacgtcgttcatttcggcgatttccttccagccggcgtcgcggttgacaaacctgtttagatagtagctgccaagcatgccggattcggcggctgctatgctcccagcatgcagggcgccggtatcgagccatactttaacgaggtttaattcttcgtctgtcgcgcgcttggcgtggtgcttgccctcaaatttttttatgagcttgctcgatcccgaaccaaattgataaggcggcatatttccgttccggttgaagccgtcaactatttggtccgccatgtagagctcgtagtagctgcgggcgaacatcggccccattccaggagtcaagtctattttgccggcaaacttttgcggattgtggcattctgtgcaatacttgtccaaaagcggctgtatgtcgcgcacaaagtcggggacttctccgcatttcacgccgggtattggcgcaagcttgtcggcggggcggcgcagggcttttagcttgtgcattatcggcggcggggccatgtccctctgctcgtggcagcctatgcatgatgttgtagttcccggggcgaagtttacaaagctctgcatcttttttatggcctttccttcggcgtca

SEQ ID NO: 99 - DNA, 9364 bp, Unknown
  16S sequences of unknown bacteria
actccctgcttcattggggtcttcgtaccggcctgcgcttcgctggcccggtatttcggggcttcgaagggcttacttcgcgctgcttcgcgcacagcgcgcgcgcttcgtgcgcccccttgattccaaggggagccttttggcgcggcgcagccgcgacagaaggattgaccaaaggggcgcacgcaggccgtctgtggcgggatcattctctctcgcgcagcagcaccttgctatccgggcaaaccgatcacctctcccgacagggcgcttaccaggcaggtgatttgggactggtcgttttcgcggacaaacacgccctggaattcccagatgggcaacaggcgcacgtgcgccgcgtcattttcgcgcacttcggccatatagcacagccgcacacggctgaattccccctcgccgtacagttccagagaggaacgcacatcctccgaattggccaggctcagcgccgccgcgcggtaggaaatcagcgcttgcggttccccactagactttggcatatacggcgaaaacagggtgagcctttccacgcccgcgggcgagagcacggcttctgtgcacagagacgaccagtgcgccccataccagagggaataactggccgatagcggcaggccgttgaccacctgctcaaaggtcagcacataggcgatttcatcatcggcttctacgccaggcagtacccggcccgcgaaatctttgcccagggcggcgtaattccccgtttcctcttccacacgtgcgatgtactgcgcgccgttaacggaatacgcgccgctgcattgcatctggaggccgagtcccgtcgcgcggatcagctcgtccacccgccgcgccgcttcttcgcgcgaggcaaactgaaaatcctcttcgccaaaatgcccgcggttgctggcaaagagccaatcggtgtagggcgaatccttgacgtagagagtctggttcgagtatccctgcacacgcaggaatctgccctcgcccaacgcgtagccacaagagtagtagtattgcgtgtcctcgtcctccagcatggcgggcacgccgaaatacgcgcccaagttctgtgccagggcttcgtgcccgctggcgggatcccagtacgcgccctcgatcacgggcgcttcggtgatggtggtatccaccatggcgtgaaagcgcatgccgttgatttcctcctggaaagcgaccaggccttcttcctccgccaggctggtggaagccagcaggcacagcgccagcagggcgcaaagcgctttggacaactttagcatctctttctctcctctctctatggatgtttgttgcatttcccggcgatgctcaatccgcgtctacgaccaccgtgaacggttgaccggcaatttcgcccgtgatggcgttcacaaaatacgtcatgcgcagcaggcttttgccgccacccgacgcttcgcgggaaaagacgcccgaaaactcccacgcgggtacgagccgcacgctttccgccgccgagctttgcgggatttcctccacaaagcacaggcgcacctggtcgaattcgccctcccattcgcgcgggtgctcgtcccactgggaaaaccgcagcgccgcgtcgcggtaagaaatcagcggctgcgcctctccaatggattgcgccacaaacggcaggggattcaggcacagggaatcgacgcccgcgggcgtgaagatggcttctgaggtggatgtgccagcgaggggaacgccgccgatggtttgctcaaaggaaaggacataggcgatctcgtcgttggcgctcacgccgggcaaaaccgcgttttgaaaggattttcccagccgcgcataggtatcctttgtgcggttcaccagcgcgagatattgcgcgccgcgcacggaagcgatgtccttgatggcaaaatcggccggtatgcccgtggcgtgcgccaaatcgttcaactgccgcgcgatttcggcataggaagcaaaggacagttcctcctcccccagatccgcggcgttctccggggaaagatagggatcgtagggcgaatccacggtatagaggttcatgttgttgcccgattgcacgaagagccggcgggtttcgcccagcgcgtaggtaaacaggctgtggctcccggagcggctttccgcttccagcgcggcgggcacgccgaaatgcgcgcccaggttttgcgccagggaatcgtatccattggcgggatcccagtacgcgccctcgatcacgggcgcttcggtgatggtggtatccaccatggcgtgaaagcgcatgccgttgatttcctcctggaaagcgaccaggcctccggtttcttcttccgccaggctgggagacgccagcaacaggcacagcgccagcaagactttgccggcacggcaatttttcttttgcataccaaatcctccttaacaagccgctttatttctttagacgaaattcgcttagaaaaaattcgatcccctttttattttgcggaaatgttacaaatattaaatcctggggagcgggttgacaggagcaactgtatacagtatgattacagtacgaatgcgaccccgcaattttattctgtggaggatatgacgatgaagaaaaccgcatggctcgcgtttgcgctggcactggcgctcgcgctgaatggactggccctggcgcagggcgcgcaggcagcccccatcacggcggcggaagccgtggaacgcttcaatggcggcacatacagcgcgtttgtggacgtgcgcgcccaggctgattacgacgccgggcacattcccacggcggtgaacctgccgctggagcaattggcgcaggccgctgctgaggcgctgccggacgcggcgcaggaactgtacgtctatggcggcagcgcggaggaaagcgcgcaggcggcgcaggcgctgtgcgatttgggctacagcgcggtttacgacctgggcagcctagccgattggccctatgaaaccatcaccaccgagaaggagaacgcgccgtttttgggcctgttcaccgctacggatatcgacggcaatcccgtggaccaaacgctgtttgcggattacaagctcacgatgatcaacgtgtgggccacctattgctccccctgcatcaacgaaatgcccgatctgggccgcttgcacgcggacatggcggcggagggcgtgcagattgtgggcctggtgagcgacgcgctcgattccagcggcaacatttcgcaaagccaggtggatctcgcgcgcgacatcattgaggccacgggcgcgaactacccgcacatgttgccctcgcaggatctgatcagcaccgtgctctggcaagtgacggcggtgcccaccaccatctttgtggaccacaccggcgaactcgtggggtacgcctacgcgggctcgcgcagctacgaccagtggactgccatcatctacgatacgctctccttgctagaggacgcctcagaagaaacgagtgaacccgcggaagaatccgcggacgccgcgggcgaggcggaagcgtaatggcgcggcgggagggcggcgctacgcgggaaaaaaggcgcattctgctggccagcgcgctgtgcgcgctgggcgtagccttcatgggcctgggcatctggcgcggcgaggtggaaaccgtgatccgcaaggcgattaacgtgtgtttggagtgcattggcattggttaaatggatcaaaaaacgcgcgcggctgctggcgcaaatcggctttgccgccatcaccaacggatacttccccggctttgcccggggaacgatttataagggcaattccaaggccgtctgcgtgcctgggctgaactgctattcctgcccgggcgcgctgggctcctgccccatcggcgcgctgcaagccaccctgggcgaccggaactaccatttcgctttttacgtggtgggctttttgctggtggtgggcgcggtgctgggccgctttgtgtgcggctggctgtgcccctttggcctggtgcaggatctgctggccaagatccccttccccaaaaagaaactgcgccgcctgcctggggacgcgattttgcgctatctgaaatacttcatcctgctggttttcgtattgatcctgcccatgttcgcggtgaacatcgtgggccagggttcgccgtggttctgccagtacatatgcccgtccggcacgctgatggccgggctgccgctctacgcgctcaacgagagcctgcgcagcgcggcgggctttctgtacgcctggaaggtgggcatcctggtggcgctggtcgtgctttcgctcttcgtgtaccggcccttctgccgctacctgtgcccgctgggcgcgatttatggactgttcaaccccatcgccttttaccgcatccgcatcgacgcggaaaagtgtacgcattgcggggcctgcacgcgcgcctgccccatgaacgtgcccgtggaaacttcgcccaaccatccggagtgcatccgctgcggcgcgtgccagcaggcgtgccagttcggcgcgctctccatgggctttgcccgcaaaaagcggacagcccccgcaaaggaggccgcgcatgaacgctgaatttgccgtggccgtgcatagcctggtgtttctcgcccggcggggcggcacgtccaccagcgaggagatcgcgcgcagcgtgtgtacgcatccggcgcgcgtgcgcaaggtgctttcgcggctgaaaaaggcgcaattggtttcctcgcgcgaggggcatcaggacggcggctatgccgctatgcgcgcggcggaagatgtaaccttgctggatgtgttaaacgcgctggaaacgcgcgtggtgccgcccatccgcccctgcgcggatagcgacccggattgcctgatcgcttcgggcatggcgggcgcgatggagcggctcaccggccggctggatgacctgtgccgcggcgagctggcccgcgtctccctggcggatgtgcaaaaggaaatttttgattcgctgaaggacggggacaacccctcagtcggctccgccgacagctcccctttgggaaagggcaacccctcagtcggctccgccgacagctcccctttgggaaaggggagccttttggatagtggtactatcgtatgaaggtgcactgtccaaaagcctcccgtaatgcctcccttttttaaaagggaggtggcgcggcgtagccgcgacggagggattgaccaaagggaggtggcgcggcgcagccgcgacggagggattgagaaccattgcggaggaaccatgccattcacacaggaacaacgcgcggccatagaatcgcgcggagaaaatttgctggtcgcggcggcggccggttcgggcaaaaccacggtgctggtggagcgcgtgatgcaattgctggccgagggcgcgaacatcgacgagatgctcatcgtcacgttcacgcgcgcggcggcctcggaactgcgcgccaaactggcgcggcggctgatggaggcaagcggcgcgctggaagaacagtccgtgcgcctggaacgcgccaccatcaccaccatccacggcttttgcgccgagctcttgcgcgcgcattttgagtccgcgggcgtgagcgcgggtttccgcgtgctggacgaggccaacgcccgccgcatggaggacgaggcgctggatgaggcgctggaagaagcgtacgcggcgttcgacggcgatctcgacgcgctggattttggccgcgggcccaagaaagtgcgcgccatggcccaggatctgctgcgcgcgctggacgcgcgccccgatccgcaggcctggatcgatcgctcggtgggcgaggattggcagccgcttttcgacgtgctggcgcaggcggcgcacgccagcctggacgaggcgaaaagccgaaccgacgaggcgcattctctcgtgctgggcagcttgcctggttacgaggaagcgctggcgtacgacatggcggcgctgtacggcatccccgaagacgctgattacgcccatctccacaaagcgctgcgcgatttccggcaggagcggctcaagccgtcgcgcggcaaggacgagtttggcgtgcgcgaatttgtgaaacttttgcgcgaggaagccaagcgcgccgtgcagcgggcgcaatctttggtggcgctttccgaggacgacgcatgcgcggatatgctggcaaaccagcccgccttgcgcgcgctcgcccgcctggcccagcgcgcacaggccttgctggacgaaaaaaaggccgaggaaggcgcgctgtcctatggcgatctggagcgctacgccctgcgcgcgctgcgcgtggaagaatgcgcccgggccgcgcgcgaacgctggaagtggatctttgtggacgaataccaggacaccagcgaaatccaggaggccatcctcagcgcgctcgtggggcagggcaacgcgtttttcgtgggcgatgtgaagcaatcgatttaccgcttccgcatggcggaaccggagttgtttttgcgccgccaggcgcgttacgcgcggggcgagggcggccgcctgatcgcgctcacggccaatttccgctcgagcgacggcattgtcgactttgtgaacgccgtgttcgagcgcgccctgcgcggcggggcggacgaaatcgcctacaccggcgacgagcgtttgcgcgccgcgcgcgctttcgccggggagcgcgtggaactgcacatcctcagcccggagaaagacatccacgagaccggcgcggacgaagaggaagaaagcgaggccgaactgctttccggcgcgcaggccgaggcccagtggatcgccgggcgcatccacagcctgatggaggccgaccccaccctgcgctatcgcgacatcgcggtgctcacgcgcgtgaagcagaatgtgctcgcgcccatggcgcgcgtgctggcggacgagggcattcccgtgtacgcggacgaggcgggcggctatacggacgcctttgaagtgcggctggcgctggccctgctcaagctggtggacaaccatttggacgatctttcgctgctggccgtgctgcgctcgccgctggtggggctttccagccgggaattggcccagttgcgcctggcagcgggcgacgcgccgctctacgaggcggtgctccacagccaggatcccgcgctcgccgccttcgcccggcaactcgccgcctggcgcgaccgctcgcgccgcctgccgctggggcaattcgtcgattccctgctgatggaaaccggcctggtacactacgcttccgccatgccgtcgggcgcggcccgacgcggcaatttgcacttgctcagcgcgcgcgccgccgcctatgaggaaaacggcgcgggcggactggcgggctttttgcgccacacggaaaccgtcgcccgccagggcggggaggacgcggcgcatgccctgggcgaaaacgacgatgtggtgcgcctgatgagcgtacacaagagcaaggggctggaatttccggtggtctttgccgcgcagctgggccgcggcttccgcggccagaaggcggacgacagcctgagttggcacgcgcagttgggcttcgccctgccctacaccgatcccgccctcagcgtgcgccgggaaacgctcgcccgccgggccatcgcttgccgcaaggcggcggaagacctggcggaggaaaagcgcatcctctatgtgctgctcacccgcgcgcgcgaccgcctgatcctggtgggcacgctgaaaaaccggcctttgatcacatggcgctggaaggggaacaatgcgttgcaccccaaaaacgcgctggatatcgtgacaagcggcatttacgaattgggcggcgaaccccagtggcacgagcctggcgccgtgccgcccgagagccgcgcgagcgaaaccctggcgccccgccaattgcgcgaagcgctgctccaggcgcgggaagcgcccgccgatgagaagctggttgccgcgctggcctggcgctatccttacgcggaggcggcggaagcgccgctcaagctcacaattacgggcctggtgcgcgaaatcgaaggccccgcggtgcgccaggaattggttgagcggcccgcgttcctgtcggaagggcagcccagcgcggcccagcgcggcacggatgtacaccgcctgctggcgcgggccgatctttcggccattcgcgccgggcaatggcccgaggaaaatcgcgtgcgccgctttttcgccagccccatcggtcaacgcctgctgcaaagctctcgcgtggagcgcgagtgggccttcgatttgcggctgcaaccggcggacgcgcgccgcctggccgggctggaaaccgccgaacccgtgatggtgcagggcgtgatcgatgcctgttttctcgaggatggggcgtgggtgatcgtggactacaaatccgggcgcgacgacgaggcctaccaccgccagatccggctctacgcgcacgcgctggctgccatcacccaaaaaccggtcaaggaagccgccgtgtttttgctgcaatccggcgcggccattcccgtcccgctggcgtgagcgcgcaaaattctcttccgcggcatatgctgcacgggagggatgcacatgagccagcaaatcatttgcccgcgcggcgcgtcgctgtacatatggcggcagggagacaccctggcctccgtggcgctgcgcaaccgcgtgaccgtacaatccatctatctcgtgaatgaggggcgcgaccttgacgccttgcgccccggcgaccgcatatgcctgccgcccggcatgtacgcctgcctgagcgggcaggcctacaccgtgcggcgcggagataccttcgcttccatcgcccaggcctatggcatcaccacctgggaactgatcgagcgcaatccctatgtcgatcccagcaacctgatggtgggccaggtgctgtgcgtgccggaagaggcgcaggaggacggcggggaaaattctggcggcgcgccctgcgcaggctgctgcccggcggggtaccagcagggcaccgtgcggtatggggaggattatgtggatctcctcatcaatctgaacgtgtccgacgcggcgttccgcgcagccaatccccagctcaacacccacgcgctgctacccggccagcgctattgcgcgccgccgccaggcagccggcaggccgcgtgcgcgggccggatctataccgcgcgcgacggcgatacgctcgccatgatcgccgaacgctttggcaccaccatgcgcgcgctgctcgagcgcaatccgaaccttacgcccaacgattttacaaacgggcaggctttctgcgtgtaaagagaaccgccgcgtgttttcgcggcggtagcttgtcaaaaaagtctttttgacaagctggtggcg

SEQ ID NO: 100 - DNA, 3576 bp, Unknown
  16S sequences of unknown bacteria
tgcggagccgaaggcgaaagcgatgacccgcaagtatgcgctttgcgccggcagatgatccgcaatgccatcacggtgctcatgtgcagcagaggcacaccgatgtttttggccggcgatgagttttgcaatacgcagtttggcaataacaatgcctattgtcaggataatctcatttcctggctgaactgggacatgcgccgaaaacacgcagacatgtatgcgtacttccgttttttgatccattaccgccatgcgcatccgatcctgcgaaaagatacggcaccatgttcagccgatcttccttttatcagcctgcatgggacactgccgtggaacagtgactatgatgcgcagacccgcgtcatcggcgtgatgtatgccggccgcaaggaagatgaagatgacatcatctatctgggcatcaacgcgtactgggagcgtgtggaagtgcggcttccggcgctgccgaaggacatgcgctggacggtggtctgtgataccgcccgtgatgtgcatgccatcatcacccggccggagcacctggatgaagaggtctatgtgttttcgccgcgcagcgtctgtgtatttcaggcagtctcagcatgaaaatgtgcaggttttccttgaccggcagtaactgccggctgataagataaggtcgaggaggatgtgcatgaaagacgaatatctgaacatgatgatctgcgctgaagaagatccggagctgtatgggatcgtccgtcattttcttcagcatgaggtcagcgcggctgatcggctgagcgtgatcgatcggcatctctgtgtgctgtctgcgttgatgggctgtcagggtgtggacgcatttgaggcggaggtctgcgacgcgctggctgaaggcgtagagccggccgttatccgggaaacggtataccaggccacggcttatctgggcatcggcagggtcctgtcgtttctgaagacgcttgaccgcgtcctgaaggcacagggcgtatccctgccgccggcgctgcaggggacgacagatgccgctgaccggtttgaacgagggctggagaagcaggtccagctgtttggcgaaggcatgcggaaacagcagacgcaggcacctcatccgcgccggaacatcaaccgctggctggccgccaactgctttggcgattactatacccgcaagggactggacgacgcgcagcgcgagctggtcaccttctgtctgatcctcgcccaaggcggctgtgagaatcagctcaggggccatactgccggcaatatcggcgcgggcaatgatgcggacaagctgtatgccgctgtggaacagtgcatgccctacatcggctatccccgcagcctgaatgccatgaacatcatcgatgaggtggcaggcaggctggcccagcaatgacaaaaacttccggagcgtgaacatttccggaagttttttctgtctgcacactatggtatgatagagctgaagcaaggaaagggagaaagagggaatggggaagaagctcatctttctggatgtggacggcacattgaccgactatgacaatcatatcccggcttctgccgcagcggcgatccgcaaggcgcgcgcaaacgggcaccgggtctatctgtgcaccggaagaagcaaggcggagatctatgatgagctctgggcgatcggtttggacggcatgatcggcggcaacggctgttatgcggaggagcacgggcgtgtgttgtttcatcagacgctttcggcagcacaatgccgtgccgtcgtggactggctgcgcgacagagagcgagccttttatctggaatgcagcagaggactgtatgccagcccgcacttcagggaaaagggcgatccggtgatccgtctctatcagcagcgcaaaggaaaggcaggccagagcgtggaccaggtcttcccgcacatgatctggggcgcagacctgtaccgcgacgatgtcagcaagatcagctttatcctggaggcgccagatgatgccaggcaggctgcgctggcgttcccggcgcttcaggccggcacttggggcggcaaaggagagctgttcctgtttggcgatctgggcgttcccggtgtggacaaaggaaaagcgatcgagcggatgttagcggcgatcggcggcagcatcgcggataccatcgcctttggcgatgcgatcgtggatgtaccgatgctgcgcacatgcgccatcggcgtggcgatgggcagcggcggcgaacaagccaggatggccgctgaccatgtgacggatgatgtgaagcgagacggtctggccaaggccttcgtgcatttcggactgatatgaaaaaagaggcatgtgcgttgatctgcatgcctcttttctaaggagataataacacaaaacgaccattttttcaaggcttgtcatgccgaggcaggagtggtagaacgatggcggggtgaatagatgaagccaagggaattacaagatccggcctcacaagcgctgctgtatcagcgcgagaccgaggtgatcgaaatcatggaaagcgtatgccgtgagctggattgggtagagagcgacccgcagcggccagtgatgatcatcgatgcgctttgggcaagcggatacatcgacgagcaaaatgagcaaaggacattgcggatggtcattcaggcatattatcgcatgcgggccaggctcagtacgaaggtatcagatgatgtgctgatggactcggtgctcagcacctatcgggaggatcatggcattcatccggaatcgttatatgtgcgattgcttgaacggtgggagaacagatgagcggcacgacgatgaggagccgcgtcaggccggccatacgcgatgcgctgaatgaagcatatgcctgcagagcgatcgatgctcagcagctgcgtcagctgctggaacagctgcaggagctgcttcgcgagcgagtactgcggttcaatcacggtcagagcacatcgctttctcaggcagactggcagcgtgtctgtcattctctggatcatttgttcgcgcgcggctgcgggaaagaaaggctgaacggcgatcatgatctggaaggcctgttgaagaggatcatcttttccggcgtgtatcaggtacgcaaggatatccgggagatcaagcggctcgccgaggaattgcgcgctcagctgccagagtggaaaaatgaagaatacctggcgttgtttgcacgcgacttacccgatctgatgagaagatggcgcgcagggaatgactgggtcgccgtgagcgaaaacaacgtggatctgctatacccgctcctcggcggaaacctggccatatgggacgatcaagatgccggcggaagtgagctggtcttgtattatctgcgctgtctcgctctggaacaggaattctgctgcttgtttcgctcagagatcgccgcgctgagcgagaggtttcaggcccagcgaagaaaaccgcttgaagcactgaccatcagcttgagcgagctgttgatggggcaggcgctggctgccatgatgatcaatggcagatgcagcgtcttgcttgcacaagaagagatcacgctgct

SEQ ID NO: 101 - DNA, 16313 bp, Unknown
  16S sequences of unknown bacteria
cgttggcaaaccagaggtttgtcaacgatcagagtcagcttcgctgacagctccctttggccccaaagggaggtggcgcggcgcagccgcgacggagggattgacacccctcagtcagcttcgctgacagcattcctcaattcagcatggtcgtacccctgcgctcgcaagctcgcttgtggcactccctgcttcattgggcttacttcgcgctgcttcgcgcacagcgcgcgcgtttcgtgcgccccctttgggaaaggggagccttttggatagtgctataccgcaggaagttgccccaccaattatgcaatgcaaaaatccatcccgcgatttcaagcgcgtgttgacaatgtcacacgagctgctcgatatcgatttgcgaatccttgcgcgcgcggcggtagatcacaaagcggttgccgatcacctgcacgggttcggcgtgcacgcgttcgcacaactcgtcgcacgcctcgcgggtgttttcgtagggcgcgttgcgctgcacggtgattttgatcagttcgcgggcttccagcgcgtcccaggtttgtttcacaagattgtcattcacgccgtccttgccgatgtgcaccaccggctgaagggcgttggccatggaacgtagcatagcgcgttgtttggcgttcacgggtgtgcaacctcctgctattccacaaaatcaaattccatatcttcgatgcgcacgctgtcgccttccttggcgccgcgcgcgcgcaaagcgtcgatcacgccccacctgcgcagcgtgcggtggaaataattcagcgagagctcatcttcgaaattcaccgaattgaacaaccggtcgatggccgggccggagaggacgaacacatccccgtccatttcgatggagaagggctcttcctccacgatttccatgggttcttcttccaggaacggctctgccgccggcatggcgcgcaacagatccgccgcgcggcgcagcaggggagcgaaccccgcgtgcgtggccgcggaaacggggaaaatttccgcgtccggcaactttgcgcgcaggcgggcgagattttcctcgctgccaggcaaatcgcacttgttggccgcgatcagcatggggcgcgcggccaaatcgccataggcctttagctccgcgaggatcgcgtcgtaatcctccagcgggtcgcgcatttcgctgcccgaaatgtcgatcacgtgtacgagcaggcgcgtgcgctcaatgtgccgcaaaaaggcgtgccccaagcccacgccctggctggcgccttccaccaggccggggatatcggccatcacaaagctgaattcatcctgcaccacgatgcccagattgggctgcaaggtggtgaaatggtagttggcaattttggggcgcgcggaggtcaccacggaaagaatcgtgctcttgcccacgttggggaagcccaccaatcccacgtccgcgatggatttgagttccagcgtcagctccatcatggggcgcttttcgccgggcttggcaaactgcggcgcctggcgcgtgggcgtggcgaagcgcgcgttgccaaagccgccgttgccgccgcgcatgagcacgcggcgcacgcccgcttcccgcatgtccaaaagcacgcggcccgaagccttttcgcgcacgaccgtgcccacgggcacctcgatatcgatatcttcccccgctttgccgcggcagcggcccgccgaaccgtcggcgccgttgcccgcggagaaattgcgcttgaaacggaagtccatcagcgtgcgcatgcgttcgctggcaacgaaggcgatatcgccgcccttgccgccgtccccgccgtcggggccgccctgctgcacgaatttttcgcggtgaaacgatacgcagccgttgccgccgtccccggccttggcccgtatatcgatgatgtctacaaacagcgccatttatttctccctgttttcgcaaagttcttccgccagagggcaactttcgcagcgcggcgcgcgcgcggtgcacatgcgccggccgtgccaaatcagcaagtgatgcgcgtgcgaccaacgctcgcgcgcgagcagggcttgcaattgctcttccaccttttccggcgcgtccgcgcaggcgaggccgatgcggttggacacccgccgcacatgggtgtccacggggatttcatcgcccccgaaggcggccagcaacacgacgcccgcggtcttttgccccacgccgggcagcttcatcagcgcttcccgcgaggcgggcacttcgccgccatattcggccaccagcgcctggcaggcggcgcggatgtttttggccttcatgcggtagagaccgcattcgcggatctgctcttccagctcttcttgggataccaaagcaaggctctgcgcatccggataccgggcgaacagcctttcggtgaccatattgacccgtttgtcggtgcattgtgcggatagaattgtggcaatcagcgtttcaaacggattgcggaaattcagctcggcacgagcatcggggtacagcttttccagcgcgtctaaaacgcgcgccgctttttctttcgtcatgagactattataccgaattgacggcgcgctgaaaatgttttttgtgttattttccagcaaaccatttgcgcggatgcgtggcgatttggcgcatatgtccaaatccgcgatggcgccccatgctctaaagcgatagggcgctaaggcgcggtttgcccgagccgacgcgctccacgcgatagacgcccaccaggttggcgggctgcgcgcggcgaatggcgctgacgacggctggcgcgtccgccagggaaaattgtatggataggccgcagcccaccgccacctcgcgcggggtggagaccacgcggatgttgccaatgccttcttggcggagctgctgttcgaaccggagcacctgttgccgcgaacggaacgcggccacgccataggattctaccataaaccgttcctcccatcccgctgcgcgtgcgcaacggaaacgctttcgtcatagtatacgccatacgcggcggaagctgtgaatgggggagtgcgcatggaaatctatctggacaacgcggccacgagccacccaaagccggcgtgtacgctccgggcggtgcaggacgccatgacccgcttcaacgcgaatccggggcgcgcgggccacgcgcgctcgctggcggcggggcggctggtgctggaagcgcgggaaacgctggcgcgcgcgctgggcgcgcgggatcccttttgcgtcgtacacgcgttcaactgcacggacgcgctcaatctggccatcaagggatgcttaaagcggggcgatcacgtggtgagcactatgctagagcacaacagcgttttgcgggtgctgatggaaaagcaaaagcgcggcgaaatcgccgtgacgctggtgcggccgcggggctattttgtggacgcgcgcgatgtgcagcgcgctttgcggcccaatacgcgcctgatcgcggtcacgcacgcttccaacgtcacgggcgcggtgcagccggtggaagagatctgccagcttgcccggcgcaagggcattttgagcctggtggacggggcgcagcgcctgggcggcgcgcccgtggacgttaaagccatgggctgttcgctgtacgcctttcccgggcacaaatccctgctgggccccacgggcacgggcggcttgtacatagagcccgggcttgcgcttgatacggtgcgcgagggcggcacgggatcgagcagcgattccatgctgcagcccaaggatccgccggagcgctacgaggcgggcacgctcaacctggccgggatcgcggggctgcgggcgggcgcgcaatatgtgcaggaacggcttttggccatccacgcgcgggagcgagaattggccgatcaactctatcgcggcgcgcgcgcgttgcccggggccgttgtgtacgcgcccgcggaacccgcggcgcgcgcgggcatcgtcagcctgaatttgggcgacctttccagctcggaattggcggacgcgctcgaccgcgcgggcatttgcgcgcgcggcgggctgcactgcgcgcccggcgcgcatgaggcgctgggcacgctgcgccgcggcgcggtgcgcctgagcgtgggacacgcgaccacgcccgaggaaatcgagcaaaccctgcgcgttttgcgggaaatcgcccgggaggcgtagatgtagataaggagcgtggcttatggccggggttgggcggcgttttccttgcggtagcgcaagggagtggtgcccgtgcgcttttggaacgcgcgcaggaaggtattgcggttggtgtagcccacgcgctcggaaatggattgcacgggcaaatccgtgttcagcagcagcgtgatggcgcaatccacgcggatggcgttgaggatatccgaaaagctttctccggtttcgtccttgaacatccgcgagagaaagtagtaggaaacgcccagatggtctgccaccatatcgaggcacagcatggggttggcgtattgctcgttgaggtagtccatcacctggtcgatgatgcggcggttcttggaatgcatggactgctgcgcggattcgcacagcgtgtggaaaatgcgcagcaattccgaaaagcagatttccggcttgatgctgtggctttgcaggatggaaatgagatagtggctttcctccataaaagcctcctgcgcgccgggaatctggccgctggccttgagcgccgtggagaacaggctgctatacaggcaccatagcgcgtcggtggaaagtttgcgctcttgctggttggtggcgtatatttcgcgcaagaggcgctcggtttcgttgtcgtcgcccgcgcgcacgctggcgatgagctgcaattccttttccggggggaattccatggcggtaaaggcgtccggcatatcgccataggagagaatttgcgcgtttcccgcggaagaaagctggaacgcgtccgtggcctccaacatgcagcggctgaggctgcgcagggagtgggttttgctgatgcccgcggcgtattgcgcctgcggaatctccagccaggaggggagcaattcctccatgcgggcgagcaggtccgccggggcggagagcaccacaatttgctgggattcggaaagttgcgtggcaaccacggaacagccgttttcttcgcacagctctggcggaaccgttagcctcccggaaggattttccacgatggcaacgcggaagaacgccgtgtgggaaaagccgcaaatgtccgcggcgctcatgaggtcttcttcgctgagcaaatggctgcgggacaaaaggcgcaaaagcgcgttgtcgcgaatgacgcggtactgttgctggatttcgcgctggaactgttcgctgcgcaactggttttcgcggatttttccttccaccagcttgaatcccgcgcgcatgttgggcgcatcgggcaggccgctgccggggaaagcggtgttcgccatctgttcgaacggcccgtacaaattgcgcgccatgcgcacggagagccagacgccaatgagggtacacagggccagggaaaggaaataaatcgtttggaacagggaagcttgcccaaacacagaagtcgtgggcaaaaagaacaggtatttcaatccggaagaaagtccggaataggagaatgcgtggtagtcggttccggcatattccggcgcgatttcgctatctgagcgaaagagcacattgccgtacacatcttccactacgaagcgaatcctggaatcgaagctgttttgtatcaattgcgcaaattcttctacgcgaatcagggagaaaaagcaggcgcgtgaatcgagatagcccaagtcgatcacctgcatgaacaatatggtcggggcggcttccatggccgggccggtgctatagccagcatagtaaaccgcgcttttggcggcggtgagcttgctggccagttcctccgccgtgacgccgctgaattttaggtacaagctataaaacagaccatagtccagcatggtggaggaagaagaaacgaccaattcccggtcgggaaaatagacgcccgtgaacgaaaaaatcggattgccaatttgcaagccggagagatagttgttgagatcccggcaggcgttgttgcggtccagcgtggtcatatcgatgttggcggcaagctgttttacggaaggcgtaccggcaagggcataggcggaattcagatgggaggtgacatagctgtcgatcaccgcgcctgcgttttcggcggactggcggttgagggcgatataatcttccatcaccgtccagcgcagcgcggcgctatagctggcggaaaggatgacgctgggcagaatcagcgcggcgaggagcgatatgagcagccggtaaaatggacgcatgtggcgtgatttgcgcatgcacgtcccctcctatggtcgaaaatatgggctatatattctatcgtgatttgctcgattcctgcacaacgcccaggagaaacgcaagatttgagacgcgctgcaaaatatgtgacgccatgtaaagcgcaaattccaataaaatgcgcgcctggcaaggattgggcgttgcttccttgggcaggtttcgctatactgatacgcgtattcaccgcatgcggtgtggccggacgcggccacgcaggtttcggaacaaaaacattgagaggtgagaggatggaaagtatgcacaagagaatcgcggctttggtcttggcgctggctgttatggcttgcacgggttcctgggcgctggcggaagagtccagcccatatccggagactttttccatttactgccccctgagcgaccatatcgcaaagatcggcgtcaacaattatggcgaattgtatgttttccaggagctagaaaagcgcacaggcacgcatgtggaattttcccatccttccgcaggcgcggacatggtttcgcaggtgaacctgatggtggcgtccggcagccttccggacgtgatcgttatgggcaattggaagggcatcagcggcggcctgttccagtggtatgacgacggtgtgatctacgacctcaccgaaatgatccccgaatacatgcccaactattacgccattttgcagagcatgccctatggcgtgcagaacgtgtctgtggacgggcacatgttctatctcacggagttcaaccacaacgttcccttctccggccccatcgtgcgcgaggactggatgaagcaactgggcatcgaagaatatcccaacaccatcgatgaattgatgacctattttgagctggtgcaggaaaacgacatgaacggcaacggcgacgcggacgatgagtgggccatttccggctacgagcccatgtcgcagaacttttctccttatgatttgatgtggccctggggcatcacctatgattttatgcagatcgacggcaaggtgacgcacggcatgctggagccggaatttaccgaggcgatcaccttcctgcacgatctgtacgcccgcggtatgctggatccggactatgagacccaggaccgcgacgcgctggacggcaagttcatgaacaatatggtgggctttgaatacggcttgcagcccaccaagatgaacaactccatggcggagacttcggactttaaggccacgggcacctacaacatccgccttacggaggattcgcccgcctacgtgttccacaatctgtacgtttccaagatcacctcttcttgcgacacggtcatcaccacggcgtgcgacgagccggagaaggtgctcacctggttcgattatatctacagcgaagaaggcagcctgctgatgaactttggcattgaaggcgaatcgtttgaattcgatgaaaacggcgtgccgtattacgattataccaacgccctggccaagcatccagacctgacggagagcgacattgcgtatctctaccgcttgcagggcctgagcgccttcccgatgcagatgagcagcgacgcctttgcctccacgctgcacgaatattccaaggaaggcaccgaccgttgggaatccgattacgacgcttcccgcattctgcccaacatttcgctcacggcggaagagacggaagaagtgaacgacatgctcgtggatattgaaacctatgtttccacgcagttgagcaggctcgtgaacgggcaggtgagcctggaggaaatcccgaacatccagcagaccctgcgcgatatgggcatcgaacgcgtgattgaaatctatcaggcggcttacgaccggtttatcgcttaagcatgctggccggcgcggggaacaacatgccccgcgccggcacacagaggatagggggatgcgtatgcaaattgcgcacgcacggcaaaacgcgctcgggcgctttgcccaggccatcaggcgccactggattttgtacgccctggcgctgccggtgatgctatactatattttgttccactatctgccgatgttcggcgtggtgattgccttccaggattatcgggtcacgcgggggattttgcgcagcgactgggtgggcctggaaaacttttgggatttctttcagtcaatttacgcctggccaaccattcgcaatacgctttccatcagcgtgctggggctgatcttcggctttccggcgcccattctgctggccttgttgctcaacgaggtgaagcaggcgcggttcaaaaagaccgtgcagaccattacttacgtgccgcattttatctccctggtggtcatttgttccatggtgcgcgatttttgcgccacccggggcttgttcaatgaaattttgggcctgtttggcggcggcggggtcaattggctcacgcagccggcctggttttatcccatatatatcatttccgggatctggcagaatgtgggctgggattccatcatttatatggcggcctttgccggcatcgacgcggaactgtacgaagccgccacggtggatggcgccagccgcctgcgccgcatctggcatgtaacgctgcccgggatcgcgcccacgatcaccattttgctgattttgcgcatcggcagcctgatgtccgtgggctatgagaagatcatcctgctgtacaaccccacgatttacgaaacggcggatgtaatttccacctatgtgtaccggcgcggcctgatcgacggcgaatatagctttgccacggctgtgggcttgatgaattccgtgatcaatttcattttgttgattgcggcggaccggttcagcaagcgcatcggccagcgcgggctgttttaaggagggggaaggcaatggcggttgtggaatcgcaaaaggcaagcgacaagtgcctcaatgttgtgatttatgccctgctcgttttggtgatgatcgtcacgctgtatccgtgctggtatgtcatcgtcgcctccttcagcaacccggtggaactttataatggcagcacgctgcttctgtggccgcgcggcttttccacggaagcgtatggcatcattctggaacacaccatgctgtggcggagctacggcaacacgctgatttacgtttccgcctccaccatcctgggcctggcgctgtccatcgcgggcgcgtttgtgttcacgcgctcttacttgccgggcaaccggtttatgctttcgctggtcacggtcaccatgttttttggcggcggcctgattcccacgtatttggtggtcgcccggatgaaattggtggatacgcgctgggccatgattttgccggggcttttgagcagctacaatctgatcgtgatgatgtcgtatttccgcggcattcccgccagcctggaagaatccgcgcggctagatggcgcgaacgattttgtgatcctcacgcggatcatcgtgccgctttccaaagccgtgatcgcggtcatcgcgctgtacatcctggtgggcagttggaacagctatatgccggccatcatctatttgcgcaaccgcgatctgtatcctttgcaggtgattttgcgcgaaatcctcatttcgggctcttccaatttggatacggtcacttcggggtttgacgattttgccgcctattccgaggcggtgaagtatgcctcgatcatcgtgtccacgctgccgatcatcatcatttatccgtttttgcagaagttcttcgtgaagggcgttatgctgggcgcgatcaaaggataaaggagaatacaaagaatggatacgccgaaatggtggcaaacgagcaacagcgccatccaggcgctgtacgatggcgcgcgcaaggcggaaaagcgcgcgctgtgcaaaacgccgggcgggcgcgatgtgctggcgctggcgtatgggccgcgcccgcgcatcgccagccaggccaattatagctccgcctgcggggcgcacaaccgggcctactacgcgccgctggaggggcgcacgaacaccgtggtgctcatcggggccgtacacgcgcaggaaaccgagggcgtggcggccattgccaacctgatttcgctgctggaaacgggcaaagacctggcgggaggcgaaaatcccggcctgctgcgcgctgcggaaggcctgcgcgtggtgctggtgcccatcgccaatccggatggccgcgcccgcgtggagccggatagcatggtggggctttcctcggcggaactgcgccactggggccagggcaattgggcggatggctccctgtgcggctggccggaatgcaaggcgcgccaccccatgcggggcgcgggctttttgggcggctactttaacgacgcgggcgtcaatttgatgcacgacaatttctttcatcccatggcggcggaaacccaggcgctgctggatctgtgcgcggcggaatttgccagttgcgttttgcaattgcacggcggttccaattcggccaacgatctgttgcagcccaattatgtgcccagggaggtcaacgaggcggtgcgcgcgctggcgcttcgctgcgacgcccgcgcgcggcgcgaaggcctgtggttcacggtgcgcgatttgcccggccagccgcacggcgaaacgccgccttcctttaacctggtcagcgcgctgcaccacgtttgcggcgcggtgagcgcttgctttgagagcaacgaaggcctgcgggatggcaacgaacccatctgggattgcgggcagattttgcgttcccacatgattttgttcgaggaaacctttaaaatgttcgctgcgcgatcttagcgccgcgtggcttgccttgcatccgtcgtataggaaaacctgtacggcggttttttgtggaaaatccgaaaatctcctctttgccatcacagagccgtcaaaatcttctgctatcataagtacgatcaaaattcggaagggagccttattgtgaaaaagaagaagatcattgttgggctcatcattttggtggccatcctagcggtggcggtgtattggttcctctcgtcttcggggacgggcagcatgcgcggcggctattacgagagcgaaaccagccgcctgggcaacatcgctacatattacaattttacgggaaatgtcgcagtaaaggaaagccagcaggcggcggcctatagcgccgccacggtgcgcgaaatctatgtggcggaaggcgacgtggtcgccaagggggacgcgctggcgcgcctgtccgatggaacgctgctttcggcggaaatcgcgggcgaggtgacggcggtgaacgcctcggtggacgaggccgtggcggcgggcagtcccgtgatcgaaattgtgaattttgacgcgctggagatcatcgtgaaaatcgacgaatacgacgtgaacgccgtggccgtgggcgacgaagcgctcgtgacggtggacgcgctgggtgagagctttgaggggcagatcacgcgcatcagcaagatcgcccagcagtccggcgacgttgcgtatttcgaggcgaccatcgccgcggaggccgaggtggaactgctgccgggcatgaaggtgagcgccaaggtgctgaacgaatccgtggaaaacgtggtggtcgtatccatggacgcgctgcagttcgacgcctacaaccagccctatgtgctcaagctcagcggcagggaatatgtgcaggtgcccgtcacggtgggcatcaacgacggcacttccgtgcagattctcagcggcgtttccgcgggggaaacggtgtacatccggcgcagcgtgctcgatatgatgggcatgacagggggctaaaggccatggccggtgaatttttcaggatgcggaacattgtgaaatcctaccgcatgggtggggaagaacaggtggttttgaaggggatcgacctggacattcagccgggcgagttcctttccatcctgggcccctctggcagcggcaaaaccacgctgatgaacctgatcggctgcctggatacgcccacttcgggcgaatacatcctagatgggcaactgatccgcgcgctgagcgaaaaggaactggcgcgcatccgctcgcgggagatcggctttatctttcagcaatttcagcttttgccccgcatgacggcgcagaaaaacgtggagttgcccctggtgtacgcgggcataggcggcgcacagcgcgcgcagcgcgcccggcaaatgctggaactggtgggcctgggcgataagctggaccactatcccaaccagctttccggcgggcagcaacagcgcgtggccatcgcgcgcgccatggtgacgcagcccaacttgctcctggccgatgagccgaccggcgcgctcgatcagcaaacgggccgccaggtgatgcagctttttcgggaaatcaacgcgcaggggcacacgatcgtgatgatcacgcacgacggcaacatcgccaaaaacgccagccgcattgtgaagattctcgatgggcagctctcggaagggagtgtggaggatgcgtagaaaagaaggcggtttgctgctgggcgaaagcgtcaagatggcctgggagaacatcgtggccaacaagatgcgctcgtttttgaccacgctgggcatcatcatcggcgtgatggccatcatcgcgctgatcaccatcgtgcaggcggccacggcggaggtcaccaaccagttcgccgaactgggcacgggcaaggtcacgatcaccgtgcagggcaccgcgctgaaggcgggcctcacggagagcgacctgagcgccctggcggcggtggacaacgtggggggcatcgcgcccaacatgtcgctcacgctgccggtttccgcgggcggccagtgggaagaagaagtgagtgtggaaggccgtggcgcggtctatttccgggaaaacggcgatttggtggcgcgcgggcgcgcgctcaacgcgctggacgaggagagccgcaattgcgtgtgcctgatcgatgaaaagctgatggaaaagctcttcttcgcgcaggatccgctgggccagaagctgtatatcgacggcatggaattcaccgtggtgggcgtgctggcgacggacgaggaccgcgatgtgatggcgcagttgatgggcggcggcgacaatggcaagctgatcatgccctacacctccgccatgcgcttgaccaatctgcatagcgtgaccaacgtggaagtgtacatccaggacacggactataccgaccagaccgtggacgacctggaaaccgtgctcaacgcggctttcaattataaggacgatagctatagcgtgatcaacatggaaagcctgctggataccatgaacatgatgatggacgtgatgacgggcctgctggcgggcatcgcctccatttcgctgctggtgggcggcatcggcatcatgaacatgatgctggtttccgtcaccgagcgcaccacggagatcggcctgcgcaaggcgctgggcgcgcagccccggcagattcagttgcaattcttgatcgaatcgttcgtgctttccgtgctgggcggcttgatcgggctgattttgggcctggccgtttcgtattatttcagcgggtatatggacattccgttccggatttccagcttcgcgatttcgctggggctgggcttctcggcggcggtgggggtcatcttcggctgggcgcccgcgcgcaaggccagccgcctggatcccatcgacgcgctgcgcagtatgtaatgaaggaggagaaacgatatgcgcaaaatccttgcattgtcacttgttttgtgcctggccctgcccgccgtggcttgggcggaggaggaaagcgcgccgcgggctgtgctggtcgccacgggcagcgtggcggcgggcgacggcgtggtttcggtggaagcgccgtttggcggcacggtcgcacagatcgatgtgggggaaggcgaccgggtctcccagggggacgtcctctttgcgatggatacggtatcggtgtacgcgcccgtttccggcacggtgcgcggcatcctcgcccagcggggcgatagcgccgcggtggtggccgcgcagtatggcgcgctgctctacatcgagcccgataccctggtgatggaagtggaccagtcccgcgcctacgacagcgaggaaaatgaaaccgtgcacgtgggcgaggaagtgtatttgcaatcgaccgacgatgaggaccgcacgggcgtgggcaccatcgtcgctttgggcgagggcacgttccgcgtggaaatcggcgagaacaattttgaggacgacgaagtggccgaagtgttccgcgacgcggattacgacgaggaaacccgcctggggcgcggcacggcgcgcgaacagagcccgctcgccatcactgtccaggaaggttgcgtggtggaaatcgacgtgacggacggcgaatttgtggaaaagggcgaggcgctcctggaattgggctcgggcgatttccccggctatgaaccgcgcgaaaagaccgccctggcggaagtggacggcattgtgacggcggtgagcgcgcaggagggccagggcgcgcagatggaccaggctgtggtgtccctttgcccctacgacaatctggaactctccgtcctcgtcgaggaaacggatctggataaaatcgccgtgggcgcgcgcgtcagcgtggcgctggacgcgctcccgggcgaaatgctggaaggcacggtgagcagcgtgtccgccgtgggcacgcgcgccgccgcgggcgcgcagttcgaagtgcgcgtttccctgcccgaggacgcgcgcctgctgctcggcctctccgccacggcctatttcttggaggattgagccatggacatcgagacgctgatgcgcatgcagcgcgaactctatgagaagcaccgggatacttgggatcccctgcagccggaatacgcccgcaattcgctcctgtggctggtggaagaagtgggcgaagtcgtcgccattttcaaaaagcggggcgagcgcgaaaccgcgcagaatccccagctgcgcgaggcgttcctcacggagatgagcgatgtgctgatgtatttcaccgatgtgctcttgcgcatgggcgtgtcgagcgaggaattcgccgccgcctatggcaaaaagcacgcccggaatatgggccgcgattatagcggcgaatacgagcgctttttgccgtagccaggttttcgtctccggcatagcatggtaggggccggtggaggcccgctatggtaggagatgaaatggatgaattgccgctataactcttggtggagatggtattggaattggcgcaaccgctacggcacaagctatgccggcgcttgccgcggctgcggttgctgcgcgggttgcgctggcacggctgcggcttcttgcggctgcggctgccgcgcggctgcgaacgctagcgccgcgggatgcgcgcgcagatgctgctgcggataaaaacaaaatgtgtgagggctccgtgcacaagggtgcacggggccttccttttgatatgggcaagcgttcgccgtccgcggcgcgcggtcgtttgcccgccgcggctggcgcggaggtggaaaaccatgggaacacaggtcgctgtcaattgaccgcgagttgctgacaagtgcccgcgggttgtccgcctgaatccaatccgtatccttatccgtatccttatccggattcgaatcccaaattcgaatccggatccgtaacctatccgtatcccaatccgtatccccggcgcgtgcgcgtgcgtgcgctcgcgcgccgggggacgggtcacccctcagtcggctatcgccgacagctcccctttcttaaaggggagccttttgggtagtggtacgccgtagggagtagcactacccaatgcctccctttggaatcaaagggaggtggcgcggcgcagccgcgacggagggattgacaaaccc

SEQ ID NO: 102 - DNA, 20638 bp, Unknown
  16S sequences of unknown bacteria
ggatagcgacccgacatggagcaaagcccgcgacgacgcacacgagtaaaaggaatgcctcggcggcgagccgtacagattatgcctttgcaaaagacttcgcgccgccgacaggcgagatgaaactattgccatagtttgtgccagtaacccctccgtcagccagtcggctgacacctccccttacacaggggaggctttgggctggtgcgacgccgaaggtgaggtgaaactttatactgacaacccctccgtcacggctgcgccgtgccacttctcgctgcggctcggtcacggcgcggctctgatataccaccggcatatcattcactaccgcgccgccacttcgttgccccttacacaggggaggcttttggttggtgcgatgccgaaggcgggatgaacccatcaaatctgctatttatggggcttgcacaatgcgaaatgccggtgtataatattacggttaaatttaatggtaggggcggcccgagctgctgcccgcacagaaaggacgaccaaccttggttagagaagatttaagaaacatagccattattgcccatgtagaccacggcaagaccacgctggtcaatgagatgctcaagcagggcggcaccttccgcgataaccaggtggtgcaggaccgcgtgatggattccggcgacctggagcgggagcgcggcatcaccattttggcaaagaacacctccaccacctataacggcgtcaagatcaatatagtagatacccccggtcatgccgactttggcggcgaggtggagcgcgtgctgaagatggtggacggcgtgctgctgctggtggacgcggccgagggccccatgccccagacccgctttgtactggagaaggcactggcgcaggacctgaccgttatcattgttatcaataaagtggaccggcccgatgcccgcctggacgaggtagtggatgaggtgctggagctgatgctggacctgggcgccagcgatgagcagctggatgccccggtggtgttctgctccgcgcggcagggcgctgcttccttcagcccccatcagttcggcagcgacctgaagccgctgttcgataccatcctggagcacattgcgccgcccgagggcgatgagaacgcgccgctgggcatgctggtttccagcgtggattattcctcctttgtgggacgcatcggcgtaggcaagatcaccgccggtaccattaagcagaacatgcaggtgacggtgtgcgactaccataaccccgacctcaagaccagcggcaagatcactgcgctgtaccagtacgacggtctgaaaaagagcccggtggattccgccacggtgggcgatatcgtggctttctccggcattgagagcatcaccatcggcaataccatctgcgaccccgcggccattattcccattccgtttgtcaagatcagcgagccgaccatcgagatgaccttctcggtgaatgattcgccctttgccggcaaggagggcaaatttgttacctcccggcagatccgtgaccggctgtaccgcgagctgctgaaggatgtttcgctgcatgtcaaggataccgattccaccgacagcttccgggttttgggccgcggcgagatgcacctttccatcctcatcgagacgatgcgccgtgaagggtatgagttccaggtgggcgcgccgaaggtgctgtaccaggagatcggcggcaagaagtgcgagccgatcgaggagctgaccattgatgtgcctgccgacagcgtaggcactgtcatggaaaagatgggtccccgcaagggcgagctgcaggagatgcacccccagggcgaccggatgcgcctgaccttcctgatccccgcgcgcgggctgtttggctaccgcagcgagtttttgaccgataccaagggcgagggcatcatgtcctcggtcttccatggctacgatacctacaagggggatatccccggccgccattccggcagcctgatcgcctttgagaccggcaccgcggtggcctacggcatctttaatgtgcaggaccgcggtaccatgttcatcaaccccggcaccgaggtatatgccggcatggtggtgggccagaacccaaagggcgaagatatctcggtaaatgtatgcaagaccaagcacctgaccaatacccgtgcttccggcagtgatgacgcactgcggctggtgccgccccgcatcctgagcctggaggaggcgctggaattcctggcggaggacgagctgctggaggttacccccaagagcattcgcatccgcaagcgccagctggaccacaacctgcggatgcgggagtgggccaagaagaaggccgcggctgaggctgccgccaaataatctgaccgaaaggacaacgataaactatggccgaactgaaatatgagatcgtgcagcacctggccaccattgccgaaggcagcaagggctggagcaaggagctgaacctggtgagctggaacgagcgcgacccgaaatttgacctgcgggagtggagccccgaccacaccaagatgggcaagggcattaccctgacctatgaggagatgcaggcggtgtgcgacgcgtttgccgactttgctgagaacgaggagctgccggaggcgtaaacaaatgaggaattcccctgccggaaggtgggggattttttcaccctcggtgactccacgaagccgaaggcggctgcaaatttgaccggcaaagtgcttctatattataatagtatagccgtgcctttcccctatatggtggctggggtggggcgtgcggtacaagatgtggtgggacaagaaaaaagtgaaaaaagtccggaaaatcgggcaaaaaagcttgcaaatgggagtgatgtatggtacactaatccttgcgtgactgcgcttttgatatgcgatgatgcgggaggtggccgccgagttgctgtgacgacagcggctcagacggggaatttccgcggagtatgtccgatttgaaaccgggcggctttgaactgcaaccggcgccgacccccacgggaatggctgcggcgagtgcattaaaaggtcccggatggctccgaatccttttgcgaaaagggttgggaagcgtccggatttctttatgcgatgccgcggaacacccggcagggtttgcaaagaaagcagggcaaaaaccgtcgcctgagtaaactaaaaaacaggaggcgatgcaaagtggcagtcaaggaaaaaatcagaatcagactgagaggctatgatgcccagctggtggataccgcagcagagaagatcgtggagaccgcgaagcgcacaggcgcccgcgtatccggtccgatcccgctgcccaccgaaaaggagatcgtgaccatcctgcgtgccgtccataagtacaaggacagccgtgagcagtttgagatgagaacccacaagcggctcattgacatcctcagaccttccaacaagacggtggaagcgctgaccggtctggagctgcccgccggcgtagagatcgaaatcaagctgtaaaaacggcttggaccgatacccggcacctgccgccgaaaggcgggtaaggtcatgtcggccgacccgaacataatttggccgaccaataaccgaacaggaggaacacacaaatgcaaaaatgtatcatcggcaagaagatcggtatgacccagctctttgatgaaaagggcaatgtagtaccggtaacggtcgtagaggccggcccctgcgtggtagtgcagaagaagacaatcgaaaacgacggttatgaggccgtgcagatcggttttggcgcactgagcgacaagagagccaccaaagcgatcaagggccactttgccaaggctgatgtagccctgaaaaagaccctgaaagaattccgtctggacgatatcgccgccctgaatgtcggcgacatcatcaaagcagatacctttgccgcgggcgacgcggtggatgtctgcggtacttccaaaggtaaaggctatgcaggcgtaatcaagcgcttcaatgcccactccctgaaggatacccacggtaccggccccgttcatcgtcatgccggttccaacggcgcctgctccgaccccagccgtgtaatgaagggcaagaagctgcccggccacctgggtgctgagcgcgtgaccgtacagaatctggctgtcgtgaagatcgatgccgagaacaacctcatcgccatcaagggtgctatccccggcgctaagggcggcattgttaccatcaccgactccgtgaaggcttaacaggaaggaggatacgaagaatggctaaggttacaatttacgatatgaccggcaagagcgtcggcgagcgtgagctgaacgacgcgatctttgcggtgactcctaacaaggcagtcctgcacgaagtggtcaagaattatctggcgaaccagcgtcagggcacacagtccaccttgacccggaccgaggtttccggcggcggcaaaaagccctggcgtcagaagggtaccggtcatgcccgtcagggttcgacccgtgctccccagtggactcacggcggcgtggcgctgggccccaagccccgttcctaccgctacaccatcaaccgcaagatgaaggtcgttggcctgaagagcgctctttccgccaaggttgccgagaatgagctgattctggtagacgccatcaaggtagatgagtacaagaccaagaccgtagtaaacatgctgaaggcgctgggcgctgagggcaaggctctcatcgtgaccgacaccgtgaacaagaccctggttggttccgccaataacatccccggcgtaaagaccagcattgtgggcgagatgaacacctacgatgtgctcaactcccgcaagatgatcctgaccgtggctgcggtagataaactggaggaggtgtacgcgaaatgaaaatgatccaggatattatcgttgcccccatcgtgaccgagagctccatggaagcgatgcagcacaagaagtacacctttaaggtgatgaagaccgccaacaaggtggagatcgccaaggcagtagaggcgatgttcccgggcaccaaggtagctgccgtaaacaccatgaactgcgacggcaagctgaagagaatgggccgctatcagggctataccgccagctacaagaaggcgatcgtgaccctgaccgaggattccaagaccatcgagttctttgagagcatgcgctaaggcaccgctccccggggtttcagtccccgctgtgtaagaacatcttattgtatggagcctgctccggctccgctaaaatctacaaaggagaggaattaaaatggctattaaacgctataagcccacgactcccggtcgccgcggcatgaccgtgaccgactattccgggctttccaaggtagcccccgagaaatccctgctggaaccggtgaagaagcattccggccgcaacaataccggccgcatcaccgtgcgtcaccagggcggcggcaaccgtcgcaaataccgtgtgatcgacttcaagcgcgagaagctggatatgcccgctaccgtgctgaccctggagtacgatcccaaccgttccgcacacattgcactggtacagtatgaggacggcgagaagcgctacattctggcgcctgttggtctgaaggtcggcgacactgttgtttccggtcccaatgcagacatcaagcccggcaacgcgctgcccctggcgaacatccccgtaggtaccgtcatccacaatgtggagctgtaccccggtaagggcgctcagctggcccgcgccgctggcaacatggcccagctgatggccaaggaaggcaagtacggcatgatccgtctgcccagcggcgagctgcgcaatgtgcagctgaactgcatggctaccattggccaggtaggcaacatcgaccacgagaatgtgaacatcggtaaggccggccgcacccgtcatatgggtatccgtcccaccgtacgcggttccgtaatgaacccctgcgaccatccccacggtggtggtgagggccgcgcgcccatcggccgtcccggccctgtgaccccctggggcaagcccgcgctgggttacaagacccgcgacaagcacaaggcctctgacaagttcatcgtcaagcgccgcaacgcgaaataaccgcgaggaaaggaggatattgaactatgagcagaagtatcaaaaaaggaccttttgtgcagcctaagctgctggcaagagtacaagccatgaacgaggcgggcgaaaagcgcgtcctcaagacctggagccgtgcctccacaatattccctgacttcgtcggtcacacctttgctgtgcatgacggacgcaagcatgtaccggtatatgtcaccgaggatatggttggccacaagctgggcgaatttgcccccacccgtaccttccgcggccacgccggcgccaagaaatcttaaaataggaccgaaaggaggaaaaacacatggaagctaaggcttatctcagacatgcgcgcatctcgccccgcaaggtacagatcgtgctggatctgatccgcaacaagcctgttgaagaagcgaccgctatcctggccctgacccccaaggcagcctgtgagcccctggccaagctgctgaagagcgccattgccaacgcggagaacaactttaacatggacaagaagaatctttatgtcgcagagtgttttgtctgccccggtcctatgctcaagagaattcgtcccagagcacagggcagagcattccgcgtgatgaagagaacctctcacgtgactatggttctgcgtgaaaaagaataagctgaaagaaggaggtaaactatgggacagaaagtaaatccccacggtcttcgcgtgggcgtaatcaaggattgggattcccgctggtttgctcgtgataacgctttcggcgatatcttggtcgaggactataacctgcgtaaattcctgaagaagaaactgtatgatgccggcgttcccaagattgagatcgagagaaccgccgataaggttcgcatcaacatccactgtgcccgtcccggtatcgttatcggtaagggcggcgcggagattgaaaagctgcgcgctgagtgcgaggccctggtaaacaagggcaagacccagaagctgaccgtactgcccctgggcgtgatcgaggtaaagagccccgataagaacgctcagctggttgccgaaaacattgccgcacagctggagggtcgtgtatccttccgccgtgccatgaagcaggccatcggccgcgccatgaagcccatgggccgcgagcccggcgccaagggcatcaagacccagtgctccggccgtctgggcggtgctgaaattgcccgtgtagagcagtaccatgagggtactatcccgctgcagaccctgcgtgccgacattgactacggctttgcagaggctgccaccacctacggccgcatcggcgttaaggtttggatctatgccggtgaggtgctgcaggaccgtaagcccaagaaggaaggaggccgcaagtaatgctgttgcccaaaagagtaaaatatcgtcgcgttcagcgcggtcgtctgaccggtaaggcactgcgcggcaacaccatctccaatggtgagtatggtctgcaggccctggagcccgcctggatcacttccaaccagatcgaggccgcccgtatcgccatgacccgttacatcaagcgtggcggtcaggtatggatcaagatcttccccgataagcccgtaaccgccaagcccgctgagacccgaatgggttccggtaagggcagccctgagtactgggtagcggtcgttaagcccggccgcatcctgtttgagatgggcggcgtagacgagagcattgcccgcgaggccatgcgtctggctatgcacaagctgccgatcaagtgcaaatttgtaaagaaagaaaccgaagggagtgaagaataatgaaggctaccgaaatcagagcactttctgctcaggatctgaacaaaaagcttgctgacctgaagaccgagcttttcaatcttcgcttccagcacgccgtaaaccagctggataacccgctgcgtcttgtagaggtcaagaaggatattgcccgcgtaaagaccgtgctgaaggaaaaagagctggagactaagtaaggagaaaggaggatatcctgatgagcgaaagaaacctgagaaaaaccagaacgggcatggtcgtttccgataagatggacaagaccgtagtggtcgccgttatcgataatgttcgtcacccgctgtacaagaagatcgtaaagcgcactgtaaaatttaaggcgcacgatgagcagaacgcctgcggtatcggcgataccgtcatgatcatggagacccgtcctatctccaaggataagagatggcgcgtggtagagatcatcgagaaggcgaaataagccttttgggatctgctgcaagcaaatttgtatcaatctatttaacatggatagaaccgtgcagagaagctgcacgagtctttgaaaggaggaacgctctgtgattcagatgcagacctatctcaaggtagctgataacaccggcgcgaaggagcttatgtgtatccgcgtgctgggcggctcccgcaagagatatgccaatatcggcgatgtagtcgtggcttccgtcaagaaggcagcccccggcggcaccgtcaagaagggcgaagtagtccgtgccgtaatcgtacgctccgcgaaggggctgcgccgggaagacggcacttatatccgctttgatgaaaacgcagccgttatcatcaaggaggacaaaaatccccgtggtacccgtatctttgggccagtagccagagagctgagagaaaaggattacaccaagatcctgtccctcgctccggaagttctgtaaggaggtgtcgcaaagtatgaatcatattcatgtaaagaccggcgacactgtcgtcatgctctccggtaaggataagggcaagcagggcaaagttctgcaggtaagccccaaagagcagaaggtcatagtagagggcctgaacatggtaaccaagcatgtgaagccccgtaagcagggtgatcccgctggtattatgaaggcggaatccgctgtatacgcctgcaaagtaatggctgtttgccccaagtgcggcaaggcgacccgcctggcccataaggtagagggcgacaccaagacccgtgtgtgcaagcactgcggcgcatcttattaagaaggaggataatcatggcacgtttgaaagaattctacaagagtgatgtagcccctgcgatgatgagcaagtttggctacaagagtgttatgcagatccccaagctggataaggtcgtcatcaatgttggctgcggtgagttgaaggataaccccaagatgctggatgcgatcatcggcgacctgggcaagatcaccggccagaaggctatgccctgcaaagcacacaagtccattgcaaactttaagctgcgtgaaggcatggtcattggcgctaaggtgaccctgcgcggcgagagaatgtacgagttcgtggataagctgttcaacattgctctgccccgtgtacgcgacttccgcggcattaacggcaacagctttgatggccgtggcgactataacctcggtatccgtgagcagctgatcttccccgagatcgagtacgataagatcgataaggtccgcggcatggacatcacctttgttaccaccgccaagaccgatgaagaagccaaagagctgctgaccctgatgggcgcgccctttgagaagtaaggaggtagagaagaatggcaaaactgtcgatgaaactcaagcagcaggctcccgctaagttctctaccagagcttacaaccgctgcaagatctgcggccgcccccacgcttacctgcgtaagtacgggatctgccgtatctgtttccgcgagctggcctataagggccagatccccggcgtaaagaaagcaagctggtaatagaaagaaggaggttgacctatgtatatcactgatacgattgctgatatgctgactcgcatccgcaatgcgaacagcgccaagcacgacactgttgatattcctgcgtcaaagatgaagacttctattgctcagattcttcttgacgagggttatatcaaggctttcaccgtagtagacgatggaaagcagggcattatccgtattaccctgaaatacggtgccaacaagaccccggttatccaggggctgcgcagagtatccaagcccggcctgcgtatttatacaagctgtgaggactgccccaaggtcatgaagggcctgggtgttgcgatcctctccacttccaagggcgtcatcaccgataaagaggctcgtaagctgaatgtcggcggcgaagtcctggcgttcatctggtaaggagggaaagtagaatgagcagaattggtaataagcccatcgaaatccccgccggcattgatgtaaaggtagagggcaacaccgttaccgtcagcggtaagggcatcaccctgagccagaccatcgacagccgcatcggagtaaagatggacggcaatgtaatgcacattacccgtgcaaacgaagaaaaagagaccaagagcatgcacggcctgtaccgcgcgctgatccacaatatggtggagggcatcgataagggcttctccaaggagctggagatcaacggcgtaggttaccgtgctgccaagcagggcaacgagctggtaatgaacctgggttattctcatcaggtagtagtaccggagattcccggcatcaccatcgaagtacccgctcccaacaaagtaatcgtaaaaggcgctgacaagcaggccgtaggccagtttgccgcggagatccgcgagaagcgtccccccgagccttataagggcaagggcatcaaatatgtcgacgaggttatcatccgcaaggaaggtaaagccggcaagggtaaataaggaaggaggagtatctgaatggttacaaaagttgatagcaagaagaaccgtcttaaaagacgcgccagagtacgcggcaaagtgtacggtactgcccagcgtcccagactggccgttttccgctccgccaaccacatttatgctcaggtcatcaatgatgatcttggcgtaactctggctgctgcttccagcatggataagggctttgacggctacggcggcaacaaggaaggcgcccgcaaggtaggtcttgcgattgctgaggctgccaagaaggcaaacatcgaagaggtcgtatttgaccgcggcggctttgtatatcatggccgtgtggcagagctggccgagggcgcccgtgaaggcggcctgaaattctaagagaggagggacacttttggctcgtattgatgcatctaaactggatctgcaggagaaggtcgtacacatcggccgcgtctccaaaaccgtcaagggcggtcgtatctacaagttcgctgcactggtagtcgtgggtgacggcaacggtaccattggttttggtattggtaaagccggcgaagtcccggacgctatccgcaagggcattgaagatgcgaagaagaacatggttaaagtttccctcaagggaaccaccatcccgcacgagatcatcggcaaatttggtgccggtgaggtactgatgaagcccgctccccagggtaccggcgtaattgctggcggcgctgtgcgtgccgtactggaggttgccggtatcagcgatatccgtaccaagtgcctgcgttccaacaacccctgcaatgttgttaccgctaccttcgagggcctgaaggccctgcgcaccgtagaggaagttgcggcggtccgtggtaaggacgcaaaagaaattctgggttaaggaggtaagcgaacatggaaaagaccctgaagatcaagctggtaaagagcctgaacggccggctggagaagcagatcaccaccgcttactccctgggcctcaaaaagatcggtcagaccactgagcagcccgataacgctgctacccgtggtaagatcaagaccattatccacctcattgaggtaactgaataagcgaggaggtgcagcgaacatgaaactgaatgagctttctccggctgccggcagcacccataagggctaccgtgtaggccgtggcgctggctccggcaacggcaaaaccgccggcaagggccacaagggccagaacgcccgctccggcggcggtgtacgccccggctttgagggcggccagatgcccctgcagagacgaatccccaagcgcggattcaagaacatctttgcgaccaagtacgccagcgtgaatgtagaggtcctctcccgctttgaggacggcgccgtggtagacaccaaggcactgcaggatgcaggcatcgtaaaaaagacctatgacggtgtgaaattcctgggccgcggtgaggtgaccaagaagctgaccgttaaagcagccgctttctccgaaggtgctaagagcaagattgaggcagccggcggaaaggcagaggtggtataatgttccagacattacggaacgcatggaaaattgaggatctccgcaagaagctcctgtttaccctgctgattctagtaatcgtacggcttggctgtgccattcccgtgccgtttctggatcccagccgactgcaggagatgctggacagcacccagggcaacctgctgggttacctgaacctgctgaccggtggcgcctttgccgaggcgaccctctttgctctgggcgtatcaccctatatcacagcgtccattgtcattcagctgcttaccgttgctattccctccctggagcggatggcaaaggaaggccctgaaggacagaagaagatcaagaaaatcacccgctattccaccattggtctggctattctgcaggcgtacgcatactacaccctgctgcgcagcagccagttcaatgccgtgaaatacaccaccggcgctgccgcgtggatcagcggtattgccattgtgctggcctttagtgccggcgccatgctggtagtatggctgggcgagcgcatcgatgaaaagggtatcggcaacggtatttcccttatcctgttcgcgggcatcgtggcgcgtatccccaccctcatcaccagactgatcacctatatccagctgggcgagttctatccccagtactatgcatgggtgccgctggttgtgatccttttcatcgcgatgatcgcgttcatcgtgctgatgaacggcgccgagcgccgtatccccgtacagtatgccaagcggatcgtgggccggaagcagtacggcggccagaatacctacatgcccattaaggtaaacatgagcggtgttctgcccatcatctttgcttccaccttcctggcgatccccggtaccattgttggctttgtagatcccaatgcggagggcggctttgcgaagtttatctccaatgtgttctccaccaacagcatctggtacgctattctgtactttattctcatcatcctgtttaactacttctatatcgcgatccagtacaatcccatcgagatggccaataacatccgcaagaacaacggcgccatccccggcattcgtcccggaaagcctacctctgatttcatcagccgtatcatttccaagacgaccctaaccggtgcgctgatgctggcggtcatcgccatcctgcccatcatcctgggcgcagtggcgaacatgaacatctccatgggcggtacttctatcatcatcgtggtaggtgtagcactggatacggcccgcagtctggaatcccagatgatgatgcgccactataagggcttcttggaataagccccgacaagaggaaacagaatcatgatgaaattgattatgtttggccctcccggagccggcaagggcacccaagcggatatcctgggccgacgctacgggatcaaaaagatctccaccggagacgcgctgcgtgatgtgatccgcagcggctccgagctgggagagcaggtgaaagacctgatggaccagggaaaatttgtgccggatgaaatcgtaaccgagatcattcgcgacagagtttcctcccccgactgcgccaacggattcatcctggatgggttccctcggaacctggcccaggccgaggcactggtggatatgggcatcaaggtgaataaagccttgctgatcgatgtaccggacgaggtactggtagaccgggtacagggacgcgtgatgtgtgacaagtgcggcgccagctaccacctgaagaacaacccccccgccgtggagggtgtgtgcgacaagtgcggcggccacctggaggcacgcagtgacgaccggcccgagaccgttcgggcccgcctgaaggtttaccatgaactgacggaccctgtggtggatttctaccgcaatcgcggcgttctttcggagattgacggaacggcgagcattgaaaacgcgacagcggagatcctgaagatactggagggatgaggctgtgatcgtactgaaaaactccaaggagctggctctgatgaaacaggccggtaagatcacggcggaggccctgtgggcaggggtgcgggcctgcaagcccggcaccaccacctgggagatcaaccgtgtggtacacgaaacgattacttcccgcggggcgaccccttcctttttgggactgtatggctttccggcggcggcgtgcatcagcgttaatgaagagctgatccacggcattccggataagaagcacctcatcaaggaaggcgacattgtaagcatcgatgtgggcgcctgcatcggcgggtatcacggggattccgcgtataccgtgggtgtgggtgagatcgctcccgaaacaaaacaactgctggaggtcacccaggagtgcctgaaccgcggcatcgcggcggcactcaagggcaaccgcctgggcgatatcggctcggcggtgcagacctatgccgaaagctatggctacggcgtggtgcgcgaatatgtgggccacggcgtagggcgtaagatgcacgaggacccagaagtgccgaactacggccacccggggcgcggcgtgcggctgatgcctggtatgactatcgccatagaacctatgataaacctgaagggcgaaggggtgtataccctggataacgactggactgttgtgaccgaaagcggcagcccctgcgcccacttcgagcataccattgccataaccgataacggcccggtgatactgaccaagctgtaaacgggagggcaacgggaatgccggagaaaggaagtgtggtgctggccaccgcggggcggaatgccgggggactctatgtagtgctggaacgcactgaaaaggagtgcctgctggcagacggcaaaaagcggcggctgagccacccaaaacggaagaacctgcgccatgtgcgggcaacagcccagcggctggaaccgcagcaatacgcggcggatagacggctgagacgcgcattggcccaggcagcacataggtacaacgacacagatccagaatgagggaggtaaacgccaatatgtccaagcaagatgtcattgagatcgagggcgaggtagtagaagcactgcccaatgcccagttccaggtgcggctgcccagcgggcatgtcatcctggcgcatatctccggcaagctgcgcatgaactacatccgcatcctgcccggcgataaggtaacggtggaaatttccccctacgatctcaccaaggggcgcatcacctggcgcaccaagtaagtaaaaagcaagcggcacggcgataaaccgtgcagaacaaaaggaggtaaatatcatgaaagtaagaccttctgtaaagccgatgtgcgaaaagtgcaagattattaagcggaaaggccgcatcatggtcatctgcgataatcccaagcataagcagcgtcagggctaagagtaacgaaacggaggtgtactaaagaatggcaagaattgctggtgtagacctgcccagagaaaagcgggtggaaatcgcactcacctatatctacggcatcggccgtaagactgccaacgacattctcgccgccaccggcgtcaatcctgatacccgtgtaaaggatatgaccgaggaggacgaggctaagatccgtgagtatatcgaccatcacctgatcgtggaaggcgacaagcgccgcgatgtggcgctgaacatcaagcgtctggtggagatcggctgctaccgcggcgtccgccacagaaagggcctgcctgtacgcggccagcgcaccaagaccaacgcgcgcacccgtaaaggccccgccaagaccattgcgaataagaagaagtaaggagggaaatcgaatatggctaaacaggtagcgaaaaaggctgtgatccgtcgccgccgtgagaagaagaacatcgagcgcggcgccgcccatatccagtccagcttcaataataccatcgtcactctgaccgatacgcagggcaacgcactgtcctgggcttctgccggcggcctcggtttccgtggctcccgtaagtccactccctttgctgcccagaccgccgctgaggtggctgccaaggctgctatggagcatggcctgaagagcgtagaagtttatgtaaagggccccggccaaggccgtgaagctgccattcgtgcgctgcaggctgctggtctggaggtcaccatgatcaaggacgtcacccccattccccacaatggctgccgtccgcccaagagaagacgcgtataataggaggaaaaaaagatggcaagatatacaggtcctgtatgcagactttgccgtcgtgagggcaaaaagctgttcctaaagggcgacagatgctactccgacaagtgcgctgtaggccgcagacagtcggttcccggccagcacggcaagtcccgcaagaaggtttctgagtatggcacccagctgcgtgccaagcagaccgcccgccgctactatggcgtaatggaaaaccagatgctgaagtattttgacatggcagagcgtatgcccggtaagaccggtgaaaacctgctgagcatcctggagcgcagactggataatgtggtttatcgtctgggctttgccgcttcccgcaaggaggctcgtcagctggtccgtcatggtcactataccctgaatggcaagaaggccaacatcccctccattctagtaaaggccggcgatgtggtttccgttgctgaaggcagccgtaactccgataagatcaagcttgttaccgaggctaacgcttcccgtcctgttccccagtggctggatgctgacaagaaccagctgaccgctaaggttgtccgcctgcccgcccgcgaggatgtggatatggacatcgaagagcagcagatcgttgagttctacagcaaataatgcttgacccgacgaatgtcagtttgggaaggtacagtacgctaaaagctgatttaaggagggaaatgaatggtcaaaattatcgagcctaagatcgaaacagcagagcttcgtcccgatggcagctatggcaagtttattgccgagccgctggaccgtggctttggcattaccctgggcaacagtctgcgtagggttctgctctcctcgcttcccggcgtggccgtttcttccattaagatcgacggtgtccagcacgaattttccaccattcccggtgtaaaggaagatgtcgttgagatcattctgaacatcaagggactcattgccaagctgcatggtgaggagcctgtaacggtacacattgccgccgaaggcgagtgcgaagtgaccgcaggctgcattaccggcagcagcgaagtggagatcctggacccgacaatgcacattgcaacgctggcagaaggcgccaagctgaacatggagatggttctgcaaaagggccagggctatgtaagcgcggaccgcaacaagcagctgaacaacggtgcggccccggtgggtaccatctttaccgatagtatctatacaccggttttgaaagtgaattactcggtggaaaacacccgagtagaacagattaccgactatgacaagctgaccctggagatctggaccgatggtaccatttctgccaaagaggccgtcagcttggctgccaagatcctcaatagacaactcaatcactttgtggaactgagtgacgaagtgaatgccaccgagatcatggaaaagaaggaagaatccggtaaggataaggttcttgagatgaccattgaagagcttgacctttctgttcgcgctttcaattgtctgaagcgtgccggcgtcaattcggtaggcgatctgatcaacaaatcgcccgaagagatgatgaaggttcgcaatctcggcaaaaagtcgctggaggaagtcatgagcaaattggaggctctgggctttaacctgcacagcgacgacgaataaaaggtaaggagtgatataaatgccaggtgccagaaaactgggtagaaccactgaccatagaaaagcgatgctccgtgccatggttaccttcctgctggagaacggtaagattgagacgaccgtgacccgcgccaaggaagtgcgtgcaatggcggagaagatgatcaccattgccaaggcaaatgaccttcactccaagcgtcaggtttattcctacatcaccaaggaaactgtcgcgaagaaggttatggatgagatcgcccccaagtatgccgaccgtaacggcggctatacccgcatcgtaaagattggcccccgccgcggcgacgctgctgagatggccatcatcgagctgatctgatcttaatgcaggcagactaaaaacaaagaaggcccccgttccgaaaaggagcgggggcttttggtatgatgataaataatagatagccgtgcgcgatcagtcgctttccagtgccaggcggtaaagctcacccttacggtagccggtttccttagctacctgcttggccgcgtcgctcaaggattgtccttccccagctaagtggcgcacaagcgccgcggcctgttccagcgacatttgggcggtggcgtcatttactgctgccccggccacgataagcacatattccccgcggggttcccgctcggcgtattccgccacggcagccgccagggtggtgcgctgcatttcttcgtgcagcttggtcagctcccggcacagggtgatgggccgatcccccagcccctccagcagggcggcaagggtctggcgcaggcggtggggggcttcgtagaagatgagggtatgcggcaggcggctgaccgcttgcagggcagcgccacgctccccctttttgatgggcagaaagccctcaaagaggaacttgccggtgggcaggccgctggcggccagggcggtcatggcggcggtggggccgggcactgtggcaatctccacctcattttcatggcagagagccaccagtccttcgccggggtcgctgatgcagggcatccccgcatcggtcacaatggctccattttcgccgttcagcaggcgttctaacagctccgggccgcgggcggcggcattgtgttcgtggtagctgatgagagtgttcctaatctcaaaatggttgagcagcttaagggtaacgcgggtatcctcagcggcgatgaaatccaccgtttttaagatctcaatggcgcggggggagaagtcccccaaattcccgatgggggtgcccacaatatataaggttcccatagcacaagttcctttacaaatagaataataatgttaaattatacaatgtgatatatccttttcatctcatcggagtagctgccatcagcgctttccacaatgagaggcggctccacggtaagacccggcttagcgcccgcctttccctccaccaaaaagagccagggggctttttccgggcgctgctgcacccagcgcagacgcttgggctccagcccagcctgccgcattgccaatagcacatcagtcaggcgttccgggcgctggcacaggcaaaagcgtcccccgtattgcagcagccaggcggctgcgttacacacctccccggtggtgcagctttcctcctgttcgtggcgggcccggcgccggctatcctccgggcacagatagccgctcccagcggggaaatagggcggattgcaggtgaccagccggaaactgtgggcgggcagcaatgtgcggatctcccggagatcaccccgcaaaggggcgaaatgcgtgagcgaggagatttccgctgtttggcgcatcaactccacggcatcaggggcgatttccaccgccgttacagactggggtgggcgttcccggcgcagcatcagcagcccgataatgccgcacccggcgcatagatcacacaccatatcaatgccgcgcaccgccgcaaaatgctccagcaggaaggcatcagtgccaaagcgatgggcatcattaatggcgatttgtattgtttcagatagtttttcccattgcatggcagcgccccctccttttgtgaattccctataaagagtatagcacaggatgcacaaaatcggaagaaatgttttggcgggaaaaagaaaagatttttcgaaaaaaccagcaaaaagtgcttgacaagctgttgtgattataatataataaacaagctgtcacctacggggaggcagcggagatgcaccttgaaaattgaacagcatt

SEQ ID NO: 103 - DNA, 20466 bp, Unknown
  16S sequences of unknown bacteria
tccagtcctccatcgtatccagatgcatcatctgttcgctgcgggcgcacagcagcgcacgcaggacagatacgctgctgctctccttgatgcggtataacgaggcgcaaagccgccagaaatctgtctcaacaaatgaatcatcatcagcgaaccagtcttccacgctcttgccccgaagctgtttttcctcttccatcatcagccggttcagcaggcggcgctgcgcgcggtcaagcctgcgctctggcaggacgatctgctctccgtttcgcatgagcaccctgcatcgggatccggaaagctcctgcgcggacaagatgatatcgtccttgagcgaggcgccctttttctgctgagaggggatgctgcgaagcagatcccagaagcagtcaaatccctgcgcatgcacgaacagctcggcgccggctgcttcgcaggcatcgccgtcaaacaggccgtcacaatccagcaggtggatgttctccccgcgaaagttgtactcgcggatcagcagcgccgcggcgctcaacgcgctcagcgtggaaccgctgatgaacgcgcgctgcccctgcccgctgtgcacataagggttctgttgttttttatgattcagcgaatatgcggcgccggctgccagaatggctcctccggccgcaaacgctgctgccatcttcttgaaatccatcatgactcctcccatcatttgctctaattatagtatgaatcatagaaaagtaaagatgtcccgacattttcacattttgcgtgaaaacgcgggacatcagctatcgtttgacatgcgtatggaacagcatccacacgcccagcagtacagcggcgatgtaccccatgaaccccagcgccggaatgccgaagatccgcggcgtcatctcggtcgtgcagatcagcgatgatccgatcagcagggccgcggcgacgatgcagacgatcagcttgttgaccatcttgtcgatcagcgaaagcggctgaaagctgtccatgacctccaggttcaccttcagccttcctttattgatctgatgcagggcagaggaaagctcggccgggatccgggcagactgcgccagcaggctcgccgcctctttgacccatccctgccctttttccccggcatcccgccagccaggaaagccgccgctgcccatatgccggatcgccgtcgtaatgatgttggcgtccggatcgagcatggccaccgtgctctctgcgctcaccaggccgcgcgccagcatcgagatgcccttaggcatagagatgtgatgccggtgcgccacggtgaagatatcctgcactgcttctcccagattgatctgcgagaggctttttgtcatatacgcccccatcagcttttccatatcatcatagaggcggtgataatcgacctgtccatcatgcacgcccaaggtcaggatcacatcggtcagctcagtgatgttctccgcggccatggccgcaaacgccctgcggatcaggctctgttcccgatcgccgagctgtcccatcatgccgaagtcgagccagacgatctttccatcccgcacccgcaggttgcccggatgcggatcagcgtggaagaagccgtcgtcgatgatctgcttcatgtaatgatcagcgagcttggcggcgatctcccggcggtcatagccattctcctccaggcactccagatcatcgatctcacatccgccgatatattccatcaccaatacccgcgatgtcgtcagctcgcgatgcacgctgggctgcgcgatatagcgcacttccccgttgagcttcgcgaaacgctgcatgaaggcggcctcattgatgaaatccatttcctgctttgccgtttcccagaactcatcgagcaggatgtcgacatcgatcacgctgcccagcagctcagagagattgagcagcttgctcgccctgcgcagcaaagtgatatcccgttccatctgcgcatagatatgcgggcgctgcaccttgaccacgacatcctctccgctgcacagacgcgccctgtgcacctgcgcgatcgacgctgatcccagcgaacggtcatcgaaccaggaaaacagctgatcaaggctgcaggcgtattcctcctccaggatctcatgcacgagcgccggctccatcggcgccacgctcgcgcgcagctttgccagttcatcgcaataacgcttggagaacatatcctggcgtgaagacatcagctggccgatcttgatgaacgtcggtccgagatcttcgatgatctcccgcatcttgacgggatccatcccctgcgtgacgtgatgctgatgcaggatcttcaaaatggccgcaagccgctgtgaactgctcagcgattcatgcttcatcgtctggaccggactgaacctcgcggatcacttccttcagctgctccagctcttcatccgacatcgaacggatctgactgctcagctgctccatgcgctgggctgcccgctcgctcttcgcttcatccacgcgggtctgaatgtgatgcttgagctcttcattgagcaccttgccctgttcgatgctcagctctcctttttccaccagatgatctaccatgtccctggctttttccgcggtaacggccgccgcgccgatgcccagcagaaacagttttttcatgtcatcgctcaatttgtcgatcatgatcatcactcctttatcagtattgtaacactttctgcacacgttcacacacgaaagcgtaaaaaaaagaggaagccgaggccccctctgtatgtacggcattacttcttgatgttgtagaatgcgctcttgcccagatactgagcaatgccctcattcgcaccgcgctcgttgagctcatcctcgatgcggatcaggcggttgtacttcgcgatacggtcagttctggacattgatccggtcttgatctgtccggcgttcagaccaacggcgatatcagcgatcgtcgtatcttcagtttcaccgctgcggtgagatactacgcaagtgtatccggcttccttcgccatttcgatggcatcgaaagtctcggtcagcgtaccgatctggttgaccttgatcaggatcgcgttggcgatgcccttttcgattccttccttcaggatagaaggattcgtgacgaacaggtcgtcgccgaccagctggatcttcttgcccagacggtcagtcagcttcttccagccgtcccagtcacgctcgcccagaccatcctcgatggaaacgatcgggtacttttcgatccactctgcatacatgtcgatcatctcgtcagtcgtcttgttgccctgaccagatttcttcagctcatacatgccggtctcgtggttgtggaactcagaagcggcaacgtccatagcgatgcagatgtcttcgcccggaacatagccggcagccttgatcgcttcaacgatcagttccagcggctcttcgttgcccttttcgcaggacggcgcgaatccgccttcgtcacccacgttcgtgttgtatccgcgtgccttcagcaccttgcgcaggttgtggaaagtctccgcacccatacgtacggcttccttctcgctcttagcacctaccggcatgatcatgtattcctggaagtcaacagtggagtccgcatgagatccgccgttgaggacgttcatcatcggaacaggcaggacctttccgttgaatccgccgaaatatttgtataaaggcattccatagaagtcagcagctgccagcgcgcatgccatagatacacccagcgtagcgtttgcgcccaggttcttcttgaacggagtaccgtccagcttcagcatcagcttgtcgatcgctacctgatcgaggcagctcttgccgattacagccggagcgatgatctcatttacgttcttcactgcctgggtaacacccttgcccatgaaacgtcccttgtcgccatcgcgcagttcaagagcttctctttcacccgtgctggcaccgctcggtaccattgcgcggccgaatgcgccgctctctgtcagcacttcaacttcaacagtaggatttcctctggagtcgagcacttctcttgcgtaaacatcaacgataattgacatgtcaaaaattcctccttcgcatgacttaatgatacaacgacggcatgaattatgcaaggtcaaagtcgcttttccctgccttttttcacgcttttttctcattttgcagcagctgcgcgcaaaatggaaaaagcgccggaaagtccggacgcttcttggtttccttactgtttctcgatgaattccagcagctcgcgcgcggcgatctccagcccctcacgctcttccttgttgaagcccaggtgcgtatagatctcgcccacgaacacattgttgtccttcaggcactggaacacctcgtcgatcagcggctcgcagatctcctgcttctgcatcgggccaaacgggttggcaaagtatgtggtagagatgccgacctcctgtgtcgtgcccagcgccatgcgcttgcccatcttgcaggtcgccttggcatcctccatgtcattgaagcggtgcatgcccatcttgttgtcatagttgttcgcatagcagaacaggtcgatgcgatggttggtgctgacgacttcatacggcgctgccggcgtgatgacacgggcattcttggactccggagacatgaacacgcttcggtccatatcccgatacggcgtgcccggatcaaggtcatccagacggatgaacgcaccgatctctgtgccctggccgtatggaacgccatcttcgatatggatcgtgcccatgtcgtcaaatacgacctcgatgctcttgatcttttcattgcccagcgccttcagcgcttcgatggactcagactttccggcgccggaatcgcccatcagcatgatgcccttcttcttgccgttcttcagcgtgatgttcacgaaggcgccgtggatcggcagccatcccttctgcatcatcgccagattgtgcagcgtcagggacatcttcttcagatagccgaaatactcgatgcgctgattatagcttacgcatccgacccagatatcttcttccgtatcatgatagaaggtcgtctcatccttcccgtcctcattgccgaacaggcagatcagatccggcttctgcgtgcactcctcgcggttggccagctcgaacaggttgcccagcgatacggcagaagcgaagaaatcgcggtggaaatagatgaacgcgagcagcgaaccgatcttgcacggatagcagaaccacgtatccgcatccccggtgaactcctggatcggattgtccttacgctccgtgaacatgcctgtacgcttgttggaacgcgggtgcaggatcatcggagtacgaagcatgacagaatcgatgaacgggatatctgccagagcggcatacttttcgcccagcttggtctcattcttgcgcacggatacgccggcgttggtgcctgcctgcatctgacggtatacccggttcttgcggcccatgacacgctcttccatcatacggtacagcgcaaggatcgtattgttgaaattcgaatccagcagcacatagctgtccatgcccatctgctgttccgtaccggcagaaaccacggagaaacgctgatgcatcttccagtaattgtacagctggtctacgaactccagcagcttcgccttgtcattgagataaggagactcgacttcctcacacttgaagatacgcagcatgcgaaacagcttgatgatttcaaacgtcgcttcacggccgctcttgccctgcagggcatatatatagagatcttcgtcaaaattcttcagatactcgatataagtgcgcataaaattcgaaaaggtggatgaggtcaggaaaacttcaccgtttttcggatatgccttgttaaaattgacaatggcaagatcatcattcaaatagattgattctttcattcttgtagctcctccttttttacatgtcctagacattataccgcatccatgaaaaaaacaaaacaggaaaagaaaaactttcatgatggatgcgttttctttcatcaagaccgacctggccgaaaactgcgattttaggcgaaactttcgcgttcagacacagatccgtttcattttaccataatttgttagccattgctagccgattgcgcacatattctttttctcagattgacaccgccgtttatccggtgtacacttacagcgtattaagttagcttatactaaccattttagggagagatgttcatggcgatgacagagacaaagagaaaatatctgctgacgatcgcactgctgcacaaagcgccctgcctgccctttcggccgatcgatctggctgtgcgcctaggcgtatccagggccagcgtcagccggatgctgctggaatttgtcaaagaagggctgcttctgcagaaagaccacagctatcagctcagcgaggcagggctcgccgcgatcgcggaagcgctggatcattaccgcacctattacacattctgcacgacgctgctgcagctttccgcctttgatgcgcacgaatgctgcatttccctgctttgcggcgcagaagagatgaccctgaagcatctcagccagcagatgcgcgcgctcatgaataccgaagaaaaaggatgacgtttcgcctctgcagacgaaaccaggaagctgctgcctcctggttttttttgcgtatcctgtcgtttcccgtcttttccccgggcaatgatcaggcgagcagcctgatcacctcagctgcgacatcctcgagggcgatctctcgcttctcattgttctgacgcgataccagttctacctttccctcgctgatcccgcgtccgaccgtgatgcggtaaggaatgccgatgagctccatatccttgaacttcacgcccgggcgctcatctcgatcatccagcaatacctctacgccctgggcgcgcagctgatcatacagctgttctgccgcctgacgctgctgctcatccttcatggagatgatcacgatgctcaccgcaaaaggcgcaacgctctgcggccagatgatgccatgctcatcattgtgctgttcgacgatggccgccatgcagcgctccaggccgatgccatagcttcccatgacgaccggctgcagatgattgtccttatccaggtactgcagtcccatcgtctgcgcgtatttcgtccccagcttgaacagattgccgacctcgatgccatgctcgaatttcagctttccgccgcacttcgggcagatgtcgccctcatgcacctgtgcgatatccgctgtcttctccacctcgaagtcgcggacattgacattgatataatgacagtcgctctgattggctccggtgatgaagttcttcatatgagagacctcgcggtccatgatcagcggacagtcgatgccaatcggtccggcaaagccgacacgggcatgcgtcacgcgctcgacctccgcaaaatccgcaagctccatctcattggcgcccagcagcttgagcacctttgtctcattcagctcacgatctccccgcagcaggaaggcatacgtcttgccatccacacggtagaccagcgtcttgacaaagttttccggcttcaggtcgaaaaatgccgccacttcttcaatggtcttggcgttcggcgtctccctcagttcatacgctctttcttccgccacatcatcctcctggctttccaccacttcggtgatctccaggttgctggagaaatcgcagtgctcgcagccgaccacgatgtcctcgccgatgccggtcactgcctggaactcttcggaaagcaaaccgcccatcgcgccggtatccgcctttacgatctgatagcggatgcccatgcggtcaaaggcattgcaatatgccgcatacatcttctgataagacacatcgagcccatccaggtcgacatcgaaggaataggcatccttcatgatgaattcacgcacccggatcaatccataacgcgggcgggtctcatcgcggtatttcgtctggatctgataaagattatacgggaagtccttatatgatcttcctttcatggatgcggctacggcaaagagctcctcatgggtcgggccgagcacatagttcttctgataacggtccttcagcgcgaacatattggatccaaacgcctcgcgccgacctgatctttcgtaaacatcctccaggatcagcgccggcatcagcagctcctgcgcaccggcatgatccatctcctcacggacgatgttttcgatcttcgccaatacctttttgcccatcggcatgatcatatagatgccggcactggtctttttgatcattcctgcgcgcaccagcagattgccgctgcggctgtcctcgtcttttgcgtcttcacgcatggtataaaagaagctgtttttcaatttcattgcttttcgttcctttctcaatatacatgacggccgctgcggtcgtataccttacggatcatcgcgtgctcttccagcggcaggctgcatttcatcctgaccatctgcatcggctgattgagcacctcgagcgggcgtccttccagatcgcagacatctccgatctcaaagcgggtggagggggtatgcggcccgaacccctcggcctcgatatgcggccggaagtggttcttcacctgcagcagcgccgtttgggtcacctcatcataggcgatgacatccgcgatgtattcctgcgtcaccccggcgccgttcacgccatagagatgaccgccggcctgcggaaggccgcggtaaaacccgcaggatgtcggacgattttccgccttggcgatctcctgttcataaaaggcgatgcgcgatgcgtccagcacgcccttttccatatactcatcgatgagcgcgcggtacgcatggacgaccgttgcgatataatacgtgctcttcatgcgcccttcgatctttaagctggaaacgcctgcatcgatcaatgccgggatgtaggccgctgcctgcagatccttgctggacatcgagaacagctcctgttcatccgatatgcgcgtatccccctgatacagctcatatttccagcggcagctctgcgcgcatccgccgcggttcgcatcgcggttcgtcatatggttggagagcacacatcggccggaataagaaatgcacatcccgccatggatgaacacctccaccggaagcacggaatgcctggtcgtctccgtgatctgcgccaaagagcactcccgggcgagcactacccggtgcatccccatctgcttccagaagcggatggcagaggaattggtggtggaatgctgagtggagatatggacctccagctgcgggaaatgctgcacgacaaagcgggcgatggccggcgaagcgacgatgagcgcatgcacgccggcctcacagagctgctccacatactccttcagcccgtcaaaatcatcctcgtgcggcagcatgttcacggtcacatggaccgccgcgccatgttcgcgggcaaacgcagcgccctcgcggatatcctccagcgtaaaattgctggcacgcgaacgcaaagagaactgacgtccgccgatatagaccgcgtccgccccatagcggacagcagtcttcaggcgctgcaggtcaccagccggtgcaagcaattcgatcttgttcatgatggttcctcctcacttcaccagactggtcttcgtataataaaagccttcgccataacagcctgatggatcctctcggtcccatcgttcgatggcctcctgcgggctcagcctgcctgccagcacgctttgataatcgctgagcgcccggacgctccaatcatcatcgcggaagatgctgtcgatgcgcaagcgcgatacgccgctttcgaccagcgtcctgatctgggcaaagctttgcagcgtatattcgctgaacacatgggtgccgccttcatcctcgatgatgggcatatgcgcttcgcgcgtctcttccttcagcgacaggtcccggcacccatgcggatcgtcatccggccgcttcagaaacgcaaaataactgtgcagcagctgccgtctgctgtgcatgatcgagaagcgcccatgcacgagcatttccacgccgctgcagcgggaagcgatcgcgcagatctcctccagtgtgatctccctggccagcgaaacgccctgacacccctgcgcgcggtaaaacgccgcgtctgcgctgttggtgatcagcgtgtccggctgatagacgagacgatcctgcatccccagctggatggcctcatacagcacgccctcatccgcgaaataaacggtatccgcatcgatctccttcagcaggcgcagaaacgacctgagctgttccagctcatcttccatgaagaaccgcgtgcagttcacggcgatccgcatgccggcatcatggatctttgcgctgagttcggccagctgatcgcaggaaaagacccgcgcagcgcgcagcgaaaaaaagggcacggaaacgagcagttcatccgccccagcttccttcagcttcacaatagcatcctgttcacacagggtcacgatccattgggtcattcgcgctcatcctttcaaacggaacaattatatcacatttatcatgtattggcatcacagcgatgataaaacatacgttcgatctgtgtcagcagatctgctcgctcatccgcagcgatccaagcgctgcgtgcggcgtggatccgtctgcatagcagatccgcggcctcatctgcatcgctttgcgccgggacgacggcgagaaacgccagatcaggatctgcggcacagggaatgacacaagtacgggcatacggcgcatgcacgctgccgctgatctcatccgcccgctctctcgccatcaccatgcccagcatgagcgcctcgctgtcctctggaacacgatcgatcacacaggcatgcgcgacggcgctgcacagcgaagccagcaaggccctcgcttccttccctttcggcgatgccggcagataagcgtgcaggatctggctgcggacaaagaaggtgaacacctccgcctcatgcgcctgcagctgctgccgcagggcagcgctctgcgctgcgctgaagcagtgcagcacttcatagcgcctctgcttttcctcatacagcgcgcccccgtcaaacaagatcagcggatacggcagtgcgccgctgtcatcacgcggcggaagaagcgcgctgtatgtcaggttcatcccctcatccagcaggcgcttgaagcggaccgaacgcaatgcctccggtttcttcccatccatggaaaaataagcgtcctgcacgatgaacagcgcatctttttcccgatgacggggcaaatggaaaaagttcagcgcgaaggagaccgcgatgccgatgagcgtatccaggatacggttgaaggcgaacagataaggatcggcgtccgtgacatgagagacgacgatgctcatgaacacgacgcatgagatgtaagatgcgctctttttgttcaacaggaccgttacataaatgatgagcagcaccccgagagagaccagaagggcatggatcagcgtcccttgcagatgcaggcgctgctcacccgccaacagcaacatgccggccagaccgccgatcagcgtgccgaccacccggttcatcccgaccctgatgctgctgccattatcctgctgcatgcagagcactgccgcgatgcaggaataaaagaccgcgccttgtccctgacgcgccatgttcagcagcagacataaaaagacagctgcagctgacttgatcatccgcagcccgaccttgggcaacctgctcatgttcatcccctcgattctcccctattataatgacaaagtacgggcaacgcaagaaaaaaagcgcactgcgttcagtgcactttgcgtaccatcagacgctctgccggcagcgagaggatgagcgcgtgacatgcctcatgaatatgcttttccgtccgcagcagcgaaacatggcgctctcttgcctctttgagcagcgtatcgctgatcatggaagcgccgcagacgatgacacagcccggcgtgctgcgtacggcctgcgaaagcagctgtctgtcgccctccgccatacagatcatatgagacagatcgtctcccggctcgcccgcgaagatccgcattcccttccagcggctgtgctgcgcatcgaaacacagcgcagcatccagcgccgaaccgatctcctccagcgtcagcgaagcgatcatccggtcggtaaacgcacggttcccctgcagcagctgcaggatatgccataacgggatgaccccgtgcacctcgccgctgctgccgcagaccacgatattggagatcttcggcgtatgcagacggcggcagacatccgcgagccgatgctgtctgctcaccatcagacagtctttcatcacatgatccatttgaaccctcccctcatcagcatgcccgtttccgatcgtcttataccaataaaaacgggcagcatcactgctgcccgcatatcatgaagattagatcttttcttcggcaagcgccttcagacggcgatgacgtctcatggcatcctgcttcgtcttctcgaacatttcataagcagtctcgcccttcagcttcggcagctgagagaaacgagtctctgtcatcatgaagtcgagcatcttgtcgtaatccggctccttggagtcgatggtcagcggctgctcagcttccggattgtagcgatacagatccacataaccgcattctacggccttggcctgcgtcttctggtggttgctcagaccgcccttgatgccgtgctcagcacacgggctgtaagccaggatcagagaaggaccgttgtaagcttcagcttccttgatggccttcagggtctggttcttgtttgcgcccatggagatggatgcgacatatacatggccgtaagccattgcgatctgtcccagatccttcttcgccgtcgtcttaccgccggctgcaaacttcgcgatggaagctgcctgagaagacttagaagactgaccgccggtgttggagtagacctcagtatccagaacgaggacattgacgttgacatcgcttgccagcacgtgatcgagtccgccgtatccgatatcgtaagcccagccgtctccgccgacgatccagatggacttgctgaccagatccgtatctgccagtgccttgacatcggcaatatcagactgtgcagccagttccttgatggtcttggacagttcacgctcagcttcgcggttgccctggatctcgatgtattttgtgaatgcttccttcagctccggcgcaacattgtccatgttgtcttccatcgtcttcaggatgcatgcctgcttgtagttttcagccagtgccataccataaccgtactctgcgttatcctcgaacagggagtttgcccatgcgacaccttcaccgttcttgtcattgacaaacggcgtggacggtgtagaggagcagtagatcatggagcatccggttgcgttggcaacgagcatgtcgcggccgaacagctgagaaaccagcttgtagtacggcgtctcaccgcagcccgggcaagatccggaaacctcgaagtaaggcatcaggaactgagaacccttgaccgtatctgtagagaagtagtcgctcttgtactctgtgtgcttgaacaggtactctgccagcggctcttcatcgagcttctcgttgatgtcaaccatctcgagcgccttgttgccggcctttccaggacactcaacggcacacagaccgcagccgacacagtttgccggagatacctggatgcggtacttcagctgctcaacgcccttgcccatcgcctgcagcgtttcgaattccatcggtgctgcagcgacttcctcttcgttcagcaggaacggacggatggttgcgtgcggacatacataagagcagatgccgcactgaatgcagttttcaggatgccatgtcggtacctgtaccgcgatcgtacgcttctcttcgaatgcgacattgttgcggatggaaccatccagcaggttgtacttcgtgaacgcggataccggcatatcatagccttccagcgcattgatgactgcgacatggttgtcgaagtactcatcgccggtcagcttgcggttagcgtcatacggcagctctgcccagctcggatctacagcgatctcttccatgccgtcttttccggcatcgatcgccttgtagttcagctgtacgatcgcatcgcccttcttgccgtaagacttcttcgcgaaggccttcatcagctccagagaagtctccagcggcatgatctgctcgttcagcgcaaagaacgcggactgcaggatcgtattcgtacggcgccccatgccgatctcctgcgcgatcttggtcgcgttgatgatgtacagcttagcgtgcttcttcgccagctgcgccttcatgcgattcggcatatgatgcacgatctcctccttggagaacgtcgtattcagcaggaaggtacctccgtccttcaggttgcgcaccatgtcatacttgaacatgtatgcgtccaaagagcaggagatgaagtctgcattgttgatgtagtatgtagagcggatcggagacttgccgaaacgcaggtgagaacgggtaacgccgccggccttcttggaatcatatgcgaagtaagcctgtgcgtactgatccgtgttgtcaccgatgatcttgaccgtggacttgttcgcggaaaccgtaccatcagaacccaggccccagaacaggcaggaagtgtagtctccctcgatctggaagctttcgtctgcaggcaggctcaggtgcgtcacatcatcctcgatgccgatcgtgaatccgttgatcatcttgtcttccttcaggtgatcgaatacggccttgacatggcacggctgcgtatccttggatcccagaccgtaacgtccgccgatgatctcgatatccttgtggtccttcagtgccgcaacgacatccaggtacagcggatcgcccattgcgccggactctttggtgcggtccagaacagcgatcttctttacggtggaaggcatgaccttcagcatgtattccggagcgaacggacgatacaggtgaaccttgatcattccgactttttcgccctttgccatcagcgcatcgatcgtctcgtgcgcggtctcagtgatagaacccatggcgatgatgatgcgctcggcatccggtgcgccatagtaagtgaacggagcgtaatgacgtccggtaatctcagaaatcttttccatatattccgctacgatggcaggaaccttggcataatgctcgttgcgcgcctccattccctggaagtagatatcatcgttctcagcaccgccgcgcgttaccggattggtatgcgggttcagcgcgcgcttgcgataagcttccagcgcatcgtaatcgatcaggtccttatataattccgtgtcgaacacttctaccttctggatctcatgagaagtacggaaaccgtcgaagaagtgaatgaacggaacgcttgccttgatggcagccaggtgtgcgacaccggccagatccatcgcttcctgaacggaatggcttgccagcatgcagacgccggtctggcggcatgcgtaaatgtcctggtggtcgccgaagatgttcagcgcacgggatgccagcgcacgtgcagatacgtgcagaacgcccggcagacattcaccgaccatcttgtagatgttcgggatcatcagcagcagaccctgtgatgcggtgaatgtggtcgccagcgtaccggcctgaagagcaccgtgaacggcaccggctgcgcctccctcagactgcagctcagcaaccttgacaacgttgccaaagatgttcttgcgtccctgatttgcccagacatccacgacttctgccatcggcgaagaaggggtgatcgggtaaatagcactcagttcggtaaatgcatacgcgttatgcgcagtggcggtgttaccgtccattgacataaatgtttttgccattagtagttttcctccttgcgtaactttacccatacattatagaccgaacttctgtatttttaaagaacttttttgtaaatttcggttcacgctgtgagcgctttttccatcggggtccctgcccggcaaaaagcgttttctctcgtaaaaagaagaggatcgcccagatcctcttcgtcactcacagcaccagctttgtcggccgtgcatcctccttgatgatgacatccacctgcactgcctcgccggcaggcagcgcaaatgaggcttcgcgtgcttccgccatgccatcctgcctgtacatgcacggcatggaggagcgcagggacgccttgcccggggccagatcatccaagctgcgcgcatagccggccgccgccgacagctcgatgacccgcggctgatccccctccagcgtcacccggaccttttcctgatttcggggcagatgcaggtttccccgttcatcttcgacccaaagctgcagcttcaaggatgcagctgatgcagcttgttctgcggtaatgatgacatcgtgatcatcatcagcaaagcggatggtgcaatgctcacgcggtccctgcccatcacagtcatacagcagcgggatatccgaagcggcagaaagcgagtacagccccgcttcgatcccctgcagattccgctgccagccattttcagcgctgagctcgacctcatattccgcgccgctcttctgcagcaggaaacggaccggctcatcggcctgttcgagcctgatcgtcagcgttcccccgccgctgctttgcgcggggttgatcgcctgcacctccaccggtccatcgctgatcgtgaccaccgcgtaatgcacctcgctgcccccgtcgatgcgataggtcgtctggccatcgccctgttcatccagcacataggtccctgcatcgaggaaggtcgcatcttcatgatagccattggcggcagtgagcgtgatgcgctcttcaaaccccggccggctcaggatgaaggtgtactccccctcctgcggtctgaccagctcgtttcccctgcggatatacttgcgcagatggatgcttccttttttcagcggagcgcctgccatcaacaggtccacctgcacctcgccctcacggatgacggcaagcccttcctggctgggcgtctgtccgtccacctgataccagatattctcctggtcggtgtggatctgatagatgcccggctgcagatgcgccaaagaggcaagccagtgattcgactcatcgaggagcagttcccagcacatggatccattgctcacctcggcccacaggctgacgccgctttgcggcttgactttgtgcgtgccatcccatgaccaggcttccaggaccagcgatccgctgttcccctgctcttccttgatcaccttcacatgatgcgcgccgccatccatctcgaacaccgcctcctgcgagagcacgccgtccacgacgaaagcatacgtctcgcctgcggccgggcgcagcgcatagcttcccgcctgcagatcgccaaggcggatgcgccactgattatcctcattcagctgcaacgtgcgtgtctcatccgcatgcagaaggcgcaggttgaagacggtctgggacagcggctgcttcagacagtcgcattccgtatctctgcggcagccctgcacatacaggacattgttttcctcagctctgcggacgaagcggaagacgacctgggaatcggacgcgagcttcgcctttccgccgctgatcttctctccatccaccaccgtgcacgcaaagcgatagcccgccggcgcgttggcatacatctcgtacatgcctgcggtgatggcgcgctgctgatgccagtcatccccctggctgaacaccagcgtctcaaaatagctgcgggagacgagccgcacggtaaagacatccttttcctgcggcgggatgggattgccttgcgcatctgcggtgacgatcgagaaatcggccatcttcgcttcgtcctcctgctcctgcagcacggcgctaagcgagatcgtacgggtgcctaggctgacctgaacccggttgtagctctgcgtattgccgaggtagaagcagacattctgcgtcttcgagcagatcgtatacgtgcccggctgcagcggcgagatcagcgcgctccagccattgtgcgcatccaagacgatctcctgctccttgagcgatcctccaaagatgctcaagacgatctgttcctgtatgcattcatgatactcgccctcgctcatgcacatgccgtcgatgcggatgcccgcagcggcgcaccgctcgcagaccaattcggcataagatgcgccttcttccaggatgaaggactttccttccatccgctttccgttgacatagaggacgctgtcttgtccgctctcctcctgcagcgtcaccttgcccgggcacagatcgtggatggtgcagcagaaatcagcggatccatccagacagatgcgcatgctgtcctgccgatcgctcaccgtgacgaactcgcgctgtccgctcggcgggagcacacgctcgccgttctcgtcttgatccctgcggcaaagggtgagcgcgcacgcgcaaggctcttcgatcatgatgacgcacacatcctcctgatcgaggacaaagcgggcctgctcatgcggcacgccgtcgatcaaacaggtatacatgcgccgatcggccccgatcagcgtatagctgcccggctgcagcccatccaaacactgagagaagccgtttgcctcatccagcgtgatcatctgatggatgccttgtccgctcagcgcgaaacggaccgcagcgcaaggcagcacgacgttgccttcctcatcccgcatgcgcgcctggatctgaagcattgagctgcgcgaagcagggttgatcaccagcatgtgcacatcccgcgaaccgagacggaaacggccatcctcctgcctgcggtcatcgacgatgaatgcgcacgggatcatgtccttctccctgatctcatgttccccgcgggacagatcatcaaaccagacgcagtacccattctccttgttcagctcgaagggcacttccattccatctgtatacagcaccatcggataagcgccgccctctggacagcacaggtttccgcattcatcctccatgcgcttttccacacagacgctgccccggcaatgcgcatagcgatgcaccacgctgatcgtgctttccttctgcagggtgaacgtgcagctttcgctgcggcggccgtcgcactcatacaggatgtgatagcccatcgtctcttttacccgcacgctcacgcgctcttcgcaattgccatacagccttgcctgccagcggttatcggcacacaggcggacctctctgcagaagctttcgccctggacgatgatggtcgtctcaaaggcgtcatccggacagaccgtgcgtccttcgcaatcctccatccgcacatccaggcgcaaggcgcagcctcttggcaggacattgatgaccttgacttcctgcatttcccggccaagcgtgatcaccgcttcctcctccctcgttccattcaccatataatagacctcatcttcatacagctcctcgatccggtattcgccataaggcagttcatcgatatagacacaccactggttggccgcattcagcgtcactgtccgccgcagcccgtttccgctgatgcagatcaggaaatattcgctgcgctccggctgcatcagcatgcaccgttcattctccatcagcttttcgatgcggatcgttcctgtccgcggatcattgaggttcaggatgcgcacctcatgcatgcgcgcatcatcgatgatcactctggcgctgcgcgaccattcgccctgatccacgctgtacagcacgttttctccttcgctttcccggatgtcatagcaccctttgggcagctggtccagcgcgatgcaataatcgttttgctcattgagcatgaaggtctcctgaaaggcgaaggaatgcaccctgaccgcatagcatgggccatcgggctcgaccagacagccctgatcatcttccacatatttgcagatctgcagcttgccgttgttgcgctgttcattgacgatgatgacctctgcgcccgaactgccgtccagttcgatgagaccgccgatgagcacggtcccatccgcaagctcatagctcgtggcatacccgtcttcctcgcattcgctgacccgataacagcccgggcacagatctgccagctgcacgctgaaatgattttccgcattcagcaggaacgtatgcgtcactccgcagccgctcacgctgacgcggaatcgctctccttcatccggttcgctcagacagccgctctccgtgcggatcatcttgcgcacccgcagcgaaccggccgg

SEQ ID NO: 104 - DNA, 11351 bp, Unknown
  16S sequences of unknown bacteria
taggatagcagtgagcagagtcctgcctgttcgtgtctgctgcggggaagtggcagttatctgccctggaagcgctgacccgcattcggcggcactttctatataaaaagccctccggatcaccttcggagggcttttgcggttggatgcggaaaactgcggtttattttgccagacaggcttccgaaatctcccggtgggctgtttccagcatgtcggggatccggatgtgctgcggacaggccttcatgcacttgccgcactttttgcaggagtcggcccggaacccgtctttcagacgctcaaagtaggcagcccgggtcatatccgcattgcggaacagcttgaagttgttgtaggccttgaatacctcgggaatatccacgccgaagggacagggcatacagtactcgcagccggtgcagggcacagtgtggacatccaggatcttgcggaccacggtatccaccacctgctcctcagccggtgtcatggtgaggtcgccttcaaaggtgcggatgttgtcgatcatctgttccatgctgctcatgccggacagggtcaccttgacattggaatgggaagctacccacttcagggcccaggaggcaggagagcgatcggggtcatactcccggaagatggcattgaactcctccggcagtgtggacaggaagccgccccgtaccggttccatgactacgcaggggattccacggctctccagggtctggtagagctgatcggcgcccagcagatgggggtcgatgtagttgtactggatctgggcgaaatcccagggatagcggtccacaatagccgggaaccgttcggcgggatcgtggtaggagaagccgatgtaccggatcttgccctcctgctgcttcttgcggcagaggtcgtagaggccctgttccagcaccttgtcgaaccgtgccttgctcagggcatggagcagatagaaatcaatgtggtcggttttcagacgcaccagctgttcctcgaagatccgctcgaaatccgcttcggattccaccagccagaccggcattttggaggccaggaagaagctgtcccggagataccggctcagagcttcgcccacaaacggctcggaagtaccgccgagatagggccaggcggtatcatagtagttaacgccatgctgataggcataatcaaacatggcaagtgcctgttcccggtcgatggcatcgcctttcatcggcagacgcatacagccgaatcccagcttggacacttcaatacccagacggtccaatttggacattttcatgcgcagtcattcctttctgaactttggataacttcagcatagcacaaattctgccataaaacaatcacaggtccgggtgtgtaaaaatttacagaattgcggaggattgtttgttgacctttccggaggattgcgataaaattaaaaactgtatcagtatgtccaaagagagaatttcagctttgtatgacagaaagggaggacttttgaaatgatccgtattgcaccgtcgattttgtcctgtgattttgcccgtttgggagaggaagccgcagctgtccgggaggcgggagcagactggctccatgtcgatgtgatggacggacattttgtgccgaatctttcgctgggtgtgccggtagtccagagcctgcgcaaggcaacggatctgttcctggacacccatctgatgatcaccgatccgctcaattatgtggagccgtttgtcaaggccggagcagacctcatcaccttccatctggagagcaacagcgatcccgaagcagtgattgaaaagctgcgggaactgggctgcaaggtgggccttgccatcaatcccgatactccggtggagaaggcctatccgctgctggaccgggtggacatgctgctggtgatgaccatctatcccggcttcggcggacagaagttcatgcctgaaacagcggacaaggtggctcaggctgcggcataccgccaggaaaagggactggacttcctcattgaagtggatggcggcatcaatcccgaaaccgccggtgttgcagccagacatggtgccgaagtgctggtggcaggttcggctgtctatggcaagagcgactatgcggcagcaatccggtccatccgggaagcagccgctgccgggaagtaaccattactgcggcgtacacagacgctccagagcgttttcctcgatgagggccggacagtgttcctggatcacagcggcggccagctcaccccgggcagccagagtgccgtattccgccagcagcatgacgctttcctggctggtctggtccagcggacggatcagcagcaggcagccgccggcgcactggtaaagggaactgcggaagatccggtgggaatagagctggaacagctgccgggcgcctgcaaggagatcttcggcgtgttcgaaccggaagatcactggggtgcagatgctctccagcgtatcggaggcatgggctttggagaggatcagcacacagccgttttcggtggggagggcttcgatatagatctgtccctcatccggacggaagccggcagtctgccaggcgctgtccagaagctgcagcagcagttcccgggtgggttcgtcatcggggccgagatggtcccagtcgatctcataggctgccagttcctcatggctcagggtgatgcgtactttatccggggagagtttcttgatcgtcatactatcagccgctttcagttgagaattttagtgaatgcaagggagagaataaatgcctgatttttccaaccggctgcttgcacggtttgcaggacagcggttttcataccgatggtacagcgatattcagctggcccgtcagggaatcgtattggaacagaataaagaaccggcgctttccggcggtattcagcggatctgctccagaacactggatcatgtgccgattgatgatctccaggagggagatgacatcgtcaccattgcccggaaagcggggattattgatgagaataccggacgcccgctctatctgctgctggaccgtgccagaaattccggctgccggattatcattgcagatgcgctggacgatgagccgtatatttcgagccagcttgctccggccctggagatgaccgaccagctggtgcgcggcatcgagcttgccaaggaggcagtaggggcggagagcgcccggatcgagatctacaaggagctgggggattcgccggtgaccatcggggaggacctgggcggtgtgccggtggaccgtgtgggcgccggttatcccgcggataactcgctgatccagaagcaccgggaggagaaggcctcggtattcggagcctgcgcgctgatccatctggcccgggctgtggatgagaagatcgcccagaccactgtgtttgtgacagtggctggagacggcgtgaccacctctgccaatctggaggtctccatcgacaagacagcgggagaactgctgcggcagttcggtctgtcggacgaaacgtcccgggtcgtgatcggaggctccatgcgcggcgtgaccatcaccgatctggacagcacccgtgtcactgcccagacccgtggaatcctggcaatgcgggaagtgttcaaggactacaactatacctgcattggctgcggaaaatgcgatgatgtctgtccggtcgggctttcgccttactatctctataagtttgtgcaggcaggacggtattctatgcttgaggatttcgatattgacctctgcatcggatgcggtacctgcagctatgtgtgtcctgccaagctcaaaatcgcttcggagatcacccggggcaaaatggagctggttcagtatatgaacgcaaagaaggaaaaagagcagaatgaggaggtgcgtgcatgaatctgatccacagccgaccgcctcatgtgcgcagccatgagtccaatttcagcgtgatgggggatatggtgatttccctggtcccgctctatctgatggcatatttcttctatgggagccgcacccttgtgctgggagccgtttcggtgatcacctgcactgtgctggacttcctctgcacctttctttccagccgccgggtgggaatcctggatctctcgccggtggtgaccggcctgctgatcccgctgatgctgcctgccagcattggctttaccccggtgatcgccgctgacctctttgccatcggcgtcatcaagcagcccttcggcggactggggcagaacatcttcaatcccgctgccggcggtgtggcgtttgctgtcctcacctggtcggattcggtgttccgctatccggtgcccatcgagtccctgggcaatgcggcagcccggctggtttcttctccggctgcttcactgcggctgggcgcaaccccgaactatccctttaccgatattttcctgggcatctatcccggaccgatgggcgggaccggtgtgctgatcctgctggcctgcttcggctatctggtgatccgcaagaccatcagctggcggcccactgccgcttttctggggactgcggcacttgcggctttctgcttcccccggatcaccaccggacgcttccagtcggtgctttacgagctcaccagcggcctgctgctgttcggagcgatcttcctcatcaacgaccctgccacttcgcccaagtcccagatgacacggaccatctatgcggcgattgccggtgttgtagtgatgatcttccggtacctgggtgcctatgaggagggacttgtctttgcgattctgctgatgaatgccttctcactgtttattgatatgcattatgaaaaaatccgtcaccgggaaaggagggcgctttatgcagagcagcagactgaaacggtatagacatctggtcggacggtttgacggcctgctgacccgcactccagtcatcacctacggactggcgattcccttcgctgtcatggggacagtggatgcccgtgccgccttcgcgctgagcgtcggtatgatggcaatcggcctgctgtccaccgctgtgggctgggtcctgaagcggatgggacagggaagagaggtctacatgctggtgaccgctgtgctctcctcgctgaccctggctggcctgagccgtctgccgctgggcgggttccagatgccggtgggcatgctgggtatctatttcccgctgctggcggtcaataccctcaccttcttcctggtaacccgctgtgatgaacagaaatcgctgccggcaaacctggcacaggcggcccggtcggtgctttcctttgcgttctttgtcatggcggtgtccatgttccgggaactgctcggcaagggaagcatcttcggagtcaaggtgctgggcagcctgcagatttccactgtactgatgccgttctttggttttatcctggtgggcatgctttcggcattctgccgccaggtgaaccggtcgatccgggcctggtgcctgatcaaggaccgggaagaggccatggacgccaagacagaggaggtgaaggcataagatggctggttttgtaaagctgctgatgattgcgttcactgccgctatggtggaaaacacgattttcagccgtgctctggtgacccgcaagatgctcttcctgaagaacagggaggagatcctcaccttttcggctgtcattaccctgatgactgcgatctccggtgtgatctgctatgcggcagattcgctgctgctctatccccggggagtcagcatctacatccgttccgcactctatgtcctgattatggcggcagtgcatactgccatgattgtggcagcctcccgcaaagccggggaatggtatgcccgtgcgaaaaatgtgctgctgatggctggctataatgtggcagtgctgggtaccatcctgctctgttccttcaaccggtataacctctgggagcggctgttctattttgtgggcactggtgcaggtgttacactggcactggtcctgctggatgtagccaatcagaatatcgccatgtcccgtgtgccccggatcttccggggactgcccatactgctgctgtatatcggaatactcagtctggcattttatgggctgatcggccatccgatcaccttctgattccccttcgcaaggagtgagcaagatgtttaggaaacagcgtaaagtaaaacgctatcacaatatttaccggggcagtgtgacctcttctccgtttttcaagctgggagcttccgctgcggcactggctgtgctgattgcggcaggctggtttctgtatgagccggtctatcagtttgtcatggggatcggtcaggaaaaggaaccggtatccacagcggaacagccgtccgaacctgagtcggaatcggatggattcctctcagggctgttcggcggcggggaggagagcgaaaccgaatcctcccagtcccagccggaaacggtggaagccgttcagctgcatggggtgtatatgcccgaatccattcttctggacagcacccagcgcagtcagtttatccagacctgtgcttccaatgggatcaatgccatcttctttgatctcaagaacgacaagggttacctgacctatcagagctcgctgtcgcaggctgcggagctgggttcccagtccgcctcggcggtggatctcagccaggtgactgcggagatggaagctgccgggatcacccccatcggcaggatctatgccttcaaggacccgctggcagcttcggcaaaactggaggcagcggtgcactatcagggcacagaatgggcctggctggataactcggctgccatgggcggcaaggcctggctcaacccggtgaatgagtatgcccagagctatatctcggaccttgcggcagaagccgtgggcaagggggtaaagcaggtgattctggactgtgtgcagttcccgtccgggtattcgctggagatggcggattacgggcaggagctcaccgaggagaataaatccgctgtgctggaggacttcatcgagaccgtggatacccgtgtccgggaggcaggcggtgagactgctgtgtatctgtcggcgccgactctgctgagctcctccagcgggcagtatggctcagatccgttccagctcacccgatgcggcgtggtgctgggcgtgatgccggcttccttcggcaatgcgtacagctccggagagctggtgctggaagccccggcactggacccctatgccactgtacaggcggcactggcagcctgcaaggacaagctgctttcggacgaagtgaccgtgctgctgcagagctatacttccggcacactgagttcgctgaaaaacaagacctacaccgggcaagatgtggattcccagatccgggcagcgcaggagagcggctatgagagctacctgctgtacagccctgacggcaattacagcatcgtctttggtgaataaaaccgcacagaagccgtctggaacagccaggcggcttttttgtatgctgttttctgtggaaaaaagagcatctctgtggtacaatgaaaatacaatacagacactgacaggaggtatttttatgccaacaccacataatgccgctcagatgggcgatatcgcgaaaaccgttctcatgcccggagatcccctgcgggccaaatatattgcagagcactatctcaccgatgtgacctgctacaacacagtccgcaatatgctgggctttaccggttattacaagggcaagcgcgtgtcggtgcagggcagcggcatgggcatcccgtccatcggaatctattcccatgagctctacaccctgtacggcgtggaaaatatcatccgcatcggttccgccggagccatcgctgaagatgtccatatccgggatattgtcatcggtatgggcgcctgcaccaactccaattatgccatgcaataccgcctgcccggcacctttgcgcccattgcaagctatggtctgctggaaaaggcagtcaatgccgccaaggccgcaggggtaagctataaggtgggcaatgtcttctccagcgataccttctatgatgacgccggttccctgggcgactggcgcaagatgggcgtcctggctgtggagatggagtcggcagccctgtatatgaatgccgcccgtaccggtaagaatgccctctgcctgctgacgatctcggataatcccttcaccggggaggagaccactgcggaagagcgtcagaattcctttactcagatgatggaaatcgctctggagattgcggaataaggagggaagcacatggaggataacagaagactgtttctgatcgtactggacagcgtcggcatcggggaagccccggatgccgcccagttcggcgatgaggggagcaataccgtccgtgccgctgtggaggccggggcagatctgcccaacctgcgccgcctgggactgttcaacattgacggcatggactggaccgagccggaagccacacccatcggcgccttcggacggatgcgggaagccagcatgggcaaggataccaccatcggtcactgggagattgccggtgttgtatcgccgaagcccctgcccaccttcccggacggcttcccgccggagatcatccgaaacttcgagaagctcaccgggcggaaagtaatctgcaataagccctattcgggcacccagctgctgctggactatggccgggagcatgtggaaaccggtgcgctgatggtctacacctctgcggacagtgtgttccaggtggcagcccatgaggatattgtccccattgaggagctctaccatgactgcgaactggcccgggaaatgctcaccggcgactatgcggtgggccgggtgattgcccgtccgtttgtgggcgagtacccgaactatacccgtactgcccgccggcatgactactcgctgcagccgccccgcgccaccatgctcaacaacctggaagacgccggatatgagtgcatcggtgtcggcaagatctcggacatctttgccggcagcggcatcacccagcagatccgcacccagaacaacaccgacggcatcgccaagacccttgacctcatggagaatgactttgagggcatctgttttgtgaatctggtggactttgatatggtctatgggcaccgcaatgacgcaccgggttatgcccgtgcgctgatggagtttgaccaggctctgccgaagtttatggagcagatgggggaggatgacctgctcatcatcacagcggatcatggctgtgacccgagtacccccagcaccgaccactcccgggagtacactcccatgctggcctggagcaaaaagatccgtcccggcgccaatctcggcacccgcaccacctttgcggatattggcgctacggttctggagtattttggcctggaaaaccggaccgatggtcagagcttcctgaaggagatctgcaccaaggaataacgaaacagacagggtcggttcaccggccctgtttttgcccggcacaggacagccggaaccaatctgaaggaggaaaccgatatggattatcccaagctcattgaggaggcgctgaaggcccgggaatttgcctatgcgccctattcacggttcctggtgggagcagcactgctcggcaaaagcgggaccatctaccgcggctgcaatgtggagagctgttcctatggcccgaccaactgcgcggagcgcacagcggtattcaaggcgatttcggagggggagcgggagtttgccgccatcgccattgccggaggccccgaaggggagcagagcccgctggcacatactgcgttcccctgcggtatctgccggcaggtgcttgcagaattctgtcccatggacttcccggtcattgtggcccgcagcccggaggattatgaggtgtataccctgggagacctgctgccccaggcatttactccgttatctctttaacgaagctgctttgaagtttctttcatcttgttgaaagtactgtatccctgtggaaggtattaaaacaaattgccgattttgtattcaaaaatccggaaaatgtaaactttctgttgcaggaaagcgtcgtatgttttatactggagttgcaaatatgttaccagctgcctttcccaaaaggcggcgtgtaagaagaaaaggggaagtcttaaaatgaaaaagtttttaagcacagtacttgcaatgtccctgatgctgtctctggcagcctgctccggcagttctgacaacagcagcacagcggacaacagcggttccagcgaggatctctactccatcgccatggtaaccgatgtcggcggtgtcaacgaccagtccttcaaccagtccgcctgggaaggcatcgctgagatggttgaggccggcaaggttcaggctcagtacctggaatccacggacgagtctgattacactcccaatctggatcgcttctcggatgatgagaacatcaagctgatctggggtatcggttacatgatggcagacgctatcgaagatgctgccaagaagaaccccgacaagatctatgccattgttgactccaactatcctgagaacccccagcccaacaccatcggtgtactgttcaaggctcaggagccttccttcgaggtgggttacattgccggtctgatgactgagaccaacaatgtcggcttcgtaggcggtcagaagagccccaccattgaccagttcgactatggctaccgtgcaggtgttgcctatgctgccaaggagctgggcaaggagatcaatgttgacgttcagtatgccaacagcttctcggatgccgctatcggtaaggcaatcgctctgaagatgtacgacagctgtgacatcgtattccatgctgctggtaatgttggtaacggcgttattgctgctgccggcgagaaggacaagtgggtaatcggtgttgaccgtgaccagtatgatctggaccccgatcatgttctgacctctgctgttaagcgtgtaggcaaggctatccagatcgtaaccgagaaggttatgaatggtgagaacctgggcggcactactcaggagttcaccactgctgatggctgcgtaggtattgctcctacttcggacaagaatgttccggctgacatcctggaaaagactgctgcaatcgaagagaagatcatcagcggcgagatcgtggttccttacgatgaggaaacctacaatgccttcatcgctgagctgaacgcataagatatccccttcgcatccaaaaatccctcccaggttactgggagggattttttatgcagtaagcaggttcccggttgtgagaaaggggagaagaagagtgatca

SEQ ID NO: 105 - DNA, 11591 bp, Unknown
  16S sequences of unknown bacteria
gggggatgcttatgtcagtgggagttgaaagctcccactgacaggtcgcgaagcgactgcgttcatgagcaagtagtgaagttaggatctgtcagcagagttgcagggatggattgcgaatgttcgtttactggaataagtgataacataaaataagatgcgttttataaacaatatgtaattatatataaaaatggaagaatggaaacggacaaagtttgtgaggatcacacaaacttatttttatgcatcataaatgctttacaaaccactaaaaagtgatatactacacattacaaacatgaaatataaaaataataagtggaataaaaaggaaagggatgatggaaaatgaggccaattgcagggtggctgctgtctggtattgtgctggcggcggcatgggacgatcttcgatccggacggatatcgaatcagctgattgtgacagggttgctcgcaggttttctttgtcaggttgtacagtataaggctgccgggattgtattgtttctgggcggaagcctgttaccgcttcttttgcttgggatgttgttttattttcggatgcttggggcaggggatattaagctgttctgcgtggtgggaggctttctgggcgcgatggatttactgaagtgtatgcttgtggcagtggtatttggagcggtctggtccttctggattttgtggaagcgacatttatggacagagcggttcgggtattttatgcagtatacggcgatgtacgcaaaagagcggcactggaagagctatctggatggtgtaggaaaagcaggcaggatctgcttctctttgccgattctggcaagtgtattgtgctatgtgggaggatggatttgaagaagaatatttttgcagtctgtgatctggatgcatcttacgcctgcaatctgacagactatctgaatggaaaacgaacgacgccgtttgaggtacaggcttttacaaacgtagagagcctgcaggaatttgccagagcacagccgatcgagctgctgctgatctctacgcgtgcgatgtgtaatgagatccgggaacttccgattgggcggatcgtcatactctctgagggagagcagctgcgggatctgaatctggaggagtatccgtttgtttataaatatcagtcatcagatcaattgatttgtgaagtgatggaatattatgcggcggccaatccgaatacctgtctgttcccggcaacgacagatacgaagttgatagggatctattcacctgtggcgcggagcggcaagacggcctttgcgctggcgctcggggagattctagcagagagcaggcaggtgctctatctgaatttggaggaatattctggcttcgaagagttatttgggacacattatcgtactgatctgacggacttgatttattttgccagacaaaaagaagagaatcttgtgtacaagctgaattctatcattcagtcgtttcatgggctgcaatacgtgccgcccgcgtttttttcagcagatatccggggagtgaccggagaggagtggctgctgatcctgaaacggatcatggagtattgcgagtatgatgtcattttgctggatctgggtggacagatggagggcatctttgagctgctgcagcgctgtgagaggatctatatgccggttgccgcagaccggatcgcgcgggcaaagctttcacaatatgagaagcttcttcagatgatggagcagcaggagatcctcgagaagacaaaaaagcttcaggtgccacagacggagctggacccgaatggcccggatatgattcagcagctggtatggggcgagaccgggacgtttgtgcgccgccttttgtgggaggaggaaaatgaatgaggagaagttccgtacgcttcgcgagcggttgttagaaagtctcgaggagtaccgggagatcggggatcaggaaatttatcagcgtatcgatgaactgcttctggacgacagcatggagcattacatgagactggcagagcggtatgcactgagaaaagagctgttcaattccatccgaagactggatatcctgcaggaacttttagaggacgatacgattacggagatcatggtaaatggaacggatgggatttttattgagcggtatggcagattgacgcgctgggagaaatgctttggatctgcagaaaagctgcaggatatcgcacagcagatcgtcggacggtgcaaccgcatcgtaaatgaagcggtgccgatcgtggatgccagactggagcacggtgagcgcgtgaatattgtgatgccgccggtcgccttaaacggccctgtgatcacgattcgtcgctttccgaaccgggctatccggatggagcagctggtaaattggggaagtatctcggcagaggtggctacgttactgagatcgctggtgtgcgcacggtataacatctttatatccggaggtaccggatccggaaagacgacttttttaaatacgttgtctgactttatcccaaaggatgaacggattatcacaattgaggacaatgcggagctgcagattcagggggttacgaatctggtacgactggaagcgcgcaatgcgaatacagagggaaagcttgcgatcacaatccgggatctgatccgtgcgagtcttcggatgcggccggatcgaattttgatcggagaaatccggggagcggaagcgattgatctgctacaggcgttaaataccggccatgacggatcactcagcaccggtcatgcgaatactccacaggatatgctctcacgaattgagacgatggcgctgatggattttgacatgccgctatcggcgatccgaagacagatagcttccggtattgatctgattgtccatttaggacgattgcgtgataagacgagaaaggtactacagatattggaaattctcggatatgatccgcagtcgggagaaattcggacacaggtgctatacgagttcgtagaggagggtgtggatgcatgcgggaaagtatgtggaaggctggttgcgaggaagagactgcggcggcgcgaaaagctcgaacgggccggactgacgctatagacagtcaccggcgggagcatccttatacccgcatgagcagagtagatgtggggcggtatctggcaggcgacctgacgctgattctgctgcttggctggctgttttatgactctctcgtaagcgtgattgtgctttttccgggaatgttatggatgctgcgggagcagaagaggacgtggcgcaggaggcgcaagcgggagatgcaacggcagtttttagatgcgatccaaatgatggcagcttcgcttcagtccggttattctgttgagaacgcagtgcgtgcgtcagcaaaggagctggaaaagctgtaccagcgcgatacatttattgtgctggaatttcagaatatggcattacagctggaccggaaccagagcgtggagagcctgctgcaggatctgggagagcgaagtcaggtggaggacctgcaaagctttgcagaggtgtttctgacagtaaagcgcacgggtggagatctgctgcatgtgatccgcaatacggtttcgtgtatcaggcagaagcaggagacggttgcagagattgagacagtgctgaccggcaagatgacggagcagaaggtgatgagtctgatgccgttactgatcttgctgtatgtacggctgacatcaccggagtttctgtccggtatgtatggaaatctgaccggaagggcggtgatgacagtctgtcttctgatctatgctgtggcgtatctgtggggaaagaaaattgtgggaattgaggtataggagtgtcgggacttaagtgcttttggagaaaaatgggtgcgtttctggtagacatcctgagattggatcagccggaaaagggacgtgggacgctgcagaaagagcttacagcgctgcaggtcggaagaaaagagacgatccgagcatattggattcgaaagatatgctgtgtgcttgcggcaggaatgatcgggattcttctggcggcggtcagctttggatggagtatgcttcgaagagaggacgtgccggatcaggcgttgcagcgaccagcttatggggaaggaaacaggacagaagcactggaggcggagatcgacggagaggaggtgcaggcatttgagataacggtgcgggaacgtgcctatacggaggccgaaaagcagcaacatctggaagcggctattttgacgctggatgaaacgctgccgggagaaaacagctctctggatgaggtgcggcaggatctggcattcccagagactctggaagacggagccgtacaggtttgctggacgacggttccgtatggcgtgattgatgagagcgggcgactgcttggatcggaagatgtagatggcgtgctggtagagatacagggaactcttacctgcggcggaaaagaagccttatatactgtgtatgcaaaggtctttccgcaggaaatgccgaaggaggagcagctccatcaatcaatattaaacgaactgtcccgcgaggattcagagcatggaagtaaagcgatacttgaactcccggcagaggttgacggaagaaagctgtactggctgtatgccagagaaaatccggtttcaaaggtgcttggactgacgttgcttacggctcttgtgatatggatcggaatggatcagcaggttcatcgtcaggctaaggaacgacagacacagctgctcttagactatccggatctgatgtggaagcttgcgatgctgcttggagcagggatgagcatgaagagtgcgttctggcggctgtccgggcagtatcagcgggaaaagaaagagattcattatgtatatgaagaactgacttgtgcctgctatgagatgcagagcggaatcgcggaagcagacgcatatgaacggttcggaaggcgctgtcagatgccggaatatatccggcttggcaccgtgctctcgcaaaatttgagaaaagggacaaagggcttaaatacgatgctcgaacaggaggctgcggcatcctttacggaacggaaaaataacgcaagaaagctgggcgaaaaggcagggacaaagcttctgtttccaatgcttctgatgctgggaattgtgcttgttattctgatggttccggcgttcctgtccttttaaccgaatcaggcaagtctactgtttcggttgtgtgaagcaataagcagtgaagcaacgatttggttaatgagcaagtagcgaagcggattgcaaatattcgctgtcagacagccagaaaaacggaaaggagaaaaaatgggacagattaaggcatttttaaaagaggaagatggcgttggcgtagtagaaatcatcttgattttagtcgtattaatcagcctggtactgatttttaaaagtcagctgaccagtcttgtgacgagtattttcggtaagattgtaagccagagcggaacagtatgagaatgatgcatcatgaaaagcgaacgacgtggcacgggtcggtgacagtttttttcagtcttaccggagttctgatactgtgtctgctcctggcggtagtggaggctgtaaggattcagggggcaaaggcgcagacggcgagtctggaaggggtggcaaatttttctgtactggcggaatatgagaaaaatcttctggaagagtttgaaatctttgcacttgacggtgcaggtgggagcggcagttttcagatccagaaatccgaggggagattgcggtattatctgaaggcgaatacagatccgctgtccggagaaggcggatttggattatttgatccgtggaggctgatgctgacagactgtgagatccagggctatgcattactgacagacgagcagggagagccattttatcagcaggcagtcgcttatatgaaagcaactccgcagcttttggccgataagcttccgcaagcagataccgggacgatacgtgagctgaaggtgcttggagagcagtatgagcgaaggcaggaggaaaatgataaggagctcgatgtgctggaagcagaaaagaaaaagcaggaagccgaaaagcagcaggaagcatcagaagccggtgaacctccggtaaaagatcatatgtcagcagtcattccggtgaagaatccgcttatagcactcgggcgtctgaaacggcggggaacactggctttggtcacaggaggtgagcatgtttccacgacaacgattccgaccggggcatttccatccagaaggcatctgcaaaatggaaatctgaagttggaaaaaaagaatcagggtatggcagcagacgcactgtttcgggaatatcttctgatgcagtttccaaattactgcaaggaggcaaaggaagaactgaagtatcaggcagagtatctgatcagtggaaaaccgtcggatcggaagaatttgaaatacgttgtaaaacgactgctctttttgcgggaaggattaaattatcagtattgcctgcaacatcaaaatctgaatggggcggcaggcgagctcgcactggcactgaccggtatgtttggaatgccggcgctgacaggagcgatgcagcatgccctgttgcttggactggcctatggagagagcctgctggatgtccggatcctgctgtcaggagggaagatcccgcttttaaaggatgttgcttcctggaagctgtcatttgcaacactgggatcacttggaaatcttctggaacgagtggatgggagtgaagcggaagaggggctgtcttatacggactatctgcggattcttttgcagatgtgcaggcggtcggatttgaagctgcgtgcactggatctgatccaataccgactgcaaaatcaggaaggaagcgaatgctttcaggcacagaatgcgattgtagcaattaagaccgaggcaaagtggagctgtcggccggtgttttacagtcttcctcaggcggtattcggactgggagccggtggaacaaatatctggcagagcggaagcattgcttattagaaggcggggtaaaaaagaatgcttttatattcagaatcggatcagaagtgcgcgaaaaattattctgatcgaaaattatcctacttgaaatttttaaattatagaaaggaaaagctctctcccccctttatttcgctaaagagtataagagcattcttttttactacgcctgtcggatggaaatgctggaaggggacactgaccgtggaagcggcgctggtggttccggtatttctgtttcttatgatcgctgtgctgcagtatgctcagactatggaggcctctgtctgttatggagcggcgttggcggaggcgggcagagggcaggctgtgcaggtgtatacggcgccagatatctccgggaccggcacagcgcttcggcagatgagtaccggagccattcgtggcaaagtatgcgcagcggccggaaacagccgtgcggcaaaggatctgcgaatcgaaggcgggcaaagggcaggagatgccaatgtgcttgagcttcgcatgacttaccgggtacagaatgtgacgggggtatatttgccgcggatcacatttttgcaaaaggtctgtgtacgggcatggaccgggagagaaggaatatatcatgcagatggaagcacagacgcaaaaggggaaggaaaaacggtctatgtagcggcgaccgggaaggtctaccatacagacccgtactgtacgcatctgaaattatccattcgtgaggtaggcgcccggatggtcgggcagctgcgcaataagagtggagaaaaatatcatgcctgtgagcgctgccacgcaggaagcgcagggagcgtatatattaccggagagggaaaccgttatcacggcagtctttcctgcagtggattgaagcggacggtggaagaggtattgcaggaggactgtgacctgcgcccatgcagcaagtgtgcggaaccatatttgtatgtagaataatgtgaggctttcgggaaaggagcacgggcacggtgccaggacaagaatggataacgacggcagtgctgctgatctgtgcaggaacggatttttgcagtaaaaaggtgtatcgatgggtagtaatgctgtatatgactctggcagtggtaggacgtctggcggcagggatgaccggaggtatgtcagtgtttgtggcagacctgttgccgggagccatttgtctgctaatggcccgggcgacgcatcagggaatcggatacggtgatgcgatgttgatacttgtgtgcggtctgtctgtcggatggagagcatgtatcgaactggtattgtcagcgttctttttggccgggatagcggcgtttgtgttgctgatcaagtacaggggacagaaaacagagcttccatttgtaccgtttctattggcagcatggatgtggcagctgatatgtggtcggtaaaattaaggatttatacaatagacagacaggatatgaccatgacagaaggtaattggggatgcgggaaatgaaagatgagacgaggaaagcagaaaataaaacgcgaatcagagactgtctgaagaagcgggcgttctggaagggaagctatacggtagaggcggcactggtttttccgattattttgtttgtgctggcggcgcttttaatcctggcattttatgtgcatgactgtggaatcttacaggggtttgcctgtgagacggcagtggcgggaagcaattacattacggaaaatgagcggaaagcggcagcaaatcaggtacggaatcaggcggggccggaacggctcatggggagcagaagcagtcaggggcatgtggcgtttggaagttcagaggtttatgcgcaatatacggcagtctgtccggttccgggaatggtgatgcgttatttgtccggaaatcagctgaagatctcaaaaagctggcaggtccatacgctgaatccatctgactggattcgaaaaaagagaggaatcatacgcagcaaggatggagggagtcggtgaaagcagaatttaagcgggatcttaagaataattatctggtgatcgagggacaggaggaggcagtcggaaatgattattgtattccgatggtggagcagaacaggataccggggctgttgccgtttcaccgctcccgcaccgacggaaaactgtatttgaattatgagattaccgggaagcagacggtgacgagcctgtatgagcgaaggcgaattggctacgaggagatattgcagctgctgatgggaatcagtagccatctggatatgcttcagcggtatttgctgaggccggaacagctgctgtttgatccacagtatatttttacagacccggatggcagggctatctggttttgctatgtgccgcagaaggatacggagatctccattatgcagctggcagaattttttttgaaacggctgaatcatcaggacccggcggctgtagagcttggatatcgcttttatgccagaacccaggaggagaatctgagcttgtcaaggatgctgcaggagctgctgacagactgtaagatgggcgagaaaaggacggcagctgatagaaagatggtccggcaggagctgaatcaaaggctggatgctgtgttgccgaatcgacagggagaatcgggaccggaaatggactctatgagaaatgatttgagctttttgtatggtcaggtacagggagccggttctgaaaatggatttggagaggagcgtgcgaagagacaggataagagagaagcaaagaaagaggctgtgtcagaagagcctccgaatgtaattcacaaagagcgcaaaatggataaaaaaaagaaacggaaaatctttcagattgtgcatccggcggtgctgctgacctctctgttgttgttcgcagtgctggaaatcgtcttttattatggatatttaaatgtgacggaagcaggaggctgctttttcctcattttatctggcgaattgttggtgaacagtctgtggaagcgaaaaaaggaagaaaagagaatggtacagcatggcatctggcaggaggaagaggatgaagatgagcaggaggagtacggacaactgcgtcaggaaatgtatcaaagtacgggagatcggaaagatttttttgcagaagaacgaatcgaggagacgcgttgccttactgatgtgcaggagccgtgcggaatgcgtctgatttatattcagccagagggaaatgcaggcgaagtcccgcagatgtttccggatatttatattgggacagatgcggtgacggtcggaaaactgcagggtcagtgtgaggtgcagctgaatgcttcgaccgtcagtcggatccacgcacggatggaataccggaaggggatcggctatatccgcgacctgaacagccggaacggtaccttcttaaatggagaacgtttagagccgcaggagctgcgcacctttaccgaaggagcgcggattgcctttgcagatgttcagtaccgggcggttcatgcgcatacaccgttttgagtgtggcaaatatccgctttgacaggaaattcttttttacattgggagacttgattttgcacggaaccagtaagtatacaggtattcaaatccaagcgaatgataaagagactttgcataagcattgccctgcacgacctgaagataggcatgagtgattccctttttctgtgcttcgctcagaatcgtgctgcagatggcgcgggcgtaatgcttgtgtcggcagctggcatcgacgtagatggcatagagcccgacgtgtccccgatctaggatgccaagacccgaagcgaccatccgcccatcaatttcgatgctggcgacgatggtttcttttggaatggccttgaacatggaggggacgatacggcgaagtgtcggattggtcgtaccgtttaaccggaacaatgaggtaatccattcatctgtgatgcgatcctgcagctgaacgattacatcgcccggatagacgacaaaggaaggcaggccggaattacggccatagtattcatattctgcggagacggatggataacgttgaaactgtgtcagttccattgtcattgtctcggtgacatgctgaatctcgtagcccttcccggccagcagatcatcaaacgaaggatcgataagcgggctgatcttaaagatggacggcgtatggtagttggcatagacagcctcgcagtaatggattttctcctcaatcggaagcagcgatgtgccgacctgtgtcacactgttggtccggtgcgtataattatgagaaaagcggatgagccatccgtcataaagctctatcttatgggacggccatgcattcagggaaatttcctccacgagtttgatgtaggcttcttttgtgatatttgtcatagtatccgggacctccgacgatgtattaatacataagcagtaatctgtagttgcttcatcatacaaaaaaatttttcgaaatgcaagtggttgcttttacgaatgcgggcagtatataataatatgatgctagggtcaaaaggtcaaaaagccgttcatgcttgcatgataaggctt

SEQ ID NO: 106 - DNA, 1736 bp, Unknown
  16S sequences of unknown bacteria
gcgacatcatattcaagggcgaaagcataagatcgctcactccgcgcgacataatacgccgcggcataacaatgtccttcgtcccagaggatcggctcggaatggggcttgtcggcgaaatgtcaatcatcgacaacgtcatgctcaagtcctaccagaacctccccggcgtcatgatggacagaaccgaaggacgcaaggtcgccgacgatatcatcgaaaagctcgaggtcgcgacaccttcaccgtaccacatcgtcaagaaattgtcaggcggcaacattcagaaggttctcctcgggcgcgagatcaacctgaaccccgaccttctcatcacggcgtatccggtgcgcgggcttgacatcggcgcttcctatctcatttacgacatactgaacgaacagaagaaaaagggcgtcggcgtgctgttcatcggtgaggatctcgacgttctgctcgggctgtgcgaccggattatggttctgcacgccgggaagataatggacatactcgacgccagaaaagccacaaaggaacagctcggaatgctcatgctcgggcacaaatcgcaggaaacggaggcgtctctctgatgctcagaatacagaaacaacgggggctcacgaaaaagcaggagattcttctccgggtcgggacaatcgtcctcgctctcgtcgcgtcgggggtcatgatggcggcgctcgggtacaaccccttcaccgtttatctcaaaatgataaagggcgcgctcggctcgagatacaacatcacagccaccgtctcgaagtgtatcccgcttctcataatgtcgctcggcgtgtcggtcgcgttcaggatgaagttctggaacatcggcgctgaggggcagttctacatgggcgcgttcgcggcgacattcgtatggcttaagttcccggacagcactcccggcattgtgatgattcccgttatgatgctcgcggcgattatcggcggcggtatctgggcgctgattccggctcttctgaagtcgaagctcgagacctccgagacgcttgtcacgctgatgatgaactatatcgccgtcaagtggataacctatctccagtacggtccgtggaaggaccccgctgagcgcaatatgccgaagatttacaagttcacgtcgaactcctcccttccgaaggtcttcggggtgcatatcggctggattatcgcgctcgcgcttgtcgttctggtgtttgtgctgatgaagtacacgaagttcggcttcgagatacaggtgctcggcgaaaacccgcagaccgcgaaatacgcgggcatgaacgtcacgaagattctcattctcgcggtgctgataagcggcggcatatgcgggcttgccggtatgattcaggcgaccggcaacgaaggacgtctcgctaacgatatctcggcagggctcggattcacggctatcatcacggcttggctcgctaaactgtccgctccgatgatacttgtttcgagtttcctgtttgccgtactgcttcagggcggctcttaccttcaggtcgcgatgtcggttccggcttcggtgtccgaggtcattcagggcgtgattctgttcttcgtcctggcgagcgaatttttcacaagctatcgtattgtgcgtgtaaagcgcggaaaggagaacgtctgatggacttcacaaatcagctctcactgtttctacagacgtcggtgcagatgggcacgccgatactcttcggcacgct

SEQ ID NO: 107 - DNA, 14437 bp, Unknown
  16S sequences of unknown bacteria
gttggggtcgcgggttcgagtcccgtcttccgctccatcatctgcaagagagccggcccattcggccggctcttttttaccgcagatgtccattcgcagcttgctgaatggcgacgtggccaagtggtaaggcaggggcctgcaaagccctcaccaccggttcgaatccggtcgtcgcctccaagctcttcaatcctttttcttttcgagaatatatatgtgtgtgtatctgcgcaccccgtacgcgtacgcgccctcattgcgtgggatgtgtggccgtgctactcttctcgcgccgcgtgcgccggatgtgtggcagtgccacgttttccgcgcaggaacctcgggatgtgtggcagtgccacccttttcgcgcagaacgagcgggatgcgtggcagtgccactcttctcgtgcaggggttaccacgagggcttgagaaacgaaaagggccgcaccctctcggatgcggcccctgagataccagtttggtggccccaccaggattcgaacctggagcctgtcgattatgagtcgatcgcgctaaccgttgcgccatggggccatgcacaagcaagcattataaacgagattaacgaggcatcgccccatatcttccaaaggacgccacggctcagtcctcgagatagtccttgagcttgctggagcggctcgggtggcgcagcttggccagcgtcttgctctcgatctggcgaatgcgctcacgcgtgacgccaaactcgcggcctacctcctcgagcgtgcgcggatgaccgtctttcaggccaaacctcagctcgatgaccttgcgctcgcgctcggccaggccgtcgagaaccttgcccagctgctcttgcagcatcgtgaagcccgccgcgtcgtcggggcggatcgcctcgtggtcctcgatgaagtcgcccagctgggagtcttcctcttcaccgatgggggtctcgaggcttaccggctcctggctgatcttctgaatctcgcggacgcgctcggcgctcatgtccatcttctcgccgatctcttcgggcgttggctcgcggccgaggtcctgaagcagctggcgctggatgcggacgagcttgttgatggtctcgaccatatggaccgggatgcggatcgtgcgcgcctggtcggcgattgcgcgcgtgatggcctggcgaatccaccacgtggcgtaggtggagaacttgaagcccttcgtgtagtcgaatttctcgaccgcacggatcaggccgaggttgccttcctgaatcaggtcgaggaagagcatgccgcgacccacatagcgcttggcaatagagacgacaagacgcaggttcgcctcgatgagctgatcttttgcgtcgagtccaacctgctcgacacgcgtgaggcggcgacgctcgcggcgcgtgagctcgcgcccctcttcttccgccttgtcgatttcttcggttgccttcaggccggcctcgatcttcatggccaagtcgacctcttcggacgccgtcagaaggtcgactttgccgatttccttgaggtacatgcgcaccggatcgcccgtgagcatggcaacggagttctgctcgatgcgtgccttgcgggcctcggcacggcgcttcttggactcggccgccttcttcttggggtctatctcgttgacctggcccagctcgtcggcagccttgctcgcgcgcagctcgtcctcgggaatgccgtccatgatctcgtcgtcggacatgtcggggtttatctcgtcgtcgctcgactcggtgacgtcgatcgagcttttgcccgtcagcttgacgccgttggcgctcaggtagtcgtagactgccccgagctgcttgtcgttgaggtcgtcgtcatcgaaggtgctctcgacgatggagcgctcgaccttcttgccaacctccttgatgagctcgtcggccttctcgatgaggccctcggtcaggaccccttcgtcggcctgcgccttcgcctgggctttggcagcttcggccttcgtgataccggctttttccgtcgtcttcttagccaaggtctccccttttctagtctataggagctccgggggcttcgttgcgaagcctcaccagctctttctgcattgacactgtcttctcgaacagctcgtcgagctgctctggagtgagattgccctcaccttgcatacgcgccttcgcgttgcggatcccgcgttcgagatcgcgcacgcgcaggctcttcaaaagcaaacgcgcctgatacagcttctcgccctcgtccactgtctcaaccatgacctcggcgagcagcgtcggagcttgcgcgcatgcgttctgtacggcaaggagggcctgtgcgggagtcgcgtcgcgggaaaccgtcagaagggcatcggccatgtcttccgacgccttgtccacccactgtatgcgtacgagctccttgcctacctcatcgagcagatggcaatcggtcacgacgagcgagatgagctcgcgctccatgcgtatcgactgctgttctgcctccatgatctccattgccacagaactcatgtgcggcggttcggcttggaagacggcttgatcatcttgatggcgggccgccataggagccttggtctcccttagtgccttagctacggcagtatactccacattcaaacggtcggcgatgaggttgacatagtctgtcgcggacacggaatccttgatggggtacaagatctgcagcgcgtcttccatcgcgcgcaccttttgggcgggcttgcgcaggtcgtacttgcccaggcagcgctctatcgagaactgcagcaacgggaccgaccccgcaagcacctcgcgcatcccctgcgcaccgttggcgctcacgtactccatcgggtccttgttgtcgggcaggaccacgacgcgcaggtcgatgggatcgcgtctgctctccaccgccgaacgccagtcgatgaactcgctcgcgcggtcggcggccttctgccccgcggcgtcgccgtcgaacaggtagacgatcgtgttggcgaagcggctcagcagcttgacgtgctgcgcggtaagcgcggtgcccagcgtggcgaccgcgttcgtgatgcccgcctcgtgcagagcgatgacgtcggtgtagccttcgacgacgatggcctggtgcgcggtgacgatggcgtttttggcgcggtcgatgccgaacatgttgtgcgacttgctgaagatcggcgtgtcggaggtgttgaggtacttgggctcgcccttgccgatgacacgcccgccaaaggcgatggtgcgcccttgcaggtcgtggatgggaaacatgacgcgctcgtagaaccggtcgacaagacgcccgtttttcttgctcacataggcaaggttcgctccaacgagctcgtcgcgggtgtagccctgcttttgcagatgggcgacgaggctgccgcgtcccggcgcatagccgaggtgccagtccttcgaagggccgctcccgaacccgcggccatgcaggtaggcacgggcagaggcggggcctgcatcgcgcgagcgcatgagctgcagatggtagaaatcctcggcctccttgcaggcgagcatcatgcgctcgcgctgggaacgcggcacgcccctgccaccgacctccttgatgtcgatgtgggcacggtccgccagcgcgcgtaccgcctcgggaaactcgagatgctcggattccatgacgtagccgaagacgtcgccgcctttgccgcagccaaagcagtgccaaagctgcgagtccgggtcgatcttgaacgaaggcgacttctcgttgtggaacgggcagcacccccagaacaagcgccccttctgtttgagcacgacacgctccgagacgagcgacaccaggtcgatcgcctcgcggacccgccgtatgtcttcatcgctaatgcgcgccatgagcaccttcgccgaggttttcgcgtacccatgcaatatcgccttgaatcgtgcggatgagctcgtcttggtcgtcgaagaccctcgactccctcagccactcgacgaagactatcgtaatgctcttgccgtagaggtctcccccgaaatcgagcaggtgcgcctcgagcggggagcttgccccttcgaagctcttcgcgacgcccatgttgatggctgcggcatacggcgccccatcgacgatcgcatacccgccgtacacgccgtctttgggttgcaccaccatcgtggctgacaggtcgaggttcgccgtggcgatcccgaagccggtgccctctcccctgccgtgaacgacgcgcccggtgatggcgtgggcccttcccgcgagcagccttcgcgcctgcccgacatgccccgccttgagaagcgcccgtatccgcgtggaagacaccgtcgcgccatcctcctggatgagcgagcgcggctcgcaggcgcacccatgcgcggcgctccatgcgcgtaggtcgtcgaccgttccgcgcgcacgatgcccgaagcggaagttgtcccccacgaacacggccaccggcgtgcagatcttttcaagcgcgtccaaaaacgcgtccggctcgacgttgaagacgtcgcggtcggccggcagcgcgacgacggttccgcccgtgaaccctgcgagcatctcgaggcgctcttggttttcgagaagcttgccaaacgcctggtcgtccttgcggaagacctcgtcggggtctttctcgaacgtgagcacgacgagtgcgaccccgcgcttttccgcggcatccgccgcctcggagagtagggcccgatgccccaggtgcagtccgtcgaagatgccgattgcgaccaccgcgcgccccagcgagacggggtcgtgcagcagcgggttccaacggacgatgtgctcagacctgtcaggcaccggcaacacccccggggataaccgtggccggcttgagccggccggcgctgcagctatacacagccagcaggcgcccacccgcaacgcaggacacgagctgcacgtcggcatcgtagccgcccttgagctcgcgtccgtttttcacatcgcagacctgctcgtcgttcaagtccagacggggaaacccgagcaggtcggtcgggtcgcaccagggaattgcctgcccgtgcgagacgagctcggcaaagctctcgagcgtgatcgcgctgtcgagcgtgtagcccgcgatggccgtacgccgcagcgcgccgaggtacgccccacagccgaggctctgcccgaggtcgcgcgcaatggagcggatgtaggtgcccttgctcacatgcagcagaacgtcccagtatgggagctccgcgacgaagcgcccgtcctgtccgtcgtcgaggtcgaccgacatggtgccgctgcccgcaaactgcgcgtcgaatatctcgacgtcgcgtgcctcgagctcgagcgccttgccctcgcgtgccgccttgtacgcggtaacgccgtttttcttgatcgcggagtatgcaggcggcagctgcttagccttgcccacaagcgacgagagcgtctgttggggatcgagccctccgagcacggccaggccctcgcccggcgcgctcgaggagaactgcgtgacgatacggccttccgcatcgtcggtgtcggtggcgacgccaaagacgatacgcgccgaatatgccttgtcgtggccggtcaggtagttggacaggcgggttgccgcccccacgccgaccagcatgaggccggtcgccatgggatcgagcgtgcccgcgtgcccgaccctgcgctcgccggtgatgcggcgcacacggtcgaccacgtcgtgcgaggtgattcccgcgggcttgtcgatggcgagcacgccgcacagcccgctcgtgccgcgcttcattaccgttcctcgccgattcggcggaacacggtggtgcgcgtcacctcggcgtcgagggtctcgcgcgcaacgggcgtctgcgcgaacgactcgctcaacaggtcgacaacctggtcgtacgcgttttccagacgccccttgatggtgaagccggctgcggccttgtgcccgccgccgttcatcttctcggcgatggcagccacgtcgcggtcggtcttggagcggatgctgccacgcacgatgggcccctgctcgcgcagcatgacggcgacctcgatgccgtcgagctgcctgatggtgtcgatgagggactctccatcgtccttcgtggcgcccagctcggcaaagtccttctcccgcacccacgagatgacggccctgccgtcgcagatcaggttcatgcggtcgatgacgagcgagttgagcttgagggcggccatgctgcgacgctgatagacctgacgagagatctccgatggagacgcgcccgcctcggccatggacgccgccgccttcagggcgtccgggtcggcgttttggaactgaaacctgcccgtgtcggtgacgagcgccgtgtagcagcacgtcgcgatatcgggcgtgcgctcgatgcccgcctgcccgatgaagtcccacacgagcatgccggcagccgcggccccgtcgtcgacgaggttcacgttggcaaagtccgcgggaccctggtgatggtcgatggcgatggtcttgcgcgcgcggttgaagacgtacacgccgtcgcccgtgcgctggatgctcggcacgtcgacactgatgaagacatcgggcacggccccgtactcgcacgcgggcgtcaagtcctcgtacgcgtacaggaagtcgtacagatgcgggcgctcgcgcgtcgccagaagcggcgtcacctggtagcccgcggagcgcagcgcgcacgtgagcgcgagcacgctgcccagcgcgtcaccgtcggggttgacgtggccgcagatggccacggtgtgcgcccccttgagcagctctattgctggtccgtaatcgagctttgccatttgtgctcttcctccagcaccgtcgcgatgcgctctgcagcgtcaacggagcgatctatcttgtagcgaagctcgggcgtcacgcgccagccgagcttcttgccgacgagcgacctgatgcggcccttcgccgcctcgaggccggccaggacctcgtcgtaacggtccttgtcggcggaaacgtacacgtctgcgacctcgcggtccttcgatacctccacgtcggtgatggtgaccagctcgagcctggggtccgagatctggaagaggagcacgtcggcgagcttcgccctgagctcctctgcagcacgacgtgaagcgggagtctgcttcatggttattccttacgtgcgacctgctcgatgcggtagccctcgatgatgtcgccttgcttgacgtcttggtagtcggtgatgccgataccgcactccgtgccggccttgaccgacgtgacatcgtcgcggtagtggcgcatggaggcgatggtgccgtcgtggacgatgacgccgtcgcgcacgatgcggaccttgtcggtcgcggcgatttcgccctcggtgacgacgcagcctgcgatagcgccgatcttgggcatcttgaagacctcgcggacctcggcagaacccgtgtcgacttcgacctcttcgggagcgagcagaccgacgcgtgcggcgttgatgtcctcgattgcctgatagataacgcggtagagacgaatctcgaccttctcgcggtctgcgacggcacgcacgcccgcctggggacgcacgccgaagccgatgatgatggcgtcggatgccgcggcgaagttgacgtcggtctcggtgatgccgccgactgccgcatggatgacgttgatacggacctcggactggtccatcttgtccagctggccttgcagcgcctcgatggagccgacggtgtcggccttgatgatgaggttgagctcggcgagcttgtccgcctcgatgcgggcgaacaggtcgtccaggctgacgtggcgcggagcctcctgctgggccatgcgctgcttgagctcgcgctcctgcgcaaggctgcgggcctcggaatcgtcctcgaagacggcgaactcgtcgcctgccgacgggacggcctgcaggccgaggatctcgaccgggtcggacggcttggcctcgtcgacgttgttgcccttcgggtcgatgagcgcgcggacgcggccatagcagacgcccgcgaccagggaatcgccgacgcgcagcgtgccgcgctggacgatgacggtcgcgacgggaccacggcccttgtcgaggttggcctcgatgacgaagccgctcgcggtcgtgtcggggttggccttgagctcgaggacctctgcctggaggatgatcgtctcgagcagttcgtcgatgttgaggttctgcttggcagagacctcgacgaacatgttgttgccgccccactcctcggggatgacgccgcgctcggcgagctcgcttttcacgcgctcggggttcgcgccgggcttgtcgattttgttgatggcgacgacgatcgggacgtctgcggctttcgcgtggtcgattgcctcgatggtctggggcatgacgccgtcgtctgccgcgacgaccagcacgatgatgtcggtgacctgggcgccgcgcgcacgcatggcggtaaacgcctcgtggcccggggtatcgatgaacgtgatctgatgcccgttgatgtagacgaccgaagcaccgatggcctgcgtgatgccgcctgcctcggtttgctgcacgccggagtggcggatggcatcgagtagggacgtcttgccgtggtcgacatggcccatgaccgtgactaccggcgggcgaggcttgaggtcggactcgtcgtcgtggaacgtgaactgcatctcctcttccggcgagataatcttgatctcgcggccgaggtcgccggcgacgagctcgactaggtcgtcgctcatcgactgcgtcaacgtcagcggggtgcccagcaagaacaggcgcttgacgatctcgttgccgggaacgtcgagggcctcggcgagctcgccgaccgtgatgccgctcgtgaccgtgacggtgccgacggcgacgccgagcgcctctgccttcttcgccgcctcctcggcagccttcttcgcggcctcggccttgcggtgctccttgcgcttcttgcggcggccggtcgactgcttttccgcctcggcaacggcagcgcgggcctcctcgagcaccttgttgcgctcgagacgctcggcatcgtgtgccatctggcggtagcggtcgtcctcggactcggagtccacggactcgacggcgcgcttgccctttttcttcttgccggcgcccttctcgcggtacggactgtcgtttttatcggaagagccgcgcttgccggagttgttggcatgcgctgccttcttttcctgctcggccttcttggcctcggcgcgctcgtgcgcgaggcggtcgttttcggaggcgatctgcgagagcaggccgtcgaacacggaggagtgcttcttcacgaccttcttctcgggcttctcctccttcttgggctgctcctcgccgtttgcggcggcgcgctccttgcgctcctcctcgcggcgctcgagctccttgcgcacgtcggccttgtgctcttcttcgatcttcttgcggttttccttggccttgcggatcttctccgccgcggccttcttcttttccgcctcgatttgctgggcacgctcctgcagctcggggccgagctccttgcggatcttgtcgacgtaggcatctaccagcgtcgatgcgtggttcttggcggggatcttcatctccttgagcttctcgaggagctccttggaggtcatgccaaactccttggccagttcgtgtacgcgcacgcctgccatctattcaccatccctactgcgcactcctgcgtctgggcagacctgcgcgaattccgtttccaaccgtctgtaatcgtctgcgctcaccttgcagcggagcttggcatcgagaaggcgcttttgggccgccttctcgaagcatgacgacaccttgcacaggtacgcgcccctgccggcgaccttgcccgtcaaatcgagctcgatgctgccgttgggcgtgcgcacgatgcgcacgaaggagcgcttgtcgccgcttttgccgcaggccacgcacgtacgtgtcggagtcttgtttgccattagatgagggactccccttcgacctcgaggtcctcctcgtcgtcttcggcgtggatgccgcagaagcgggagccggggcgcgcgtggttgcggcagcgcgtgccgtcctcgttgacgtgctcgcagcggcggtcgcccgcctcgtcgaagtcctgctcgtcatcgtcgtcgatgagcgagtcgacgccggcgccggcagcaccggacgcgatgaggctcgccgacttgatgtcgatgtgccagccagtcagacgtgcggccagacgggcgttctggccctccttgccgatggccagcgacagctgatcgtcggggacgatgaccgtcgcgtagtgcgtgtcctcgtcgatgacgacgtcggagaccttcgcgggcgacagcgcgtttgccacgtagaccgccgggtcctcgttccactggatgacgtcaatgcgctcgccgcgcagctcgccgacgaccatgcggatgcgggagcccttggggccaacgcaggcgccgaccgggtcgaggtttgcctcgcgggagtagacggcgatcttggagcgcgcgccagcctcgcgggcgatggacttgacctcgacgacgccgtcgtagatctcgggcacttcaagctcgagcaggcgacggatcagatcgggatgcgtgcggctcacgatgatgccggcgtggttgctcccctgcgtgcggcccatcgcgtcttgctgcgtcaggtcggggtcgcgcacgtcgatgatcagcgccttgatgcgctggttgtgctggtagtactcgttgtccggcttctcgttgcgctcgttggggtagcgcttcttgtcgtagtgcggcagctcggcctcgacgccgtcgcggatcttgatgacggtgaagtcgggcgtggactgcaagacggtaccggtgatgagctcgcctttgcggtcggcgaactcgcggtagatgttggcgcgggccgcgtcgcggacgatctcgttgatgacgcgcttggcgttctgggcgacgatgcggttgacgttttccggcgtgacgtcacgcggctcgtagtcttcgtactcgcccgtctcggggtcctcttcgcccaagccgaccatctcgtagacgtagatcttgccggactcacgatcgatggtgacgcgggcgtcccactccagcccgagaatctgcttgtacgtgcgcgcgagctcggtttccaagcggtcgagcagcgcgagctcgtcgatgttcttctcttttgcaaggtccgtgagggcctcgatgagtgcagatgacatggttcctccttattctgttgtagagtcgacggaattgccgagaccacggccgctgaaatcgatgcggccgatgatgtttgccttcttgatgtcgtcgaacgcgacgcgggtttcttccccgtcgtccgaggtcaacacgacctcgtcgccttcaatgcccttcaaggtgccgtgcgccttgccgtgcttgagggtgagcgtcgcctcttcgccggcaaagcggtcgtagtcgccacgcttgcggagcggacggtcgatgcccggggacgagacctcgagcgtgtaggcgtcctcgaaggggtcgagctcctcgatcttcgcgtcaacccactcttcggcctctgccagctgatctagcgtgatgccgcccgccagcgtgtccatgtacacgcggagaaccgggttcttgcgggttcctgcgatctcgacagtgaccagctcgagctcgtgctccgctgccagcggttcgagctcttcgatgagcatctctgccttgtttgccatacgctcaaccctcctttacaaacaaagaaagtggggcaaacccacttccacaaccgtgacgcgtattactttgcgacggcggcgtagaaagccataccgtggccgaatcgacctcaaggcacacgtcatccgatgccttgtcaaagctgattcatcatactggtgccgacggcctcgcgcaaccatcgtcacggtatcgtcacaattaacttgcgtttggaggatttttgcggcgctcacacccgcgaattgcttgaaacgcgctcttttccgcagcctcaccacagcctcagttctctcgccctgcaggcggaaaggcgtgccgaaaaacgccgccgacacgagcatctgacgctcgcgtgcggcaaacgaggtgtcgagcagctctgcgagaaacgcatgccgcgccctcgcgggcgtgtccatggcaagaagcatctgccggaccacccggtcaagcccgtgcggcgcgcggaggtcctccttcacgacgggaaacacgacaagcccctgggccgaaagctccctgttgcggcggatgtcgtcgaccgccttgccgcgaacggcatcgaggctttcttgcaggctgcgcttcgcatgcgcgctctgcggatgcagggcctgctcgcgggcggcatccgagacgcgtcccaagtcgaggtgcactccgcgccgtcgtagttgatcccgaccttcgtgcccggaatcatgatgtcgggcacgcgggagcgggcgtttgtggtcccggcgagttccgccggagtctggatgcgcccattgagcaggcaggggccaaacccgtagccgtagcgttccaggggcagggcgagcaatgcggcaagcgccccctccgccggcgaccaggcattgtccgaaaggaagcgcagcgtctcgcgggccttgtctaggccccgcacgccccgtgcgcgatcgagaaaaccccggatggtgcgcacgctcgtcacgggggcaagccccatcgacgcctcgccgtgcctggggtcgatggggtcgaaggcatatgcgccgcacagctcgtagcccagcaggagatgctggagcggagacagctcgtttgcgagctcgacaaacagcagctcgggcgagctcatgcgaagcccgggggtaacctgcacgaacgccccctcggggagcccccgtgcatagatcgtgttgcggacaagggagagcgcgatgcgttcgccctcgtgagggacggcgacctcgagcgcgctaccgggaacgtctcggccaaacagccttctccgctccgactcgacccgcttcctggaccaacgctggtagggcgacgggtccggagaactcagatcgcacctcctgccgaggggccaagctctcccgttgacgcgcctcaaatggcgcaggcagcgaagcgcgctgtgcttgcagatcgcgagcctcatgtgcccacctcctctcgccgccattctagcgagagggttaactcgcgttctaggggttcagggggcctttcagccccctttaagcttgaaacgcgagctaatttcctagttagcgaccacgttcacgaccgtcggggcgacgatggtcttgcggacggtcttgcccgcgatgcggtcggcgacggcctcgagtgccgcatcgacgattgtctgctcgtcggcgtctgccggggtcgtgatcttggcgcgaaccttgccgccaatcatgacggcgcgctcgacctcgtcttcggctgcctgggcctcgtcataggtcggccactgctgctggtacacgctgccttcgttgccgagcgcctccgtccacagctcgtcggcccaatgcggagcgtagggcgacagcagcctgacgagcgtgtcggcgacctgcgcgcacagcttttggtcgcgctgcgcagccggctttttcaggtagtcggcagtcgcgttggagagctccatgatcgccgcgagagcggtgttgaagttgaagcgagcgatgtcctcggtgaccttgcggatcgtctggtgcagcttgcggttgaacgccttggcgtccttggagtcgtcggtactcgtgccgccttcttccgccagcgtccacacctggttccagacgcgcttcaagaagcgctccatggcagcgcagcccttgtcgtcccactgcaggtccttgtcgggcggggccatgaacaggatgtaggcgcgcgccgcgtcgacgccgtagttggcgatgacgtcttcgggcgagacgacgttgcccttggacttggacatggtctcgccgtgctcgtctttgaccatgccctggcacagcaggttcgtgaacggctcgtcgaagtcgaccatgccgaggtcgcgggcgaccttggtccagaaacgactgtagagcaggtgcagaatcgcgtgctcgatgccgccgatgtactggtcgaccggcatgtagtggttgaccttggcgctgtcgaacggcgcggcgtcgttgtgcgggtcggtgtagcgcatgtagtaccacgaggagcacgtgaacgtgtccatcgtgtcggtctcgcggtgcgcgggcttgccgcacttggggcaggtgcactcatagaactccttgctgtccttgagcgtctcgcccggcgg

SEQ ID NO: 108 - DNA, 27603 bp, Unknown
  16S sequences of unknown bacteria
ccctcccggtgttcgctgaacgctcacaccaccctcccttacacaaggagggcaaatttgctgtatgtttgatataatattttgtaacaggcagaggattgaattctacttttaagtaaatatttttattctcattaaagaaaggagcgcctaagttatggcgcccctctctttgataaaaagtattatatatcagaatgtaattaaataatatcatatttgatttatatcgtcaatagttatatttgtcgaaaattctgcttcaagaaatttttcctttgaaaatataatgatttttgaattatcggcattttgttattattgcggttttacattacaaatatgtcgaaaataataatttttatcaaaatcacattgacattttatatattatgtgataatatgcaagtacattcttaaataaaaaacattttcatcaaagaggagagcgctatggctaaagcgctcttttcttttttattggatttaaaggaaattttacatagtggcattattaaaaaataaaagttctaaagttagggaaactaagggactataaaaatattatctatctgcacgaatgacaattgcaataactatataattatggtagtatgatatagtaataaataaaatttttaaaatatattggagattttatgaaatatttaaaaattatttcgttgaccattgtgttattcatgtttgggtgcagtgcgaaaaaatctgatttggatttgctcacaattcctaaaaaggaccatgagtttaaaaatgttgaaacccactactggcttttaccgggtgatgacgaagatgtgcggttgccagactatatgggtaatgctttaactaattataattgtaaatttatattgccggataaatttggatatcggcttatgggaatcggagattttgatatacacccggattgttattcagatcttaatggatccatacaaataaatataaaaaatgcaatattaaaggaggataatgaccctgaatcataccgttaccatatgatacaggaactttttgagggcaaacctgaaaaatacgaaaaggaattgattggcattatgcaagtttttgactcttctgttgaggttatatctgaaaaaaccgagtattacgaggggcgtaacggcagcattattactgctacaaatgtagtgaccagacgaaccgctacctttactaatgagaaaaatattttcaaccaaactttttacagaaaaagtaatataccggatatagtagttaaagtttcttgatatgacgataagataaaagaaattacagaccctaatatctataattatccgttgcaaattcttaattcccttataattaccgaaaggtcataaattatgaatatgaaaaatagtaagtttataaaaataacagtattatttttgctttgcgtctgcctattttgcagctgtagcaagaatgttgataaaatcaacagtgaagcggcggatataagtcaatcaagttctgaaagtccgtcaagtactcaaagcagcaagtcaaccgaaataatatcaagttcttctgcatcgaaagcaaaagaaaattatattgataatttagaatatatttatgttaatgaattatttttttcaactattgctcaaaacggttcactgtgtgttacaaaatttaatgctcgggacaattcggacttagaatatccgaaatttgcggataaaaattacagtgaaaaggttgataaaatatcaaatgccatagagagttgccctcctaaaacaattatttatgcaaaggattactatacaactgattcaaccggttatgataaattatcagataatgatataatgttgtcatctaatataaattacaatcctcttatatcaaaagttacgtataaacattattatagtgatgaatgtcaagtaaaaccggaatgggaaacacggtttaaaaatgatattaagaagatgcttttagaacacagaacatcaatagaatacaacggagacagcaatgattatagcaattttgatgtaaataccgtgccgataattgtaaccgatgtatggtcattttcagaaggtgaaaatgaaatagaaattgttaaagcacaaaatatttttaatgatagcaattacattggacggatagacggtttggcatcgttgccggatgagcaatattttttagcatacacattgattgggatatttataaatggaaatcgtgtcgaaaatgatgaatttaattcattaggcaattattgctttgtaatgcaaaaattaaatagcagtttatgtctatacggcgaagccgaagatgataaagacgaagttgatggaatgtattgttattatgcatttcaaaaaaataaaaatggaaatataggtgtatacgctgtttcacaaccgggtattcaaagttacgatttattaaatgttaatgcaattaattcttatatgtttgcagatgtaaataatgacggaaagagtgaggtggttgtgctacatcgttcgttaccaacctttattccgccatatgttagagcctataatatacagttttgtgacaataagtttgaattggtaaaaactactgacatttataatttgctgattgccgatatagattgggatgaatatgaaaaatagtaaatttataaaaataacagtattatttttgctttgtgcctgcctattttgcagttgcagcaagaatattgataaaattgacagcgaagcggcgggtataagtcaatcaagttccgaaagtcaatcgggcagttccggacaaacaagcagtaaaacacagcagtcgtcaaaaagtaatttgaaaaccgatagttcggaatctgatccggataaatgtatcgaggtcacatgtgttgatacatcgtattccaaaagtatattttcgcaagataagctattttcacgtatcagtatgggttatcaaagcggatatagtgattttttcgtgacatctttagttattgataaccaccaagaattatttggatatactcaatatgataaggtatcattttcggaaacatgtgatgaaattttaaataatcaaaggctttatatcacctatgtatcggaatactatgataaagaatctaccggatatgaaaatattccacaatacggaattctttttatgagcacaaaagattacaatccgatattatccaaggtgacatatattgattatgatgtttctgataaattgccaaaagaatgttggaaagcaaattttgaaaaaaaaataatagaagaatataatttttgtcggtacatcggtcgatacagcgcaacaataaactatagtaattgcggcggagtcgataatcgtgcagtacctgtaataattcgtgaaagttggtcttttagctatgatgggcataattacgatattgtaacggcatgtaatttatattgtgtcggtgatgaggtagatcttatttataaagatgaagaatatgaaaaatcagattttgaaaaaagtggagggttgctctatctaataacactgatttttattgatgatacattattgaatacgggtagggtattggattccggtatacagagtatatctaaagaagaattttcgttcccggaagattatgattctgctttggcgggatacagcgtatatcaatatgataaggaaggaaatgtaaagctatatcctttgtaccttttggtagattatgattatagggattttagaaaatggtcgacgtttttattcgccgatatagacggagacggaaaaggggaaattattgagtatgatgcgtatgatagatttttctattacgcacgaggatatacattaggcggttcgaattttgtttgggataaattcccttatcctataaaaaccccaataccaaaggaaattttaaaacatacatcataatatgtatttgcagcttcttaacattaaaatcccctatggcagtttcttataattctgccataggggacatctgtttttgtttggtacaatttatttaatgaaatttaacttttatttctgtaataagcaagggtatagtctgcaaagccgtatttacagagtgccgttaaagtcttttataatggaattccatgtgtcacgacctacaattccgtcggcttttaatttggcgtacgcctgataatagcccacattattttttgtgtttctgccaaaaacaccgtcaacggttaatttttgccggccgtgagattgtttttcgtttattctgtttaaaaagccctgaactattttaacattgttattttgtgagccttctcgtataagagcgccgccgtattcggtggaaacctttgtgttttcacccttcatgacagaggtataaacatcaattattttatcccatgtaagcctgcctacggcaccgtcaacggcaaggccgaatatcctttgaaatacccttacccgtgcgctcatattccggccgaaaataccgtcctctttttgcggatttattgcagggtagacctgcccgataacatttaatttttcctgtatattgcttacccggtaacctactgttcccgggcgcaaaacataaccggggtagtcatcgcttgcggcttccggcagggcggcataatccccaacaatgctatcccaagttatcggtcctatttttccgtcaattttcagctgttttgcagcctggtattcgtttaccgcaagggcggtgtttttaccgtatatgccgtcaactttaagggcggtaattcctttgtaagtgtatttgcctatggcatttaagtaactttgcatgattgatacatcgctgcctctgctgcccacggtcaatacatagccgggatattccggcgaaggtgccaaaatgctgtttgtgctgttttctttcatataaaatcctccctgaattattctattcccacaggtaaaatatgtgaaaaacctaacgctgccggattgatttatccgcaaacagcgttaggttttatttttatattcggttttatattattttgaaattcatatgtttactggtgtgccgtcaatatatctgcctacaatatttctgtcgtcgcctatgtagcaaaatctttcaactttttgttcgggagtaaggggaaaacctttatcttctatgttatcaatcactattgcgttgaaattccgacctttttcaaagtgacccatattgccgaacacactgccgcctgcccttgtggcacagtaaaaagcagtggcaaaatttattgtttttgccgggttcggttcgtaaaagttcttcatcttagaaagttgaaccgcccttgcaacctgtttgtaaattgccgggtgatgtccgccacctacatcactgccaagggcaacattattgtttgcaagtatttgctttaaaggcattattcctgcaataacatttgtggtggcgtccgggcaatgtacggcggtgcagttgtagtttttcataatttccatgtcggaccgggtagggaagataacatgggcaaaaatattcggaccgttgtccaaaagccctgccttgcgataaatatcgctgtcgctttcgcagtcggggaacaatctcatagcctcaccggcttcccatattgattccacaacatgggtttgaacgccaacgccgtattttttacccaacttgccaagacccgtcataagttccggggaacaggtaggcgcaaaacgaggggtgattatgggtttaactctttttccgcctgtgtgccgccgcaaaaattcctctgtggtttttaaggattctgcggtgctttcccacaggtaatccgggctgttggcatccatatttactttgcccacatacccatataaaccatatttttcaagtttttcaaacaaaatatcggttgacttattgtgaattgttgtaaatgcggaaagccggaatgtgccgtttaaaagcatatcctttacaaaggcatcatacacattttcggcatattctttatccttaaatttggcctcctgtggaaatgtgtaatcattaagccaatcccgcaaaaggcaatccatgccaaggcctctttccgtgtattggctggcatgtatatgcaagtcggaaaaagatgggataataacaccttttccgtagtcgtttacaggtaaatttttgtattgctccggtaattcttcaaatatttcgtcaacaaggccgcctttaacaacaatgtaaccgcctttataacttacaagggtgtccttgtcttttgaatacagtatatctccgtgaaaaatttgtacagacataattattcctcctatataatgtcaaattttgcggcgcacacagcccattctattgaagaaccgtttacgggtataaacttttttgttccactgtgagcctcgtaaagggcttctatatccccgtacatacattggcttttaagatatatctttttgccgaattccttatgcagcttgtccaaaacagcctcgtggcttttcagcattccgcctgcgccaagggcaagcacaattattttttcacagtcacctgaggccaaaagcagagaattcgtcaaagcgggagtgatgtaaataagagccacagaatggttttctctgtttctcgccggctgtacagcgggctttgcgataggcgctgtcaaatatttttcatcggaacttacaaatgcgtcttttctttcggtgtctattttaactgcggtttttgcaggtatcaatttgtctgcaaaggctatacaaacgccccagtaaccttgtaaagcggttttaattgcaaggttaaggttatcttcggcatcggtgtcgggggtggctaatgggtattgtgccccggttatgattatcgacttatcaaaatttttcaaagcacattcaaggtatgcggctgtgtaagccatactgtcggtgccgtgggttattacaaatgaatcgtatttgtccctgttttcccatataatatcggcaatttcatcacgctgccggtcggtcataacagatgagtctataagctcacaatccaaaaccgttatatccgcctccgggtgtttggagtattttaaaatatcattgcctgtcatagtaggggcaagaccgttttctcccatggtacatgccagggtgccgccggttgtgataagcaaaattctgttcataaatttgtaagtcctttcagcaatgtcttataaatacagtataacaaaattatcggttaatgtaaattcaatatttgaatataatttattttatggtatgattatataaaagagcaggtgatgtttatggatattttaaaacaagatgtcagatacttaaaaggcgtcggagaaaaaaggcggcggcagttgtacaagcttgatgtgcacaccgttgaagatttgctgtaccttttgcccagaagatacaccgactattccgacccgtatcaaattgcctacgccccttatgacgaacgggctgcggtgcttgcaacggtacttgaaataggcaacggtataagggtgagaggcggcagagtgatttacagagttttgtgccgggacgaaaccgcacgccttaccataacattttttaacagcgaatacacggtaaaacagttgcaccccggggaagattacatcttctacggcaaggccgagggcagtatgacaaacaggcagatgtcctcgcctatattcataaaagcggatgcaccggtaaaaaaacggccggtttatccccttactgccggacttagtcaaaaaatggtttccaaatacattgccaccgcacttgaaaatgcagggaaaatagaggattttgtctccaccgattttttgcaaaagtacaatctgacggatttaaatacggctcttcatcaaatacattttcccacaagctcaaaagggcttgaaagggcggcggaaagactgacatttgatgaacttttgattttgcagataggtttaaatctgcttactgccaaaggaaaagtaaaggcaggctgcccggttaaaaccgtgaatatagacgactttttatatagcctgccatacacccccacaagggcgcagtttaatgcgataaaagatattcttttggattttaaaagcggttatgccatgaaccgactggtacagggggatgttggcagcggcaaaacccttgttgctgtggcggttatgtactgcatggctaaaaacggttaccaaagttgtatgatggcacccacggaaattttggcaaatcagcactatgaaaacataagtaaaatgctggaaaatttcggggtttgtgtggcgttgctgacggcttccacaaaagcggcggaaaagagaaaaatattatcggatttggcagagggtaaaatacaaattctcataggtacccatgcacttttaagtgacaaggtgatttttaaaaatttggctcttgccgtaaccgacgagcagcatcgcttcggagtaaaccagcgcaatttggcagggcaaaagggaattaaccctcacatacttgttatgagcgccaccccgataccacgcacactggcgatgattatttacgccaatatgcaaataagcgtaattgatgagatgccaaagggcagaaagccggtgcaaaccctcttggtaggtaccgataaaaggcggcgtatgttcggttttatagataagcacataaaatccggttatcagtgctatatcgttttgcctgcaatagaagaaaatgaaaatatgagcgaattgcagagcgttgaaaagtattgtaatgaggtgattattcctctcttgccggatgcccgagtggctatgctccacggcaaaatgaaagctgcggaaaaggatagaattatgtccgctttttcaaaaggagagatagatctgctttgttctaccaccgttgtggaagtgggcgttgatgtgcccaatgcggtgcttatgataatagaaaatgccgaaaggtacggcttgtcggctttacatcagttaagaggccgtgtcggcagaggcagtgtacaaagttattgtattttggtaagcgacaacagaaatcctcctgtgcaggaaagacttaggtttatggtaaaccataattccggctttgatgtggctcaattcgatttgcaacaccgtggtccgggggactttttcggttcaaggcagcacggcttgccggctatgaaaaccgccaacttaaccgccgatgtaaaattgttggacaggacaaaggcggcggcagaggaaattttatctcaaagcccggatttaaaactgtaccccggtgtaaaacaaaaatgcgccaagttgtttgaaagtcttacattatagaaaatagtgtctatgtataaagtacaaattgaattttgcgtgtctgtgtaaagcacaatcgcattttttacaaaaacaaatgtgcaatttctcacatattcaaactctttgagcattgaataaaatgttttatacacttataatatatatcaatatttagtattattatttttaagaggtgaatttttatgaacagaaaaccaatcgtagcaattccgtcggaacctgttacaagtgaaactataaaagctctcacagacaaggaaatttatatggaaaggtctgttgatacaaaccaaaagtacatcagccaatacggcggtattccttttgtaacacaggttgccgaaacgcaagaacaggccgaagaaattatggaaatttgcgacggtttgtttttgaccggcggcgatgatgtaaatccggcattgtacggcgaagaaaaacttgaatgttgcggtcggttcaacgaaaggcgtgacaaaagcgatatgctgtttttgaaagcagccctcaaactgggcaaaccgattttggcaatatgtcgtggcagccaaatagtaaatgtttactacggcggtactttgtatcaggatataaaaacacaatttaaaacagatataacccaccgggattttgcaagagaacactttaatgcctatggtgttgacaattccgcccacaggataaaaattcaaaagggttcgcccttgtatatgatagtgggtgacgatgaaacaggtataaacagcttgcatcatcaaggtgttaaggatttaggcaaaaaccttgttgtacaggcctcggctcccgacggcatggtggaaagtttctatcttgacagcgacgaacaatatttaagagcctaccagtggcacccggaatttcaggacgacaaccttgttaaagatgccatagtaaccgactttttatccgagtgcttgataaacagagaaaataaactttaatttgccgggcacggatataaaacattcggattatgccctggagcacttctccggctttggcgaaagccacagcgcccatactgtaaatacggatatatacaaaaatgcctcccgttttgggaggcatttttgctttgggatttatggattatgaaaaaagtttatcatttgtcgcttttgctttttatagctgcctgtgctgccgcaagtcttgcaataggcacacggtaaggtgagcaggaaacatagtccaaaccggcgttttggaagaactgaattgaaacagggtcaccgccgtgttcaccgcaaacccctaacttgatgtcaggtcttgcctgtttagcccatgaacaagccatttttataagtttacctacgcccatttggtcaagttttgtggttgggtcaaattcaaatattctgttcttgaagtagtcgtcaagaatttggcttgcatcatctcttgaaaggccgtatgtagtctgtgtcaagtcgtttgtgccaaagctgaagaactcggcagattttgaaatagtgtcggtcattaaggcggctctcggaatttcaatcatagcgcctaccttgtatttaagggtaacgcccctttcccggaatacctgctgtgcagttgtgtccacaatgtttttaacgaatgcaagctctgcctcgtcgcaaacaagaggtatcataatctccggttcaacatatataccgtctttcataacctgaatggcggcctgcataacggctcttgtctgcatttgtgcaatttccggataggagatagccaaacggcagccacggtgtcccagcattgggtttgtttcctttaatctgtcaacagcggctttaagttcggtaaaggaaatgcccatttcgtaggcagttaccgctgtttcgtcatcatcatggggcaagaattcgtgaagaggcgggtccaaaaatcttattgtaaccggcaagcctgccatctcacggtacatgccctcaaaatcgctttgctgcataggaagaattttttccaatgcccgcactctctcggatgtggattttgccaaaatcatctggcgcattgccagaattctgtctttttcaaagaacatatgttccgttctgcaaagaccgataccctctgcaccgaaaagtcttgcctgtcttgcgtctttcggattgtcggcgtttgttctaactccaagggtgcgcacctcatctgcccaacccataaatttggcaaagtcaccgctgagtgttgcgtctattgtaggcaactgttccttgtaaacattacctgtggaaccgtcaacggaaataaattcaccctctgttaccttaacatcgttaaagtaagcaaccttgttgtcccggtcaactttaaggccacgacagccggaaacacaacatctgcccatgcctcttgcaacaacggcggcgtggcttgtcataccgcctctggcagttaaaatacctcttgcaacggccatgccctcaatatcctcagggcttgtttcggctcttacaaggataaccggctcggctctcttttcggcagcctctttggcgtcttcggcgttaaagtaaactctgccgcaggcagcccccggtgatgccggcaaaccctttgctattacaaccgcatctttcaatgcgttaggttcaaactgcgggtgaagcaagctgtcaagccggttcggctcaactttcaaaagagcttcttcttttgagcaaagtccctgttcgtacaggtcaacggcaatttttatggccgcttgtgcggtgcgcttgccgtttcttgtctgtaacatatacaatttgcctttttcaatggtaaattccatatcctgcatatcggagttgtgtctttccaatttttcggctatttctatgattttccgataggcatcaggcataatttcacctaactctcttattgatttaggggttcttatacctgcaacaacatcttcgccctgagcattcatcaaaaattcgccgtacagtttcttttcgcctgtggccgggtttcttgtaaatgcaacgcctgtgccgctgtcattgcccatgttgccaaataccatcatctgcaccgttacagccgtgccccatgatgatggaatatcgttcatacggcggtagtaaatggctcttgggttttcccatgaggagaaaacagcctgaaccgctgccaaaagctgtgtttttgaatcggcggggaagtcgctgccggtttctctcttatatatatctttgtatccggcgattatttttctcaaatcccggcaattaagctggtggtcatattcaaccattgcttcggattttacattgtcaagtacattgtcaaaatatgatttctgtatgcccataacaacatcggagaacatttgaataaatcttctgtatgcgtcaagggcaaatctttcattgtttgtaagctcggccaaacctgccacaacttcatcgtttaaacccaagttcaaaacagtgtccatcataccgggcatagaagctcttgcgccgctgcggacggagcagagaagaggatttttcgggtcgccgaatttcttccctgttgtttcttccaattttgagaggtaatcgaaaatctgagttttaatttcctcggatatttcttttccgtttttgtagtagtcggtgcaggcctctgttgtaattgtaaagccctgtggaaccggcatacccaaattcgtcatctcggcaaggtttgcgccttttccgcctaaaagttcacgcatagagccgttgccctcgctaaaaagataaacatatttgtaagacataaaaacctccaataaagttgtggcaatattttggcaggctacataactgccgcaattttttcgatattgccgtaaatcaactaaaacttacaactaacattataacagacaaaaattaaatttcaatacaacaatattacaaaattgtgaattaaatgtacatagcacgattttcgttaaatttgacgaaacgcactttaaatcaatgtgaatatagcataaattttaagataaatttttatctgttttcgacgaatgttataaattgctaaatttttcacatataaaatgttaaaagttattgactttttgctcatagacatggataattatcttagaaaaacaaggagaaacaagctaatgagttataaaattcacatatatttcggagacggcaaaggcaaaaccaccgctgccgcaggtttggcggtaaggtatgccggcaaaggcggaaaagtgatttttgcacaatttcttaaagacgggacaagcggtgaggtgtctgtacttaaaaaaattaagggaatagaatatcgacgggtagaaaaagccttcggttttacatggacaatgtccgaaaatgagaagaaaattgccgcagatgaatataaaaatctttttgacagcgtcttgcacacatgcgccggcggcgaattgattgttttagacgaaattttggatttaatccgggtgggattcatagacgagagctatgtcataaataaaattttatctcttggcggaaagcgggaaatcctcctcaccggccacagcctaagcgaaaaaacagcggaaatcgccgattacatcacggagatgaaaaagataaaacacccttttgacagggggctctcggcaaggccgggtatagaatattgaatttttcctttatcaaggaaatttacaataataaaaaagaaattttttaaaaaggtacttgaaaaataattataatttggtataataaaaccaatagcaatgataataaaccagtaagaaaaagttgtttatcgctaagagagcctgcggccggtgagatgcaggtgcggtaagtttttccgaattccttatttagctgaccgatgaaggctgttgctgtgtagtcggctccggtgcatccgttaaatgcagggtattaaaaagctgtacaccgcagacgatacccgaggaggtcattcccgtgaggggatgataaatagaggtggtaacacgggaattttctcgtcctctgatttagaaaatcaggggacgatttttttatttgtcctctggacttacaaaacggaaaggggatagttaaaaaacaaatggcggtagttcctgggtaggaagcggacaaattcttaaagtacttattgaattttattttggaaaaatacttcgtaaaaagcgagcttggaaacctcggctttaaaaagtcttcttttggacttgaaaataattgatactatgaatattaaaatcgcctgagccgaaaagttcaggcgcattttatttaatcaaatcacttgatttatacgtgattatagtgtaccattttatagcagagatgttaaataaaacgcaatggccgtataaaataatttaatcgggagaattatgaaaaaatatcgcaaaatatatattgaaatcacaaataaatgtaacctaaactgttctttttgccccaagacgaaaagagccggcagaacaatgtcggcagaagaatttgccgcagttgcaaatgcagttagggataggggggtaaattattatcttcaccttatgggggagcctacttcccacccggagtttgaaaaaatattgaaaatttgccgtgaaaataaaatggctgtaaatattaccaccaatggcactttacttgataaaacaggcgatataatgcttgaaaacaatgtgcgtatggtgtcggtttctatgcacagttttgaagctaacagcttaaacaaagatatggccgcataccttgaaaaaataaccgatttttgtaagaaggcccggaaaaccgacacaataaccgaattgcgtctttggaattttgacagggagagcatttacgataaaaatcggctaaacggacaaattcttctttttttgcaggaaaatttaaaattggattttgatttgccgcaagcagtggctaaaacattagaggaaaaagaaaattccaaccaaagaaaattcaatatcaaattgaccgaaaatgtgtttttgggtatggctgaacattttatgtggccggatataaacagaaaagaaaaaaatgactgcggtttttgctacggcctccgcaaccaagtcgctattttggcaaacggagatgtggttccgtgttgtcttgacagcgacggaaatatggttctcggcaatattttcactcaaaattttgacgatattataaaagggcaaagggctttggcaatttacaacggattttcaaaccgcagggcggtagaacctttgtgccaaacatgcggttatatgcaaatgcaccttaaaaaccctgccgttaagtaaattatcacaatttttagggtaatgttaaattatcgttcacaatttgtttttgatttattctttattatatggtataatataacggttgattaaagagctattactttataaggagattatatagatgtctgaaaaaaacaatcttaacccacgggaagactttgaaaaagatttcaacgaagaaattgaaaaagaaaataatgtttaccgtgcaaataaaaagtccgtaaaaaggacgagaaacagaagaattataacaggcggaatattttgcgttcttgctttcgtaggtgttatgacaatttttacgggagttgtaaaagcaggtgttaaactgtttgacaaatcctccgaaatgcagaagtatgaaaatatgctttctactttggttatatatgacccgttgccttttgaatccgttgaagaggccgaccaaaatgttatattgtcaagcacattgtgggctgccgtaatgaacgaggatatgtccgtttatgaaaaagacgagtacgacagaacattgcttcctgccgcagtagttgacaaatattacacagcgcttttcggcccggatcacaagcttgaacataaaacatttaccgaccaggatatggaatttgaatataacagcgaaaagcgggcttacgcaatacctgttacatcttacccatccggctattcaccgaaagtggttaaaatccatacaaaatccggtgtaaaaaccgttaccgttgcttatctctctccaagcacatcttgggatgacacatcagacagaagcatagctaagtatgttgattatatctttacaaagaacgacagtgacaaagaatattatctcacagcggtaagagaaagcagtatgaaggttgaaatagccgattcttcatcatcttcttcatcatcttcttcaagttcacggcaataaaacaaaataaatgcgccgacacacagtgccggcgtttttgtttgcgaatttttatttattcaattttaaacaatctttttgcattttggtttgttatgccgatgatctcatctttcgtaaatccgagttcatctgccattttttgcgctgtgaaatgcaaaagagaggaatcgcatcttttgcctctgttaggctccggtgccatatatgggcagtctgtttctataagaagtttatcaagaggcactactttcatgctttcaatggcacggcgggcgtttttaaaggttataacccctgtaaaaccgatgtaaaagcccattttgataagttgcttacaactttcccggctgccggaataacagtgaataacgccgtttttcaaggggtgagcagtaagtatatcaatggtatctgccattgcatcccttgtgtgaataatcatcggcaaatcaagctcgttggcaaggtctatctgccgaataaaggcatgcttttgaatatctttttccggggcgtcctcatagtggtagtccaaaccacattcgccgattgcttttacctttgaatctgccgccagtttttttagtatttcaaggctgtccggctttaatatttcctctgcgttttccgggtgaatacccaccgcacagtacataaaatcttctttttttgcctgttccaaagccttttgagaggactgtatatcatatcccacattcattacattgcctacgccgctttctttaagcagattaagcacactgtcataatctgcccgaaaagcatcgtcgttgtagtggctgtggctgtcaaaaattttattcataaacttctcctaaaagaaatgctctgcttaaaaacagagcatttttatttgtgttatttatcttattttgctgcccggttcaacaccctcatcaacaaatataacctttgcggaaccgtcccgattatcggttgccaaaatcatgccttcgctcatgatacctgccatttttctcggcgcaaggttgtcaatgattataacctttttgccgataaggtctttcggttcgtaccattcgtgaatgccggagagaattgttctctctttcttgccgtcaaaaaccgtattcttcaaaagttttttcgagttggaaagcgcctcggaatttacaattttacctacaataagatttacctttgcaaagtcgtctattgaaatttcttccgttttttcttcggccttttctgcttttttagcctcggctttccgttttgcctctctccgggctttcttttcttcttcctctttggctattgctgcaagctcttttgctgtgtcaatacgagggaagatcacatcgcctttgtgcacggtaacttcttttttgtaaccgaattctttaaggctgtcataagtaagttcctctgccgtgtaaccaagctgtgcggcaatcttaggtgatgtgttcggcaaatatgcctgcaacaatgttgttacaaatctcaaagactcaacaagaacatacaaaaccgttgcaagtcttgttttgtttgcctcgtcctttgccaaaacccaaggagctgtttcgtcaatatacttattggctcgctgaacaatagcaaaaatctccgcaagagcttgaggaatactcaaatcgtccatgtacttatctgtcttagctgtaagaccgttgcacatatcaataagggttttatcaatatcttcatactgtctttcggcagggagagtgccgccaaagtatttttcaatcatggcaacggttcttgaaacaaggttgcccaaatcgtttgccaagtcggcgtttgttcttgcaataagggcctcatgtgtgtaaacgccgtcatttccgaaaggaacttcacggagcaagaaatatctcactgcgtcaacgccgtatttttcgcataaaacaacagggtcaacaacgttgcctacactctttgacatcttaccgccgtttaaaagcaaccagccgtggccgaaaactctcttaggcaacggcaaatccaaggccataagcattgcaggccaaataattgtgtggaaacgcaagatttctttacctaccatgtgcaggtcagccggccaatacttatcaaagtcatgatattcatcattttcatagcccaaagctgtgatatagttagaaagggcatcaacccatacataaactgtgtgatccgggtcaaatgtaaccggaataccccatttaacggtagttcttgaaacgcacaaatcctgcaaaccctggttgataaagcttatcatttcattctttcttgcctcaggctgaatgaaatccgggtgttcttcataatgttttaaaagtctgtcggcgtatttgccaagcttaaagaaatatgcgtcctcttttgctttgtaaacttctctgccgcagtcagggcatttgccgtcaacaagctggctctctgtccagaaagtttcacaaggtttgcagtacataccctcgtagaaacccttgtaaatttcacccttgtcataaagagttttaaatatcttctgtacagactttacatgatattcgtctgttgttcttatatatctgtcatagcttacatcaagcaatttccaaaggctttttacattggcaacaatttcgtcaacatactgcttaggtgttttgcctgcggcagcggccttgtcctgaattttctggccgtgttcatctgtaccggtaaggtacattacatcataaccctgcaatcttttatatctggcaatggcgtcgcaagctacggttgtgtagctgtggccgatgtgaagattgtcagacggatagtagataggcgtggtaatataatatgttttcttattctccattttaaaacctctttcgttaaactaagtctaaattttatttccgacaataaattacttattataatatcaaaatacattcgtattttcaatacttacttgtgatttttagcactctttatttttcttctcacctcaagagccatgtctacggccttttcataaaacgggtcgaatactattttaaattcacctgctgtctcgataacccggccggagaaattggacttaaattccaaaattctgtaaagttcctcgccgtcttcgggtctcggcgcaacgccttgcatatcgtaagtgtggcaaccgccctcggtagcccatttcataagttcatactgtaagccgtaggtagggcgcagatttctcatctcggcagtagaacagccgtaaacatggcttgttgtgcctgcgtactgtaccgcaacgccgccgcaaaggggcttatcttcgtaataagccatgtaaagtcggcagttatccccaaaggcgttaagcatttttacaaagtagtttttcggccttatgctaaaatgctgtcttatgccggtttcagagtatattttgtaaaaatcttcaagtccttcaaggccgcagtttttataaacaaccccttttttgtaagggtagcgcattttatagcgggtgtctctgtccattttcagcataagctcatccattgacattccctttatatagttcagcatataattgtatctgggctgaattgtatcgtgaaaagctgcgtgttcgtgtattgtaagtccacagcttttgaaaaattctatggtcttttcatcgtcaaccataaccaatgggtctgcaataaaaacatatgcgttgtgctttttgccaacctgtttaacgccgtcaatcaaatccaaaagggtttctctgtcggtgtaatcgcaaacagggcctctgcaagcgtacatcattgattttatacctattttgcgtatcagaataaagatgccgccctttatgtttcctttatcatctctggaaacaacaacttcgttttcccattcgtcctttacaagaccccactgaaccgactgctgaaaagccccgtgtgggtgatgagagacgaaatcctcgtattcactgtatttatctttacttaaaatttccataactaaccacctaaatgtaatattcggtatatgatagtatatcataattctgtgaaaaataacaggtttttttaacaataaattgacatttgaccgaatatttgatacattaaatattagcacttgtaacccaggttacaaaattcggaggaaatatgaaatatataaagaaattttttgctttgatacttgcatttgcaatggttttgtcatttgcggcttgttcggcaaaatctaacattgacacaagtaccgaccttggccgggctgtaaattcagcgtcggactacctttacaaaaccgttaaaaagacggctaaatatggcgacgaagaggcaattatcggccttttgagaagcggatatatcgactattgggacgatttatccgaagactacaaaatgcacatgaacgattttatccgcaaaaacggaagcattatcggtttaaagggcgataattattatgacgcttaccctaatgttattttcgcatatacggcttgcggaatttacgcaaacaaaacatccaatgcggatcttacaagcggtatcagcaacgacaactttgttatgaagggcggatatttaaacaaaataaactgccttgcagctgttgagtgcggcggcaccgggttttacccaatgtatgccgacggtgacttaacaagagaagatttagttgaatttgttctctctttgcaaaacgaagacggcagtttttcatataaaggtatggaagaaaccgttacgcaggttacatcacgggcagttgtggctctctctcttacagaacaaagccggcaggtaaaggcagctgttaaatccggcgttgaatatcttgaaaacaccgttaaaacaaccgatgatttaaaagatttgtcaaaggcaattatcgcccttaatacagccggtgttgacgcaaccgatgtaaatggcaacgatttggttaaagcccttattctccgccaaaacagcgacggctcttttgcacagagcacaaaggacgagggcaacaaggacgataccgcaacggcacttttggctcttgcaagccggtacaggtttgaaaaaggcgaaacatctctttacgatatgagcgatgttgtaggcggtactcataacaagctcagccccctttggtcggcttatgttgacacaatgaaggttgcctttgccattatccttacattccttgtaattctgtttattgtttcaagatttagaattgcaaaatggaagaaagaaggcatatacgattacgaaaagggcagaatgatgtctgacgaagatattgccaaggtaagagcacggcaggctaacagacggtcgcaggaagaaaaggaaaacaacggcgaaaacaccgaaaattcctctgaaaactctgaccgggtcaatgcagaagaaaccgaaaagtctgaaatcccacgggaaaccgcaaacaaacagattgaagaagccgataacggcgaagaaaaataaaaatttgaaataacaaaaccgaggtttgctttattgtaaacctcggattttttatgtgtttattttaaatatttgtgacctgctcattggtggggtatcggggatttgttcaatataatacaacttaaagttgtaaaagtacttttattttctgaaaatttatgttaatatatagataagataaaatgtcaagggggcagaatatatggaagagaaacgcagttatatagctattgatttaaaatcattttatgcttcggtagagtgcatggaccgcaaactcaacccccttacaacaaatcttgtggttgcggataaaagcagaaccgaaaaaacaatctgtcttgcagtgtcaccggcgctaaaaaaatatggcatacccggcagaccgaggctttttgaagtggttcggcgtgtaaatcaggtgaatagcgaaagaattttaaaggccaagggaagaaaatttgtaaaaaattccactgacgaaaacgaactgaaatcatcttgcgattatcgggttgactatattatcgcaccgccgagaatggcaagatatattgaggtcagcacccggatatacgcaatatacttaaagtatgtttcccatgatgatatgcacatttattccgttgacgaggtgtttatcgacgccacaaattaccttgccacatataaaatgactgcggaacagcttgctatgacaatgattaaagatgtgctggaaaccacggggataaccgcaactgcgggcataggcacaaatttatatcttgcaaaggtggcaatggatattgttgcaaaacatatcgaaccggatgaaaacggcgtgcgaattgccaaacttgacgaaatgagttatcgcaaattgctttgggaccaccgaccggtgacggatttttggcgtgtgggcaggggctatgccaaaagattggaagccgccgaactgtacaccatgggggacattgcaaggtgttctttgggcggtgacagggattattacaaccgggatttgctatacaaaatgttcggtgtaaatgcggaacttttaatcgaccatgcatggggttacgaaccttgtaaaatttccgatataaagtcctacaagccggaaaacaacagccttggggcggggcaggttcttaaagagccgtactcctttgacaggggacgaatagtgataagagagatggccgacacactttccttggaacttttggacaaaggccttgtcaccgaccaacttgttttaactgtcggttatgatatagaaaatttgaccgatttaaaccgaaaatccgcttacaaaggggacataaccgttgacagatacggcaggcaggtgccaaagcccgcccacggaacggaaaatttaaaggcaaaaacatcttcagctcgccttatcacccggggaatgttaaatttatatgacagaattgcggataaaaatttgctcattaggcgtataacaatttccgcaaccaaggttgtaagcgaaaaacaggcagaagaaaaacaaaaatatcggcaaatggatttatttaccgattattccgacttaaaaaagaaagaagaggaagaaaacgcccgccttgaccgtgaaagacgacttggacaggcaatgctttctataaagaaaaggtacggtaaaaatgcaattttaaagggtacaagccttgaagaaggggccaccgccatggagagaaacgggcaaataggaggacacaaagcgtaggtatgaacaatgaaaacagccataaatatgatgatattataaatatgccctatataaagtcaaaaaaaagaccatggatgaccatggctgaaaggggagcacagttttcgccctttgcggctctaaccggttttgaggacgcaatagacgaaacggcaaaaattgttgaagaagaagtaatttcaaaagaataaaattattataattattctgaaacaatttcaaagtgtataaaatttataaaaaataaaaacgccgtaaaacacggcgtttttatggtcgggatgacaagattcgaacttgcgacctctgcgtcccgaacgcagcactctaccaaactgagccacatcccgacgaccattaaattatacaacagaaccttatttatgtcaaggaaaagtttcaaaaatttatcggtcaaagggattttccaaaatgcaatatcaacctgtttacaacacagagccaacacagaaattattttaaattttttattgacaaaatctataagctgtgatattatatttaggctgtcatttagacacggagaggtgtccgagtggtttaaggagccagtcttgaaaactggtgattcgcaagaaccgtgggttcgaatcccaccctctccgccaaagagatggtttcccatctctttttaatttctctttccatattattcccatacaaatattgtccttgacaaattgggaataatatgttattataatctggcaatcaaacagaagtacaaaacttcggacttggagatttactcaagaggtcgaagaggcgcccctgctaagggcgtagggcgggtaaccgtcgcgagggttcaaatccctcaatctccgccaaaaatccgctatttatagcggattttttattttatattctataattttactttatatcataatatcatagttttattctttaaatatcatttacacattcttattgacttttaaaaattgaatatggtatatcatttgcaatagaactatcagcgtctaacggtttagccgtatctctgccatcagtgccttgtgctcttttggccatagaggctcgctgtggttctatttcgtttttatcaaattaaaaaggtatccacaaagccaagttgccttgtggatacctttttggtggaggcgacgggagttgaacccgtgtccgaaaaattatccgtaacagtatctacgagtgtagtttatcattaacattccctttgcaatgaaccgacaaacaggttagtgcatcggtagcttcataaaaccgtgacaagcctcaaagctttggcgtgttcacgttctctatctgcatgacaccttgaccccggccgatagaaaaccgggcaagatggttgcttttaattaagcagctactaattcgttacgattagcgtttatttttttggaacttttaaagcggtgtcccaccgctactcgctgctcttacttcaaattccccgtcgaaatccaatacgcccccatattcaattttaaatatgcaaaattatctgcggctttgtgttttcagcgcacggtcaatatcacgttttgcgttctttttggcgtcggcttcacgcttatcgtacaactttttacccttacacaaacccagttctactttaacatactggtttttgtagtatagtgaaagaggaacaagggtcaaaccatcctgctgtattttacttaaaagtttgactatctcttttttgtgtagcaaaagccttcttactctgaaagggtctttgttgaaaatattgcctttttcataagggctgatgtgcataccgtaaatatacacctggccgttttgaatatccgcccaagcctcttttaaattcaccgaaccggtgcggatagattttatttcggtgccgtaaagttcaataccggcctcgtaggtttcaagaacaaaatattcatgtcttgcctgtctgttgacagaaattgtctcgcccatatatccgcctccttatcgtgattattatataatacatcataatcaaattattgtcaagttttgcggcatgggctgaaatttaattaaattaaaatcacgacctttacggtcgtgattttttcacatttcaaaatcctctaatttttcataatttccggcaacaagaattgtcgttgtaacatcttcctcatcggtaaaagaggtcaaaaccatatatctttccccggacacagagattatttcgctttttgtgtgaaattcgctgtgaataccttttacggtgacgactgagtttccgccgaagttacccacatcggttacggtatatttgttcatattctttcctttaaaaactccgtcataagttcggcgcagatttttaaatcctcacccgtaaagccgtgacctaaccccggcaagaccgtaagatcacagtgatcatatatctccattgctttataagaattgtcaataggcacaacattgtctccatcgccgtgaacaatataaacatcgcctttgtaattgccgatagtaccccacatatctattgtttttgcgtctataaaatactttttgccaacagtcataataaagtgatattcactctccgggattaaatcatcatccgggtacaatgccctgaatttttccggcaacataaagccggggtacacaagcataagcccctttattttatctttcaatttagctgcttcgagggcggcaactgcaccgccttgggaaccgccgagcaaaaataccctgtctttatccacataatcaagttttataatccggttataaactcggtcaagatcggacatctcggtcagcagagacatttccaaagtcgagccctcactccttgatttttcgccgcctcctctgaaatcaaatacataaacacaggcaccccgggcggcaaattgcctgccgaattcatcgtgatagtcacagttggcgttaaaaccatgggcacaaataaccaaaggatatttatcttttttaacggtcggcatgtacattctgccgtatattttttgtccgttgttttcgcaaaacaactcttttacggaatagttcattattattctcctttttttaattattttaccacaaatttaaaaaaataaaaggttattgggaaagattgcagaatagtattttttgtatgttacaatattaaatccgtaaggggtgattatgtaccgaatttaaaattgcccgataccaaaaaagatttttatcggataaataaaagatgtgcagttgatttttgaccgcacatcttttgatttttacgttaaattttagtttttgtaaaattctatcattttatccaacatatccgtgaacatctttttgtcgctccaaacaagaacatcaacattgggctcctgttttgaaatgccgttgaaatcaactatggtttgaccggcgcaaacggttcccttggtttctacctggacgaagcatttccgggttttgcctaaattgccgtctataaaatatgccattgtaatggcgtcgtttataacctgaatacaatcttccgggccgccggcaattcttctctttacaaaatgtttaaatatatggctgaacaagtcttctattttgctgccctttaccttttcaagataaccgtttagttcgtctatggtaataccgcaaaaatcgttgccgtcaagaccgcacattgtaaccggcactccggatttgaacacaatatccgcagcttccgggtcaatccaaacattaaattcggcgtaccggttcatatttccggttccgcctgtgccggccatacagacaattctctttataagaggcttaatttaagggtatcttaaaaaagtgattgcgatatttgtaagtgggccaagggttactat

SEQ ID NO: 109 - DNA, 12149 bp, Unknown
  16S sequences of unknown bacteria
tgcgcactgcgtgtgctcgcgcctccagccgcttcgcggcctccaacggccagcgaccgggacgggaatgcatttttacgtttcgcaccgaccctcaattcagcatggtcgttccactgcgctcgcaagctcgcttgtggctctccctgcttcattgggcttactacggcctgtttccgccactggcggcggccttcgtgcgcccctacgcttcgcttgcgcggtgttccgtgcctgcgcacttcgtgtgctcgccacttcagcccttcgggccttcacctttttgcaagcatttgctctgcaaaaaatgccagaaatgacgtacacgccgtcatttctgatttaagcctcgttcttccgatgctttgtcaatgttctgtggcagactcaaaaattttgagcttgccattctatttagcgatatttgtattcaaaatgcggtgtgaggcgattcgaatgataacaattgacaacgtaaccaagatttataccaagggaaagaagcatatcacagcgctaaaggatatcaatctaagcattccaactggcagtgtggtaggatttttgggatccaatggcgcggggaaaacaacgcttattaagattctatgcaatctgatcacgccaacttatggaacggtgctcattgatggggaaagcgttcagcgaaatccctccttgccacaaaagaagattggcgttgtgctggaaggcgcccgcaatctctataattttctttctatagaagacaatctcaagtacttttccctgcttaactccatggaagagcaagagttcatttctacaaaggaacgccttcttagtttgtttcaactggatgataagcggaaatcgattgtcaatgaactgtcgcgtggtatgcaacagaaagtggcaattatgattgctattttgaagaatccagaaatcctagtattggatgagcctacactgggattggatatcatatctcaaatcaatatgaagcagtttttgctggacgttgtaaagaatagggggacaacgctcatcattagcacacacgatgcagctctcgtcaacgatgtgtgtgagaaaattgccatatttcacaagggtatgttgcgggaatacaacactttggatgcgcttaaacaagctacggcatacaatggctatcgattgagcgtgcaaaagagcgagaacgttgcgcaaaaactgcgtgcggcaaacatttcttatcagatagaaggggatatatttaactttgtcaccgaggatttgaaaaacactataaatttgtttccaatggaggatattgttacaattgaaaaattcgggcgctcaattgaggatattatgattgaaaacgttagaggtgatgcatagtgctaaaattgatgaaagctgagtgcgttatgtatcttggcgaattgaagcagtattgggtgaattatgttttttataatatcagcctcctcatcatgtttatgggcctgttctattcttttggcgccactgagcctataaacagcggagccgtggcaatgctgtatggtctggttgcatggcaattgtgtacgagtgaattgtcttattttgccaatgtagtggaagaagaggcgatgatgggcaccctggaacagatttttatgacgcgtaccagcgttcttaaagttttgacggggaaattcgtcgtgacgtttctatttgacatttgtaaggctgtgatactgttttccctgtgtgctttggcgttcggcattctggatgcgctgtcgctccatggagcaaacaatttttgggctatagcaattgtgatttgggtggccattagctttgcttccatgggtttgctctttgccggccttgcgctgttttacaagcgggtttccgcggtgcttcaggtcatcacctatgtgttgctgttctttaccaacatcacaaccgcggtagacttcctcccggccgcaatccgccccatcagctacggcattccactgacatgggggatggcctgcattcgatcgctgttggcaaattctttctcgctcagggagcttacgggattgctgatttccagtacgttgtttatctgcatcgggtatgccggctttgcgctgttcctcaagcgcgcacgcgtttatggcaagctgggacactactaagcgcgttcctgtccagtccccgcgcagattcccgggcggagcggccgagccattgcggcgcctatgggcgctttcggcgcatccgcccgggttatgttctttattgggcaagatggcaagcgcgtgcagaccggcgacttatcgccattctttgcgggactggccacatacataagaaccactgcggaggtactcctcgtattgggcctgtgtttctgccagcagactttccaggcggggaatgtcctcctccgccgcctgcgcgatctggttgggaagatcgttttccagcatggtttcataagaggccaaccgttcctcaaatccttcctgccgcaggggcgcgtcctgcgcgagttgctacccaaccgcaagcacggccatcaggacgatcagcaaaatgatgccgattgccttatacgattttcgcgcaagcaacgctaccacaacccacacagcgcatgtgagcatattgcaaacccatcttgcaaggcaaacggcttccgcataagttttcagcgttatgccccattcaaggtttccatagaccgacacgctctgaatggctgcgtctgccgcgccggtgccatagagccattgcgggatgagataaatcccgagcgcgtcggcgagcgaaatcaacgcggaaagcgcggcgcatagccatagctttgtgcgcaaagtcctctttcttccatcggctgtggtgcatatcaggtcatacatttccgtgtcgtgccactcgcagagaatgccaaccgccacgaacgccagcgcaagggggcacaaccacatcttcgccagcccatcggccaggatccagccggtttcatccaggatgcgcaattgcgcaatggggatccccttgctgttcatgttctcctggcagaccaccagctgctccacctggttgagcagccgctgcgttgcgttgaagcgtgcggatcgttctggaagggacaactccttttcccgaaactcctcgattgtcagcaaacccgcctcgtattccggcgtataatttttatagtattcttcttccgcctgctggctatccagcgcaatttgcccggcggcctcttccagcgtgtattccgagtattcgtgcagcaaatcaatgtatgccttgtcgggccggattgcgtccaattcctgcaccgtgacggcaatctgtattgccgtgataaccacaatcacaaacagaaagatgggccttcggaccagcttctttatctcaaacccaatcattttgctttcctcacaaaccggtggcacgcatatgcgcacagaaatgccgccaatgcaataccggcgattgcgtacagcacaggggccagggaattggcgcccattggctgcatcacgccagctatggaagcgatatccagcccttgcgcctcaggaaacagcaaatgcagcacattgggcgcaatcaggattgcaaccacgaccggcagcgcctgccattcctcttgcaaatgcgccgtaatgaacatcgtacatcccaccgcaaagaacgccagcgcattctgcatcgccagctggcagcacagcagcgcgcctatggacaggggaaaatagcacaagcccatgctgtacatggcctgcacttcgctcgccaggccgccgaaaccgcccgccatataagcggcgatgcccaatccggccaggaattggcctgttacaatcataaaagcgctcaaccatgcgctgcccactttgcgcaccgccacccctttgggcgattttgcggccgcgcaaatcagctcccgcatgccggttttcttttccaccagcatggcctgcgccacaatccagacgaccggcagcaaaacgatataagcataagaggtgttccactcggcgaagtcttcgaatggatcgatgtttgcatactctggcacggtgagatgggcatatctttcgctattttccaggatcctgcgcgcctcatcctcttcgtatccctttctcttaacggcccttgccaacatatcctgttctttttcccactgcgcctctagcgtgctgatatgttccattcgcgattggatgcggtacagcaccatcaggtcaaatggcaggctattggaataacttccctcccgcgtttccagcgattgaatcgcttcctttgtgccctggcgctcttcctccgaaccggcaaacatatattgcatctgcagttcggtcaatgcgctgtcgacttcattataattcttttgcacatagcccagcggatcgtcctgggccagcacatcttcccacgctgcaatcatctcgtcccgcaaaaagtaagcgccgttatacatgctgttatgcaaattccacattgtgcccgcaatgacgagcaatatgacaacgaaatggatcggatgccatagcttctttagttcccgtatcattgcgacgcctccttaaagtggtactgatacaagtcctccagagaaggagcaatttgtatcccgtttgcgggaggggtggactccgcaatgaccttcagccccgcctgtccattcatgagcattctggtggcattgggatattgcatgaggttctcctctgtctcgctcagccaccacaccttgcctgccagctgcccggtcaaagcatccgggctgccaacggcaatcaaattgccgctttgcaacatcagaatggtttctgctaaggcgctcaagtccgaaataatatgggtgcagaggataacggtgctggtgacggatatctcccgcacgatgttcttgaacaccacgcgctgcctgggatccagcccggccgttggctcatccagcaatatcagccgcggggtgcccagcagcgcctgcgcaatgcccaggcgctgtttcatgccgccggaataggcccggattttcttttcggcatcgccaagcagttcaaccttgcccagcatcgtttccacatcgcttttgcgctgcaatcgcggaagccccttcagctcatggatgtattccaggtattccctgcctttcatccaggaatagaacggcatttgctggggcagcacgcccagcccggtgcgatattccgcccccagcttgtgaatttccactccgttccaggtcacagtgcccgccgttggcaggaggatgccggccacaatgcggaaaagcgtgcttttgcccgcgccatttgggccgagtacaccgtacacgcctgccccaaattccattgaaaagttgcttagtacggttttcttgccgtagaccttggtgattccatcgcactttagcatttcaattctcctctattaaagttgatgaatagtcttcgttgatccgatagactgtgtagatatagcttctttcctccatcaccttataatagaagcccttttcatctgccgcaacggcaacagtaaagcagtcctttgcaacgaccgcgcattcccggcctgtgttcagttcaaacactctcaggcttgaatcccttcgcatgatggccgccaccctctcgccatccggcaatatcacaaactctcgaatgccctgtagcggcaggggagtatattcgccgtcgctctccaatgcgcatagaaccctatcggcccctaatgtgaaatagaccgtatcgccgaaaatctctatggcatccacaatatcgttcactataatttgcgctttggcggattcgttttgcaaatcgatccagtatagcgccgttccatcgcagtagtataagtccgtaccaaggacggcatagtcgagcaagtatgcgtcatccgcgatttgaacacagtccgatccatcgggctgcatggagtaaatcttttcgtcggtcgtcgcgacatagagcacgtcatcgaacatcttcatgtgatatatccaatattcaatttcgttctcgatcgtaaatattgtgctagtattttcgtataaatcggtctttataatggtataccgcatgttaatcagtatatccccatcaggcgccagtgcaatgctgggtatatcgatatattcattgtatacaagcgcttcacccgtttccaagtccatctccatcaggccattgttttccacaatgaagtaggcaaaattatcggacgaaacatagaacaaatcaaccgcgctggcatcttgcaaacacacaaccgacatgcacaggagtaacggcaatattttacgtagcttcttcattttacaacgcctccattatgagtgtttttgtagtcggactaggtagtgctataccgtttcctcgcaaaaatatttggcaggccatcatccctcggcgatcatcatgccgatggtggtgcgcagccggttttcgaattcgcggatgtccatcgtcccctccagatattgctgcatccagtcgccataggtatccatgatggtggaaaggtgcggcgcgacctgaaggaatccggcgatggccttatagcgcgcgatgctttcggggctggccacataggaaccactgcggaggtactcctcgtattgggcctgcgtttctgccagcagactttccaggcggggaatgtcctcctccgccgcctgcgcgatctggttgggaagatcgttttccagcatggtttcataagaggccaaccgttcctcaaatccttcctgccgcaggggagcgtcctgcgcggggcatgtgtggatccagaacaggccgtcctgcgcgcgcaacaggctttccagataggcgatggccgcgtcgggctgctgcgaatagggattgacgaaagcgacggtcagatccatgtacagcgcgtcgccatccgtttcctgcaatttgagcatcaagggctttaatgtgtgctggaacacatagtcgttttgcgaggcggaaaagcggccccaactgctgaagaggatttcgccaccggcaaaggtgccggcgtaaacgttgccagcttcgcgcccgtccaccacttctgttagcgcggcaaaatcgaacgcgtccagcgcgtccagcgcgctgcacagcgcgggggagatcgtttcaaagtcctggagcgcctgcacttggcccagggccgtgcgcaggatcgtttgcagcagcccttctttcaaataggcgacggatgtgtagttgtcgaacaggcgcacatcggggtgcgtttccagcagggcgggcatttgggcgagcagggcgaagaattcttcccaggtttgcggaatgtcgctttccgccagaccaatccgctcaaaggcagcgggattgtaagcgaggcaatcgaagttcatggagaccggcacggccagcaacgcgccatcccgggtggtccatttttggatttccggatacatgcccgtcacgctgctttgcagaaaatcgctgctggaaagatccagcaaatatccccgctcgtaggcggcctgataatccccgctgccaacggaggccacatagacgtccacatcgctggactggttgagcatgtccgccaggaaattgcgcgtatcgccgctccgttctacggatatatgcggataagactgtgtgaaatccagatatgcccggtcaaataagggggtaaacgcgtcctgcacgcaaatgcgtcctgtcagcgcgtcatttccggccaatagatcgcaggcgagcaggagatcgccgtcggaaatgtacaggatatcttccatgcaaagcagggaaaaggcattgctctgcgagatgggcaacgcgcacacgggggcggcgctgccatcgctggatgcggcgtacagctcgccatcgagcacatagaaaaggcaattttcggctggatggtagtgcatgccgctgatccccgcgggcagggaacccagcgcgctgtgcgcgtgatcttcgacgcttagcgcgcctacggcgccgctctgggtttcataggtcaacaggcgatcttcttggaaggggaggatgtgcacattgccgtccaggatgaggatttcgcattcgccgctgtccgcgtccgccaccacgatccgggtttggtattcctgggggaaggaaaagaaaagctggttttttagcgccacggcggcgctgggcatgggcagggattcgaaagccgcgtattcggtttcaaaatcctcccatccattgaggggcaattccgcgctcagcagcaggcctcccgcagggtctatggccgcagtgtaaaggcaaacgccttcgatttcaatttcctccgcgtcctgccgcagattgtaggccacaaacgcggtttcgccctgccaggagaagggctgcgcaagttccaccgcgccatctggcgcagggttcagcgcataggaaactttttctccttccagcgaaaatattccgctccggcacagggcgtagagatttccgccgcaggcaaacggcgcgaggatttctccgctgccgccagcgccactggtgcgcgtcagagcggtggagcagtttgccgcatgagcgggcaggcaaagggcaaaggcgaggagcagagcggccaatggtgtcaggcaacgtttcatggcaaaacccccttgtccctagtcaatagcgtttcatgggtggtgcttatctataattttacagacaagggggggaattgcaataaaaaaatttgttaattcatcaaacatttaatttggggtccgcaaaaagcacgcctcgaaaaaatgcaatcttgcatcctttcgaggcgtgcctcaacatacggcctttccggcgaataaacgaaaccggaattattgggccttcgccagacgcttggccaggcgcgcctttttgcggttggcagcgtttttatggataacgcccttcgccgcggccttgtccactgcgccagaagtcgcgctgagcaacttcgcgtcggcagtgccggcggaaatggcggtgtcaaacttcttgatggatgtccgcatcgcagatttgatcatccggttgcgcaggttctttttctcggtgacctttacgcgcttgatcgcggatttgatgttcggcaagattgttcacctcccagcctggaatcaacattccaattatagcacaaacccggggaaaatgcaagcccccggagggaagctccggggttaaatgcttgcaatttctcaaggaagaagcgggattttagtcgtcgcggtcgcgctcgaagctgagaatttcgccggtggcggcgtcgatggtgtattcgtattcatagccgcccgcgcggaactcgatttcgtactcaatgccatggcgctcccggtcggtttcgatgcgcttggcgcgaacatccgcctccgtgaggcccgcgtgttccaacgcgatggagaaggccctgtcttcgtccacgccattcgtagaggcgggcacgggaatggcttcgtactggatggagaggatatcgccggtattggcgtccacatcgtattcgtacttggcgttttcataggtgaaatccagctcgtatttgcggaagccgtcgtcatattccagcttttcctgcaggatggtgacttccgcgtccgcgggcacgccagcgtcgttgcgggcgatttcccaggcctgcgcgtcggagatcagcacttcggtgttcccgctgccgcggcgaagtacttcgtattcccagctgcgcacctggccgtcttcgggcaggatctggtactcatacttggcgtcggccgtgtagaattccacttcgtagacgttcacgccgtcatcgcgttcgcgataggagcggatgttggtgacctgctcggcggttagtccagcgtgggcgatggcgatggattccgcctgctgctcgttgtccacgggaccataggggatggcgggcgtggcagtgggggtagtttcgccctgggcgagcgcggtgacggagagcactgcgcacaggagaatggagaaaacgaggaacaatttgttgcgtttggtcatggaaatataccgtcctttcaaaaaaatgttgttttattgaatccctcgcactttagcatgccaaaggcgagaaaattgtaaccgggttggcgtttggcagtttgcaccgccagggagcgcgcaaggttttgcgcgaaacgggcatactagcgaaaaaaacgggaggcattgtatgcgccagattcgaacagaccttgcgatggaatcgcaacaggccgcgggaagtatgcccggcgtgtgggtgaagcaatgggaggccgaaggcgtccacatcacggaggttagcatcgatagcgagcaggccgccgcgcggttgaaaaagccggtcggtaaatatattaccctggagagcgcgggagtgaaacagcgcgatcccaattcccggattgccatgtccaacctgctggcggaagaactgggccggcttttgccgccgggcgaagcgccggtgatggtggtgggcctgggcaaccgccacgtcacgcccgatgcgctcggcccgctggcggtggacaaaaccctggtgacgcggcacctgtttcgggaaattcccggcgcggtgaacgagcgcatgtgcccggtttgcgcggttgcgcccggcgtgctgggcgtgaccggtctggaaaccatggagacgattaagggcttggtcgatacggtgcggccgcgcgtgctgatcgctgtggatagcctcgccgcgcgcgccgtaagccggctcgcctgcacggtgcaactttccgattcgggcattcagcccggcagcggggtgggcaacctgcgccgcgccatcacgcaagaggcgttgggcgtgaaggtgatcgccattggcgtgccgatggtggtgtatgccgctaccatcgtgcgcgacgcgctggaacagctcccgcaggaagaagccctgattgaggaaaacgcgctcgatgccctggcggaaaagctgctggaaggcagcgtgggcgagatgatcgttaccccgcgcgaagtcgataacctggtggcggacgcggcgcaaattgtggccacgggcatcaaccgcgcgctgcatccgggcctgtcggagcaggagatccgcgaaatgatggactaatcgtcccaatcgtcgtcatcccagtcatcatcgtcatcgtcgtcgtcatcatcgtcgtcgtcgtcatcatcgtcgtcatcgtcatcgtcgtcatcatcccagtcgtcatcgtcgtcccagcaatcctcggagaaccagcggccgctttccggcaggagggaggcgatatgggccgcgtcgttttggtaatcggcgtcccaccaggtgggatccagtactaggaaggcgacaaacccttggggcaagcgataggactgagccagttcgcgcaattgctctatggtaaacccgtcgcgaaaaagctgcttttcggcttcgtttccgctctttaggaaaagggagaaaatttcctgagcctgaagggcggaaccgctttccacgggattgagggcgatttccgcgcgcagcacattggccagcgaaacgcaatacgcgtgcgttacgagctcggcgggcaggctgtgcgcctgggcgaaggaatcgatctgtctgcccgttacctcgcacagcaggggcaggatggcggaaagcacttgcaaattgagggcgctctcgaagtcgtcttccaacatatagccttccatcaccaattcgaggagcgcttcgtttttgccaccgccctgcgccgacgggtttgccgcgagcgcttcgttccagttttccacaaagaaggcgtctatgggaaggtaagtgctggcagcgctttccgcgcgcgccaggggggcgattccgatcaaaagcagcagcaggattggcacaaaccggcgcgaaaccgcatggatgttccgcatgcatcgccctcctttcaacgcgtgtcgtaacgggtgctaagttttaatcatcccagtcatcgtcgtcccagtcatcgtcatcgtcgtcatcccaatcatcatcgtagcggtcatcccagtcgtcatcatcgtcgtcgtcccaatcatcatcgtagcggtcatcgtcgtaacgatcgtcccaatcgtcgtcatagcggtcgtcgtcgtaacgatcgtcccaatcgtcgtcgtagcggtcatcgtcgtaacgatcgtcccaatcgtcgtcatagcggtcgtcgt

SEQ ID NO: 110 - DNA, 32759 bp, Unknown
  16S sequences of unknown bacteria
tggctttcttttgcacacttttctttcgccatcgaaagaaaagtgtgagcgccccgtgggacggcaagacccaatccgcgacgtagtcggcgcgtcagcccccggcagaaaaattttcaacaaatatggctttcaccgatacagtcaggaacttttccgcgggaaaaacagtcggcgcggcccgaactgccgtgtacgctagcggctgctcctgaacattttccccttcaaaaaacgaacgccccgcaagactcgaattttccttcaacaccgtaggtacttcaacctcccttttcctccttcttttggcacgtgtgcttcgcacgctattggccacaatagtgttagccaatctgccgccgggagggaaaagcatgaccagaacccaagcatccctgagcgttatcgccgtgaccctggcaacggtgacgacgctttttcttttgccctatacgcctaaaatcccggtgcagaccgctattgtccgccggggagaatggacgaaaacgacccttgcggagggcgtggtgcagtaccggcaacagcagcccgccgtctgtctgcaagggggcgtgctgcgacgagtctgcgcgcaggaaggtgaaaacgtccggaaaggtcaacttttgttcgccttggataccagtcaggaggaagcggcgttggaacgcctgagcgcaagccgccatgcgatggaggaagccgtgtcggcctttggacaggaggcgatcctgtggaagctgtcggaacagctggaattggaaagtcaggaggcggcactgaaacagtcgattgccctcaagcagataagggcggaacaggatggcgtgatgggcccggtgtaccggcaggagggggaactgctgaacgccggagaactgctggcaatcgtccacagcaccgaaaaaaatgtggcggcagtttgccgaaccacgatcgtttcgaaaatcggcacaggcgctgaagccacgatcatggactcgaaaggacaggccgtgggggaagcccgcctgaccgctatcggtgcgccggaaacggacacatctaccgggcaaagcgttcaacggcttgtttttgacccggtaaatccgctgacggcggagccgggacaacgctgtgtggtggagctggttcaggaaatccggccagacgtcccactggttccgcaggaagtcgtagatggggacggcggcctttggctggcggaaaacggtacggcgattcattatgcgctggaggagccggactgcgccgggcagatggtgcaggtgccggaagaactgctgggcaaaagggtgatcctgaacccggaggaaagccgtctgatgcccggctgccccattaaggaggcgccgaagcagtgaaatggcgcgaccaatggcagctcagcttccgcaacatttttgccgcgccggtgcgctcgctgctgaccgtgctgggaatgtccatcggcatcggggcgattctggcggtgttgacgctgggcacggcgggacggaatcaggtcagggcggaaatgacccgattgggcatcgacagggtgtggctgaccgccgcctgtcaggaagaaccgctgatgcgcggcgacggcgcactgctgaaacgggaattgaaggtcgccgcggcggagcagctgaccgtcccggtcaaaattgccgtgggagataaggaaagcgagacgttgctggttggctgcgacttggtctgtctgcaaatggcgggttccgccgtgacactggggaagatgatccctgtacaggaatggaaacagggcggcaatgggatcctgctgggcgaaatactggccgcagagctgggcggcggcccggggacactggtttctgccggaggaatgctgtttcgctgcgcgggcgttcttcggatggaggatcgtgcctccggactggactggaaccgcgccgcctttgttccgctggaaacgctttcggacagtgttgggagcagtctttcccaaattacccttttgacggacgaccggctcacgcccgacgagctggcccggaatgcaacgcgggtgctgaaacgcagccggggcgtggaggcggagacgctgactttgcaggtgcagagcgaagccgccgaaagtgtgatcgccgtttttgtggaagttctccaatgggtggcgttcatctgcacgctggtgggcggcatcggcgtgatgaacatcctgctggtcagcgtccgggaacgccgccgggagatcggcgtgatgatggcactgggcacggagccggggcaggtctgccgcctgttcctgatggaagccctgatttacgcggcggtcagcggcgttctgggcattttgaccggcgtttttctcattcaggcggcagcgggcagcatcggccttcacccggtgctgatggctggagactgcgccgccgtttttgcctgcgcgctggcggtcggactgatctccggtgtagttcccgcctcccgggcggcccggctgaagccggcggacgctttacgaaatgaatgaaagaatatggcgataatttcgccaacgtgtacatcatgaacaaaccgaggggtcaatcttagtaaaaatagtcaattacattccggggagattttcgttataatacaggtacgtcattgagatacgccattcccctcgtaaggcgtacggatgaacattataaggaggaaacaagaatggcaagtctgtctttgaaccacatttacaaagtatattctggcaatgtgactgctgtcagcgatttctgcctggagatcgaagataaggaattcatcgtgctggtcggaccttccggctgcggtaagtccaccaccctgcgcatggtggccggtctggaagaaatctccagcggcgaactctacatcggcgacaagctggtcaacgacgtcgctcccaaggatcgcgacatcgccatggtattccagaactacgctctgtatccccacatgaccgtgttcgacaacatggctttcggtctgaagctgcgcaagacccccaaggctgagatcaagcagcgcgtggaagaagccgcccgtatcctggacatcgctcacctgctgaaccgtaagcccaaggctctgtccggcggccagcgtcagcgcgttgctctgggccgtgctatcgtccgtgagcccaaggtcttcctgttcgacgaacctctgtccaacttggacgccaagctgcgcgttgccatgcgtaccgagatcaccaagctgcaccagcgtctgcagaccaccttcatctatgttacccacgaccagaccgaagctatgaccatggcttcccgtatcgtggttatgaaggacggcttcatccagcaggtggacagcccccagaacctgtacgactatcccgccaacctgtttgtggccggcttcatcggcagcccccagatgaacttcttcaacgtgaccctggagaaggaaggcaatgacgttgtggccaagttcggcgacaacaagatcaccatccccaccagcaagctgagcaagttcactgacgagagctacatcggcaaggaagtgatcatgggcatccgtcctgagaacatccatgacgaagacgtgttcgtgcagaccgccagcagcgccgtcatcaacgccaaggttgaagtgaccgagctgatgggctctgagacctatctgtacctgtccaccagcggcaaggacgagaacatcatcgctcgcgtcaacccccgcaccaccagccgcgccggtcaggacgtgcaggtcgccttcgacgtgaaccacctgcatttcttcgacaaggagaccgaagtgaccctgctgagccgctaaggtttgctgaaaatcgaatcatcgccgccgggagaaatcccggcggtttttctgtgctcctttttgaaaaagctgtcctgctgataggacgaacaaaaaacgaagatcaatggttgacaatccgccatagaaatgataagatcatcttgcggttaaataaaactaaccgcaatgtatttttgatcgaacgaatggaggcggagcaatggcacagcgtattttgaagagaaaactggtgggacttggctacgccgcggctctggtggccgtgggctggttggtaactaacgtcctgtaagggcgaaaaagcgggccgcgttttccgggaaaagccggggaacgcggccttttttgctgcttggacaataaaacgaaaaacgaaaaaaaaacactttcatcgttcattttctcttgacgggaaaaatggaatctgctatcatacacgcattgcagagcaagggtgctgtgtacggcacgccttgctctgcttatttttaaggagggtttcatcatgagcaggtacagcaaggatgacatcattcggatggtgcatgaggacgatgtggagtttatccgtatgcagtttaccgatatttttggtcagctgaagaacgtggccattacggcttctcagatcgagaaggcggtcaataatgagatcatgatcgacggcagctccatcgagggctttgtgcgcatccaggaatccgaccagtacctgcgtcctgatctggatactttcaccgtactgccctggcggccccagcaaggcaaggtggcccgcctgatctgcgatgtgtacaatcccgacggcacgccgttcgtgggcgatccccggggcgcgctgaagcgggtgctgaagaaggcggctgatatgggctacagcttcaacgtaggcccggagtgtgagttcttcctgttccagacggacgaagagggcaagcccaccaccgccaccaacgacgaagccggttactttgatctgggcccgctggatcacggcgaaagcactcgccgggaaatctgcatgacgctggaaaagatgggcttcgaaattgaggcttcccatcacgaagtggccgccggtcagcatgagatcgacttcaagtacgccgaggctctgaccgccgccgataacattatgaccttcaagctggccgttaagacgctggcccagaagaacggacttcatgccaccttcatgcccaagcccatcttcggcatcaatggcagcggtatgcataccaacatgtccctgttcaaggatggcaagaacgtgttcttcgatgaaaacggcgagaagaagctatctgccgatgcgtatcatttcatcgcgggccttttgacccacgtgagcagcatgaatgccatcctgaacccgctggtcaactcctacaagcggctggtgcccggctatgaagcgccctgctataccgcatggtccgcttccaaccgttccgcactgatccgcatccccgccgcccgcggacaggcgacccgcgtggagctgcgctgccccgatccctcctgcaacccctatctggcgctggcagtgtgtctggccgccggtctggacggcatcgagcgcaagctgacgccgcccgccgagatcaccgagaacatcttcgccatgacccccgccgagcgcgaagccaagggcattcacagtctgcccggaacgctgcatgacgcggtagtggcgttccagaaggataagctgatctgcgacacgctgggcgagcacattgtcagccagtatgtggcgggcaaggaaaaggaatgggatgagtaccgcacccatgtcagcgattgggaactgggcaagtacctgatcgcctactaagaaatgctttccgttccttccgccggggctgccgaggacgaacgctccggcggaaggaaagccctgttttgaatctttttggaataaggagaggatgccctatgagtcggctgatcgttgcctttgaatcggaagtgaccaggcagcgggtgtgcgagttgtttgcggcctcctcttttcctgtgcgcgcctcttgccgcacgggcgcggaggtgctgcgggccgtgcatttcatgggcggcggcgtggtggtctgcggcgtgaagctggcggattgcaccgctgaccagctctatgatgatctggacgggctggcctgtatgctggtggtggctaagcccaaccagctggaaatgtgcgaaaatccgcgaattttccgactgccgctgccggtgaaccagcatgacctgaccgcctctgtgcggatgttggagcagctttccgaaatggaaatggctcgtcccaagcagagcgccgccgatcaggagctgatccgtcaggcgaaaatttatttgcaggaagtcaggctgatgacggaggaagaagcccaccgttatctgcaaaagcggagcataaccacccgccggaaaatggcggaggtggctgcggagatcattgaccgacaaaggggctgaaatcgtgaaaacgcaagaagaagccgcccgtcagggcctgtatcttccccagatggagcacgatgcctgcggtatcggagccgtggtcagcatagagggcctcaagacccgcagcacggtggatcaggcattgaaaattgtagaaaagctggagcatcgcgcgggcaaggacgctgacggcagcaccggcgacggcgtgggcatcatgacgcagattccccacgcttttttcagccgtttggagctgggcttcgacctgcccgccgagcgggattacggcgtgggaatgctgtttctgcccgccgaccatctgaaacgggcgcaggcccggaaattgatggagatcgtgacccagaaggaaggactgcgttttctgggatggcggacggttcccgtctgcccggaggtattaggcgaacgggcaagggcctgtatgcccgtcatcgagcagtgctttatcgcccggcctgcctatctgaagcagggcgttgactttgaccggcggctgtatgtggttcgccgggcctttgagcagagcaacgccgatacctacgtgtgctccctgtccagccgtaccgtggtctataagggaatgtttctggtcagccagcttcgggccttttatcctgacctgcaaagcgaggatttcaccagcgccattgccatggtgcattcccgcttttccaccaataccttccccagctgggagcgggcacaccccaaccggctcattctgcacaacggcgagatcaacaccatccgcggcaacgtggatcggatgattgcccgggaggagaccctcagctctccgctgatggaaagcgatatggacaaggtgctgcctgttatcaacggcgaaggcagcgactcggccatgctggataatacgctggaatttttgatgatgaacggcgtgcccctgcccttggctgtgatgatgaccatcccggagccgtggcagaacgaacgggatatttcccgcacccggcgcgatctgtaccgctactacgccaccatgatggagccctgggacggccccgcctccattctgttctccgacggcgacgtgatgggcgcggtgctggaccgcaacggtttgcggccctcccgctactatattaccgaagaccgaatgctggtgctttccagcgaagtgggcgttctggacattcccccggaaaagatcgtgaagaaagcccgggtgcgttccggccagatgctgctggtggacacggtgcagaagcgcatcatcgaggacggcgaactgaaggaagaatatgccgcccgtcagccctacggcgaatggctggacggcaacctgctgtccctgaacgatctgcccctgcccaatcatgccattccgcccttggagcagtccgcacgggacaggctgtacaaggctttcggctatacctatgaggacgtgaaggaggtcatccttcccatggcccgcaccggtgcagagccgaccgcctccatgggggcggatatcccgctggccgtgctttcggaaaagcatcaggtgctgttctcttatttccggcagcttttcgcacaggtcaccaacccgcctatcgacgccattcgggaaaagatcgtcaccgatacggcggtatacgtgggcagcgatggcaaccttctggaggacaagccggaaaactgcgccgtgctgcggctggaacagccgatcctgtctaatgccgaccttctgcgcatccgcagcgccaagcagaagtccctgcgggtggcgaatatttccattctgtattatcgggccgagccgctggaacgggcgctgaatcatctgtttgtggcctgcgaccgtgcctacaagaacggggccaatgtgcttatcctgtccgaccggggcgtggatgagaaccacatggccattccgtccctgctggcggtgtcggcgctggagcatcacctcatcaatacccgccgccgcacggccatcagcgttattctggagactgccgaccctcgggacgtgcatcatttcgccctgctgctgggctacggcgctcgagccatcaacccctatctggcgctggaatgtgtggacgagctgatcgaaaaaggccttttagacaaggatcgccatgccgccgaacaggattatatcggcgcggtggtgcagggcgtgagcaaggtcgcgtccaaaatgggcatttccgtgctgcagtcctaccagagcgcccaaattttcgaagcggtgggcatccgtcaggacgtgatcgaccgctattttaccaacactgtttcccgggtgggcggcatcgggctggaagaaatcaacgaggacgtggagtaccgccataaccgggctttcgacccgctggatctggaaacggacaccacgctggattcgctgggcaatcaccgcctgcgcagcggctgtgacaaggaagaccatctctacaatccccagaccatcgtcacgctgcaaagagccgtgcgggagggcagcatggagcgtttccgccagtacaccgccatggtggacgacgagacccgtcctcacaccctgcggggcacgctggaatttgcctttgaccaatgcacgcccgtgccactggacgaggtggaacctgcttccgagatcgtgaagcggttcaagaccggggccatgtcctacggttccatttcgcaggaggcccacgaatgtctggcagaggccatgaaccggctgggcggacgttccaactccggcgagggcggcgaaatggaagagcgtctgaacacggagcgcggttccaagatcaagcaggtggcctccggccgtttcggcgtgaccagcgaatatctgatgagcgccgaagaaattcagatcaaaatggcgcagggtgcgaagcccggcgagggcggccatttgcccggcggcaaggtgtacccgtggatcgccaaggcccggctgtccacccccggcgtgagcctgatctccccgccgccgcaccacgatatttactccattgaagatttggcgcagctgatctacgacctgaagtgcgccaacaggcgggcgcggatttccgtcaagctggtcagtgaggcgggcgtgggcacggtggccgcgggcgtagccaaggccggggcacaggtgatcctgatctccggcagcgacggcggcaccggcgcggccccccgcacctccatccacaatgcgggtctgccgtgggagctgggcgtggcggaggctcaccagaccctttcgctgaacgggctgcgctcccgggtcgccatcgaggccgacggcaagctcatgagcggccgggacgtggcgatcgcctgtatgctgggggcagaggaattcggatttgctaccgcgccgctggtctgcatgggctgcgtgatgatgcgggtgtgcaatctggacacctgccctgtgggcatcgccacccagaacccggagctgcgcaagcgcttcaagggtaagccggaatatgtgatgaacttcatgcttttcgtggcggaggagctgcgggagatcatggcgcggctgggcgtacgcagcgtgaaggaactgatcggccggggcgacctgctgcgggtacggcagcatcaggttacccgccgggccgcgtccatcgacatgagtcggatcgtcggccggtgcatcaacgaataccgacgcccggaggacaccttcgacttccatacggaaaagacggtggacgagcgggtgctgctgaaaaagctgaacttgaaaagtgtgaagccgcagagcgtcgagctggacgtttccagcacggaccgggccttcggcaccattttcggcagcgaagtgacccgcgttcacggcacatccctcaaagaggatacctacaccatccgggcagcaggcggcggcggccagtccttcggcgcgtttattccgaagggcgtgaccatccgcctgaccggcgacagcaacgattatttcggcaagggcctgtccggcggcaagctggcggtccgtccgccggaaagcgcccgcttccgggcggatgaaaacatcattatcggcaatgtggcactgtacggtgcgaccagcggacaggcctacgtctgcggcgtggcgggcgagcgcttcgctgtgcgcaactccggcgcggtggcagtagtggagggcataggcgatcacggctgcgaatacatgactggcggctgcgtggccgtactgggcaaaacggggcggaacttcgccgcgggcatgtccggcggcgtggcgtacgtgctggacgagaaccatgacctgtacctgcgggtgaacaaacagatggtggagatcgagaagctgacctccgagcacgatatggaggccctgcgcggtatgatcgaagcccatgtgcgggagaccggctccgaaaagggccgccgcctgctggaaaactttgcggaatccgccggaaaattcaagaagatcataccccgggatttccgcaaaatgctgggtgccatcgcccgctacgaagggcagggcatgaccagggaggaagcagaactggaagcgttccgggaaacgacggaggacaggtgagcgcagatgggaaaaaaagatggatttttgctctatgagcgccgcaatactccggcgcaggagcctgccgggcgcatcggcagctttgaggagtttcatacgccgctgccgctgcaggagcggcgcaggcaggcggcccgctgcatgaactgcggggtgcccttctgccagagcggcgtggagctgggcggcatggtaacgggctgcccgctgcataatctgatccctgaatggaacgacatgctttatctgggcaacacccgccatgcactggatcggctcaccaagaccaactgcttcccggagtttacggggcgggtctgcccggcgctttgcgaagcagcctgcacctgcggcctgaacggcgacagtgtgaccgtccgggaaaacgaactttccatcatcgaagaagccttcgaaaagggctggatgcagccccagccgcctcggacccgttcgggaaagcagatcgccatcgttggcagcggcccctccgggctggcggcggcttatgtgctcaaccgccggggtcattccgtgacggtatttgaaaaggcagaccgccccggcgggctgctgatgtatggcattcccaatatgaagctggacaagaagagcgtggagcgccgcattcgcctgatggaggcggagggtgttgtcttccgtaccggcatgaaggtgggggaagacgtttccgccgatgaactccgccgggcgtatgacgcggtgctgctttgctgcggcgcgggtcggccccgggatctgaagctgcccggacgggacgcggagggcgtgtatttcgccgtggactttctgaccgcagccacccgacatctgctggacggtacgccttccatcgacgcaaagggcaaacgggtggtcatcgtgggcggcggcgatacgggaaacgactgcgtaggcacctgcattcgcatgggatgtgccagcgttacccagctggaaatgatgcccaagccgccggtaaagcgtcaggagagcaacccctggcctgaatggccccgggtactgaaaaccgactacggtcagcaggaggctattgcggtctttgggcaggatcctcgtctgtttgaaacgacggcgcaggagatcgtgaaggatgacaagggccatatccgcgccctgaaaaccgtgcgtctggcggggcgggagcctgtccccggcagtgaagcggagctgccctgcgaacttttgctgattgcggcgggcttcgtaggctgcgtgccggaagtcccggaggcgttcggcgtggctgtgacggaacgcggacgggtggtcacagaggactatcagacggaagcgccgggcgtgttctgcgcgggcgatatgcgacgcggacagtcgctggtggtctgggccatccgggaaggccgggaagccgcctgccggatggatcgtttcctgatgggatacagcgaattggaaggctgaaaaagaaaaaagaaagagcggcgcgcctacatgaacgcgccgctctttcttcgttgacaagctccgtcaacgtttctgcccgaaagatcggtgaatgacctttcgggcagccttgtttttgtgttttgaaaaaggaaccgaaattattcgccctcagcggactgaatggaagccatcacgaaggagaggatggcggcaaagccttcgtcggacttcggagagcctgaaacctccagaacatatccggcttcggtcgtaaaggcgatgcaggcggtgtcgctttcttccagaacgtaggtcacagcaggcagaccattcacggtcacgtcctccacctcggtggcgccgttgtcagccagcgcggccttgtagtcttccagagacatgccgtccacatccgcatacaccacagcgatggcggcggattcgtcttcggtcatgtaatagccgatgtagccgccttctttatcctcgtcggtcagctccacagcggagagaacggtaggcatccacattttgatggaaatttcatcaaaagtgacaaattctcccttggcgacggtctctgcactctgcgcttccagatcagcccagttgatttcagtggcaaaggccggaagggcgcacagcatcatggcagcggtcaaaaaaagggcaacgagtttcttcatgggtgtttcctcctcagtatggtgacagcgcactgtcaaatgatcgtttgtcaggtgtcgccttatccgcgaagcgcacccttaacgatgagggaatgataccaccgcgacaccaggaccgcaactgtaccatagtacagtctgtcctacagaatatggagtgcctgagcgatctgtacggcgtcaaccagatttttggcgtccagctttcggtagttctgcgaagcgtgatatttgacggttcggggcgtaatgtgcagcttttctgagatttcctttgcggtataaccggccgcctgcaagcgcaaaacctgaagcgccgtctccgaaaaagcggaaatgtcgatccccattccctgcaaatattgggggtaaagctgagccatgcgttcggtttcccgcatcgtctgctgaaaccattccgccagtttgggatgattttggcaaaaggctgtcttgatctccgccagcatcggtaggatggccgcccctttttcgctgatgatgggaacgaaatggtattcgccgactttcagcagggtctgaacgaattcctctttccacggctttccggttcgccgcagaatgacggcgttcaaaagccggcagtccatctggatataggtgcgctgcgcataatcggcatacagaagcatccgccggatcagcgcctgcgcgtccgtatgcttgccgagcgcgatatagccatagattttggtcatatacagataacggttcagcgtgcagaattccacggtctcgtccgggactctttccatccaggagcggatttttcccgtttcattttggtaaagccccagccagcaggaaaatgcgctgacggaatcagacaggtgggacagcccttcccgctcgcatcgctggagcattccggctgccagcctccgggcgtattccatatcgcccgtgcttagggcaagccttgcctgaagggcaatatcgacccacagcatttcgacgatgccgttgttctcgcattgattctgcgctttggtcagacggctgagcaccttgaagcggtcttcgcctttttcataggcactttctcccaatgcggtctgtaccagaccgatgcccgccttcccaagcattttctccaccacagggcccagcgtgttggccagaaacagatccgttttgctccattcgcagaaatccttgccgccgttcatgaggctgggctgattgttggtcagggatacgggccggagaacattcccgctgccgtgcagtgcgctgaagagggtgggcaggatgcgggcaatttctcgcgaacccctgtgcggaaggacgatatcaagataaaaaacctgcccattggcctcgctgcgggcattgccccgggaggcagcggcatattctttcaggcgctggtaccagtattcgcttttttccgtgttcatcagcacggaatataggacgctcagcgcgctcatcagaaccggttcgttttggacgtcctcctctgaaagcgcctgatagtattgcctcagcgcccagtagctgccgacgcccggatgcttccgcgcttcccggagcaaaagggaacggatgctgtccgcgtcgccgcagcgctgatagagcctgagcgcacgcatcgtctgaccgctggtttcacagtatcgtcccgcattgtacatcagctgatagatgcatttgtgcccgaaaaccaccagagcctgctcccgcagcgcttccagcagtaccggacgaatgtgccattctccgccgtcgcattggaggatattgccggcctgttccgcacgatggagcagcgaagcggcgtcgtcctctccggtgatggcttccgccagttccagcgtaaaagcgtctacaacgctgacctgcatcagaaagcttcggatatcctccttccaatggctgatgacgtccgattggagataatccatgaaaactcttttgatgtcggcttccagagcatttccgtcggcggctccctgctggatccggcgaagaaaaagattcagcgccatgatatttccttcagttgcctccagccatagccggatccgttccggggaaagcttcaggcccacagaagggcagaactccgctaattcgtcggcggtaacgcgcagatcgtcctccgggatcactatgattttggcctgaagcgccagagaagaagcccatgcgggcaaagaagcgcggccgatcagaaccattcggcagccctccttgccgatcattggaacgagcttttggggcagggtatcgccctccacaccatgaaggtcatccaatatggtatattcatcggcggtgcagtgcgaaagcttttccatcaccacttcttccggctccgtcccgctgatccagcgcgtggaagtacggtcaaaaacctgctccgcgacgcttgttttgccaaaacccgtagcgccgtagagatagacgctcattctcagctcttttgccgcctgaagttttttcagggccttttttgcaaaccagatctgcttgtccaagatgctcctcccggtatgctcaaacgtcaaaacgtatccttcgcagcctgcggcggatacggccatgaatacctgaaaaaacggcttgcggcgttgaaagtgctgctccaaaaggagcgcggatggccgccgtgtgttttcatccgttcaggccgctccattatagcacggaaagggaaatgccgccatatcagaaggacatggaagtacgttctgcttgcaggcagcagaaacaggccttggacagagcggctgggggctgaaattttttttgcctaaaaagaaaaaagatggttgacagcagagggggagtatggtagtatgtgtctgcggttagttgagattaaccgaaggagctccggggaggagctttcttttgggaggtcggttaaacatggctaaccaaaaaggaggggtggaggatgacggaacgctttgagaaaacgctgatcggccattgcgcggcaacgctggcggggcataagtgcggcagtttgttttcgtaccatttggcggcgggggaaaccatggaagaaaatgtgaacccggtcaacgttcatctctccgacaagggcgtgcgcgtccggctgctgaggggctgcgcacggggcggtctattgtatgtgtaccgcccgcgaaagctggcgagacggctggaggatcctgcggtccgtgattttctctccgcgcagggctacacggatttctccggggagggctgtctcgccacgctgacgcgccgcttggcccagtgcgaggatttccctcatgagatcggcgtctttctggattatccgctggaagacgtgatcggcttcatccgcaaccggggcagcgggttctgctgtctgggatgctggaaggcctattccaacgccgaagcggcggaaaagaccttcgcactgtaccgcaaatgccgggaagtttatctgaactgttacggcaaaggctttgatgtcgcacggctgacggtagccgcttgacatacaatttcaatcaggaggaaaagaaaatgaatcgagtagcagtagtctactggagcggcacgggccatacgcaggccatggccgaagcagtagccagtgcctgcagcggcaagctgatgaccgctgcggaatttacccccgatcaggtcgcggaatatgacgccatcgctttcggatgcccggctatgggcgcggaagtgctggaggaaagcgaattccagcccatgttcgacgacgtgaagccccagctcaagggcaagaagatcgcgttgttcggctcctatggctggggcgacggcgaatggatgcggacttgggaagaagactgcgtggcggccggtgcggtactggcctgcgacagcgtgatctgtcaggacgagcctgacggggatgctctggccagctgcgatgcgctgggcaaggcgttggcggagtgattccgccgtaacggagaaaaccgggcgggagctgatggacgcggcttcaggccccttcttcggcaagtgttgtgcgattttcaactttgatttctggtttgcgcgaaacaaacaaaaaacctgttctgttccaatttcattttctgtggagagtcggtaaggacgcagccggctctccttttcgtgtatttttttcaactcccattgacactataggagataggaagtataatgtccaccggaaaggtaggaattaacccttcctttcctgaaaaatacgaagcgcgaaaggagcggctgccttatgatgatctcttcgaaagggcggtacgccctgcgggtcatgctggacatggccgaacagggcggcgacagcttcctcccgctgaaggatattgccgatcgccagaatatttcccggaaatatctggaaagcatcatgcccgatctggccaagcatggtctggtggaaagcgccatgggcaagaccggcggctacaagctgacccggaagcccgaggactacaaggtgggcgagatcctctgcgccgcagagggtgaattggcccccgtttcctgcctgaccaaggacgggaagaagtgtgagaaggtggattcctgctacacactgcccttctggatcgggttggaggaacacattaactcctacgtcaacagctacacgctgaaggatctgctggaatccggagaaaaaaatcacgacaaatgcggcggctgcacggcctgcggcgggaaagaggttgaagcaaaatgaaacagaacgctttattggaagttaaaaatctgcatgtgagcgccgaggatgaaaccgaaattctgcacggcgtcaatctgacgctgggccgggacgagacccacgtgctcatgggccccaacggcaccggcaagtccacgctgggctatgccatcaccggcaaccccaactataccgtcaccgaagggaaaatcattttcgacggcgaggacatcactgacctgcccgtcaacgagcgcgccaagaagggcattttcctgtccttccagaacccgctggaggttcccggcgtgaccctgagcgccttcatccgtacttcgctggaacaaaagaccggcagccgtctgcgcctgtgggacttcaaaaagaagctggcggagaccatgaagctgctgaacatggacgaagcctatgccgagcgcgacctgaatgtgggcttctccggcggcgaaaagaaaaaggccgaaattctgcaaatgctcatgctggaacccaagctggccattctggacgagacggactccggcctggacgtggacgcggtgcgcacggtttccaacggcgtgcggctgtttaaggagcgctgccacggctccctgctgatcatcacccacagcacccgcattttggaagcccttcaggtggacgcgacccacgtgatggaaaacggcgtcatcgtcaaggaaggcgacgcgtctctggtggaggagatcaacgaacacggtttcggaaagctgagcgaggatcggtgaccaaggatgagagaaaagagcctggtagaggatattgaccgcagcatttatgatattcgggatgaggaaaaggacgcttaccgcatggaagcgggtctgacccccgagatcattgataagctgtccaaggaaaagggcgacccggtgtggatgcagcagttccggctgcaggcccttcaaatctataacgagctggaggtccccaactggggcccctccatcgaggggctggacatggatcatatcgccacctacgtccgccccaacaccaaaatacagaacgactggaaaaacgtgcctcaggacatcaaggacaccttcgaccggctgggcattcctcaggccgagcggaagtcgctggcgggcgtgggcgcgcagtacgattccgagctggtgtatcacaacgtccgggaggaagtggccgccgagggcgtggtatacaccgacatggagagcgccatgaagggtgaatacgctgatatggtgcgcaagtatttcatgaagctggtcacgccccgggatcataagttcgccgcgctgcacggcgcggtctggtccggcggttccttcgtgtacgtgcccaagggcgtgcatctgtccattccgctgcagtcctatttccggctgaacgccaagggtgcgggccagttcgagcatacgctgatcatcgtggatgagggcgccagcctgcatttcatcgaaggctgctccgcacccaagtataacgtggccaacctgcacgcgggctgcgtagagctgtatgtgaagaagaacgccaagctgcgctattccaccatcgaaaactggtccaagaatatgtacaatctgaacaccaagcgcgctctggtggaggaaaacggcgtcattgagtgggtgtccggctccttcggttctcatgtgggctgtctgtatcccatgagcgtcctgaagggcgacaattcccgcacggagttcaccggcgtgaccttcgcaggcaagggccagaatctggataccggcgcgaaggtggttcacgtgggcaagaacaccagctcctacatgaacacccgctccatcagcaagagcggcggcatcagcaccttccgcagcagcgtagtggtggaaaagagcgcacagggcgcgaaatcctccgtgtcctgccagagtctgatgctggactccgagtcccgctccgacaccatccccgcgatggatatccgcacccggaacgcttccgtgggccacgaggccaaaatcggcagtatcagcaacgaggccattttctatctgatgagccgcggtatgtccgaggaggacgcgcgggcgctgatcgtcagcggcttcgcggataacgtgtccaaggagcttcccgtggagtacgcggtggagatgaacaatctgatccgtctggaaatgaagggcagcatcggctgacaccgtttgcggaaggaggaaagacaatggaagaaacgatgaatacgaaaaatcgcctggccgtggatcagctcccggtcaggacgtggaaccggctgaatgtgaatgaagccgtgattgaatgggacgaagcccgcaccgccgatctgggcacggaaacctataccgccaaatcggacgggcccgtgcgcatcgccgcctgcggcgagggcgagttcagccgcaaacaggtgaaggtggaggccgcgcccggaacccgcatcaccgtttatgagcagatggaggcccggcagaatttcaacctgcgcacgtcgctggtagcgcacaaggatgcggtcatccgtctggtgcagctgcaggacacccgggaaggttcccttctgcataatcagatcgatggccactgtgaggaaaacggccatatcgagctgatccagatgttcgtgggccggggacacctgtactccgacagccgtttcaagctgcagggcgaccgcagcgggctggaagcggatatcggctatctgggccggaaggatcagaggctggatatgaatctggcggtggatcatttcggaaagcatacggaaagcgagatcaacgccgccggggcgctgatggacagcgcagaaaagattttccgcggcaccattgatttcaagaacggttccagcgattccgtgggcaacgaaaaagagaccgtcctcatgctgggcgaaaacgtggtcaacaagaccgtgcccctcatcctgtgcgctgaggaaaacgtggtgggcaaccacggcgcgaccatcggcgagctggacgacgagacgctgttctatttcgaaagccgcggcatcggccgggaagcggcagaagacctgctggcccgcgcctccatcgaacggctggcccggaagaccggcgacgccgaaacggaagaaaaagccgcagcgcttttgaacgaggagctttaacatggcatacgatttcagaaaagactttccgctgcttcagcagaacaagatcgcctatctggacaacgcggccacggcccagcggccccagtgcgttatcgacgcggaaagcagcttttaccgcaattccaacgccaaccccctgcggggactgtattccctcagcgtggaagcgacggaaatttatgaaaacgcccgggagtccgttcgggatttcctgaacgcttcttctacggaagagatcatctttacccgtggcaccaccgaggggctgaatctggtggcgtacagctacggccttcatcatgtgaaggagggcgacgaggtactggtctccatcatggagcaccacagcaacctgctgccctggcagatggtgtgccgccagaccggcgcgaagctccgctttatcgagtgtgagcccgacggcagcgtggatctggccaaggtggaggctctgatcaatgaccgcaccaaaatcgtggccgtcaatcaggtgtccaacgtgctgggccgggtcaatcccgttcgggagatcgccgatatggctcaccgccacggcgcggtgatcgtggtggacggcgcgcagagcacgcctcacatgcccgtgaacgtgcgggagctggacgcggatttcttcgccttctccggccacaaggtcttcggtcccatgggcgtcggcgttctgtacggcaaaaaggagctgctggacaacatgccccccttcctgaccggcggcgagatgatcgagtccgtcacccgggaatccgccatttatgccgaactgccccacaaatttgaggcgggcacggtgaatgcggcgggcgcggcgggcctgcaggttgccattgagtacatgctcagcgtgggctttgagaccatgcatcagcgggaaacggcgctggtcagccgggccatggagggcatgaagaagctgccctatgtccatgtgctgggctcggacaagcccgaggagcacaccggcatcgtgaccttcaccatggatggcgtgcatccccacgacgtaagcgagatcctgtcggcggacggtgtggccgtccgggcggggcatcactgcgcgcagccgctgctggcccatctgggctgcagctccaccgtgcgcgccagctttgccttctacaataccgaagcggaagtggaccagctgctggccagcctttcgacgatgagggagcggatgggttatggaaaataggagcttctacaacgaaattctgaccgagcataacattcacccggaattcaagcatgatctgcccgacgcggacatcgtgctggaaggcgtgaaccccagctgcggcgatcatatctggctgaagctgaagactgacggcgacaagatcaccgacggcgcgttcgtgggcgacggctgcgccatctcccaggcgtccgccgacatcatgctgggcatggtgatcggtcagcccaaggaaaaggccctgcagatggccgataccttcatgcggatgatcaagggcgaggccagcgaagcggagatcgacagtctggaagaagcctcggccctgcgggatatttcccatatgcccgcccgggtcaagtgcgctgtgctgggctggcgcaccctgaaggaagccgtaggaaaataaaactgaaaggccgcggatggaaaatctgcggcctttttggaacattcagaagggaaaatcatatgaagcgtctctattccattctgaaaaccttattagggtgcctgatcggcgtatttgcgggaagctccctttaccggtgctgggattatgctcaacggcctgagctttacgccatggattccgccccgtggtatggtcagcttctggtaaacggggtgctgacggcggtttccgccctgacgatgctgctcgtcctgttccttctgaaacggaaaataaaagcttcctgaaaagaacgaatcgaaaagcgccctccgacgcccgcaggctcggaggacgctttttgaatagaggaaggaatgctcctaaggtcagtccagcgtttcaaaggcgcagaaatcgatctcctgcactttctgcagatgggcgctgccatccagcgcttcgtagaagtacaccagcgcatagccgataggcgcatccggggtgacgatctgggtctggcatagcaggcagtagttggttccagccaccacctgcgcggccaacaacgccacgggcgtgtaggtgcagccctccaagtcttccgtggccttggcaaaggcggtcagcacttcttcgggaatctgggtggggtcgccttctgtgggagtccagccgcctaccagaggttcggattcttccgccagcgcgggagcgcacagggtcagggccagcagacagaccatcaggatgcaaagcagtttcttcattgaaaaagacctcttttcttcaaaatctgtttgaatgaatacgtcgtttcaccgcattcactgaaacagacggtcatcccgcaaaaaggttccctgaattttgaaaaaacgcctctttttcagaaatttgtgaaaaagaggcgtttcgtcattcggggaaaactacgaccagcagcatttgaaaggcatcctcggcgtagagggcatggggcttttgggcgggcatgactacacattcgcccggacccagcgaatggactttgccgtccaccgtgaagcggccccggccgcttaagaccagcgccagcgcatcgccgtcggagtcatgagtgctgatctcctcgcccttgtcaaaggcaaacagcgttacgctcacgtggggattctggctcagcgtccggctgaccacctgcccggcctgataggggatcagttccgtcagcaagagagcttcgttttggggaatgtttttcagcatcgccgcgccctcactccaccgtctcaatggcggcgacggggcagcctgtgaaggcttcctccgcggcgctttccagctccggggggacttcccggtcggcagccaccgctcggtgatcgtcattcatctcgaaaatttccgggcaggtggaggcacagaatccacagccgatacaggcattgttgacacggtatttcataaaacattgctcctttcctgaagcccatgaatgggactttcagggaaaggatgccccggcgaggcaaagctcatacgcacggtcagccggggcggcgaagcgtttccacaggctcctgccagagcgcgtaaagatcgttcatccagccgtatacgtccatttgatagaccttttgcaggttttccggggtgaagaccgcttcaattggcccctgcgccacggcgcggccctcgttcatcagcacggcatgggtgccgtaccgacgggcgatgctcaggtcatgcaccactgacagcgcggcccggcccggcgtttgcagccattggccgatcaggctaaacaggctttgctggtacaccaggtccagatgattggcgggctcgtccaacagcagaatttccggctcctgagcaagcacctgagccagaaaggcccgctgcacctcgccgccggacagttccagcagacttctttttcgcagcagcttcatgccggtcagctccaacgcccgttcgatcgcgtcggggccgtcttcgtcccggcggcccagcagccctcgctgatgggcataacggcccagctggacgatctcctccacggtgtagccatagctgatcgtgtgctgttgggccagcacggcgatcttccgcgccagctctgccggacgaaagtcacgcaaattccgcccgtttagacgaatttcaccttcatagggcacgccttgggcgatggcggagatcagcgaacttttccccgcgccgttcggcccgaccagcatgagccactggccctcctccagcgaaaaggacagacgatccaccaccgtatgcgtgtcgtagcgcaccgtgacgttttcagcgttcagcatggtctatccgtcctttctgctgcgatagaagatgaccacaaataccaccgagccgatcagggacgtgaccacgccgatgggcagttcgatgggggaaagcactgtgcgggcggtcaggtcggccaacagcaggaataccgcgcccagaaacagggaggcaggcagcagtcgtttatggttggggccggtcagcatccgggtcatatggggcgtgaccagccccacaaagccgatggttccgccgatggacacgcacgtgccgatcagcaccgagacggcgatcatgatctccagcttgacccggcggacggaaacgcccacgtgcctggcattttcttcgcccacggcaaaggcgttcagttcccggccccgggacaggatccagccgccgcaggtcagcagcgcgacgcccagcagggcggcgtggcggtagttgctcccggccagcgaacccatggtccagaatgtgatggtgcgcagtttttctcccgaaaaggcgatcagcaggctgatgaggctggacgcgaacatggagaagatcacgccgatcagaatgatgctgttggtgctcaggctgcggtcaagggcataggcaagccccaggattatcagaagtgacagaaacgcgaagacgatcgctgtcacggcggtgccgccatagggcaggccggggaaggtgatccccagcgccaacgccgccactgcgcccagcgacgcgccggaggacacgcccagcgtagagccgtcggccagcgggttccgcaaaagtccctgcatggctgcgccgcacagggagagagcagcgccggtcagcgctacgcacagcactcgtgggagccgcacggaaaaaacaacggctttcgggaatccctccggcaaaggcagcccccagagggcgttccacagggcggcgagggtagaatctatgggaatggacacgctgccgatgcaggtgcaaaggagcatggtaaaaagcaaaatcagggtggcggcgagccacagggggaagaaacggcgggggtgtttcatgagggaacctcccggaaagagtaggggtcagtgcgctgaaagcagcgcggagtggaaagaggtgttccatggtgcttctttgttttgatagttagaaaaaggatggcaaacaacaggcggagcgcacggcagtatgggctgtgccgatgattaccctgaggaaagtgtctaatgcattcgtagacgcatcatctctgtcccgatgggagagccttgagccgggatggcccgaagggggcagggggcgaaagctgctgcgtaagacaaccctgccgtaagaaaaccccagctgggggaatgacgcgccgactccggcgcgggcggtggggctgccgccccgagggggcagtactttctttcgaagcgaaagaaagtaccaaagaaagcaagcggcacggcgactccagaggcggcccgccccgcttcgcgtcgcgggcttcggcctgcgggagcccttcgggctgtcctcggccttggttcgcttcgctcacccgccgggaaaaagccctttactgcccatttttgaaagagggagttcgcaatgtcgcgcgcaacattgttggcgagctaacacccacgttcgtgcgcgctcgtgctcactcttatcctctttcaaaaagggcaaggctttttcccttcgctgcctattgccgctctgctccgccgccgcttgggtgggggcggaacgacagtagcgcgggttgggatgttttcatgtggtttggccgattcagcaaggccaccgaccaacaggtttgggaaaattgtgatgatcggtggcgcgagccggagggcctgttgcccgacagcggtttgtatccaccaagtggtggaaagctaacccagaccggcgagccgcgaggcctgttgccgagcggcggtgattccgcggccaagccgcatgtctccctacgcccctgcgcgcaaagcgcgcagtccggggtcaaggggtactaccccttgcgagcggcggtaattccgcagccaatgttcttttccacgagtaccccgcgccctatgggcgcggagtggggtgcggggggtcaccccctgctcaggcggcgggagtcagcgcttcttcgccggtgacgaaggtgtacagggcctcggcggcgtccttcagacgggggccgggacgagaaacttcgttggagtcggcgttgaagatcgcgtcgttctgaacagccttcaaggcgtcccaaccggcgcgggacttgatctcctccacgggggtggggccttcgccgtagtacatggaaatggtgacgatatagtcgggatctcgctccagcacctgctcttcggagatctccgcccagccttccacatccgcgaaggcgttggtcaggccgcacatggtggccagttcatccatgaaggtgcccttgccggccgtccacaggccccactgcaggggagaaacctcgaagtagacggtcttgccggtattttcgctcttggcggcgatatcggcaaaggcggactgcatgtccgcaaccatggcttcggcttcgtcgttgcggcccaccagcgcgccgatcaggcgaatggcggtgtacacgccttcaatgtcctgcgcgtcgctgacgaccacgcggataccggcctcttccagcgcggcgacctgctcttcggtctgggccattttggccatgatgaccacctggggctccagcgcgatgatctgctccagattggtgtcagcgccggactggaccgcgggcacttccagaacggattctgggtagtcgcagtattcgccgcggcctaccagcgtgtcttccgcgcccagcgcggcaaggatttcgcagtcggaagcggtcagcgccacaactttagtggcgggcgcgtccagcgcgatctcccggccggccatgtcggtcacggtgacggcggtgctttccgcaaaggctgcggtcaggctgagagccatcacaagggcaaggaacagggatacgagttttttggtcattggtctttcctccttggtgaatcagatcaaatgaaagagcagggaagaacgtttttgagcaaacaaaagcgctcctcccggaggaacgctaaagaagccttcgccgcttccggcgttggccttccagcaaatcccatccccaggggcttgttcgaacgatggaaacaggtctcccggcttggcctcattctacttgcgcaccttcccgcccgaaggacagtggcttttccgcgcgttcgtccgcttcacggttactgggatagctcggaaatcgcatccgtattcccatgacgctcccgaccaaaggagcgccgcgcctcacggcgcagatccatcggctgattcatttgtcggcttgattatacccgcccggtggggacaagtcaacgcggaaggccattttcggaggcgcaaaatcgaaaatcgaaaacggcggtgaagggcagaatagaacgattcagaagaaaggttcaaaattttgtccaaatgatgccatgatgcgccaaagaatgcacaaagcccattgacgaatgaaaaaaagccgtgtatcctgttggcgaaaacccgcgcatccgtcccaaaaaggccgggaaaagatacgttcgaaaaaatgggggaggttcagtatgctgtatcccaaaagcgctgaaaaggaactgacgcaggaacagttccgccatccgggcagcgaataccgcggcgcgcccttttgggcatggaactgtcatttggagaagaaagagctgctccggcaactggaagtgttgaaaaaaatgggtttgggcggcgctcatatgcatgtgcgcaccggcatggctacgccctatctgagcgacgagcatatggcgctgatcaaggcctgcgtggaaaaatgccgggacgaaaaaatgctggcctggctgtacgacgaggatcgctggccctccggcgcggcgggcggccttctgacccaagacccccaataccgtgcccggcacctgcttctgaccacaaagccctacggcgaaggccaagccgaggcgggactggattcgtcggcccgttccgcccgttcggagaatggtacgctgctggcctgctacgatgtgcagctggatgaaaacgggtgcctgaccggggccagacgaatcgccgaaacaggaaaagcggcgggacggaaatggtacgcctatcaggaaaccgaccttcccaatccgtggtacaacaaccagacctacgccaatacgctggatcccgctacgatgcaaaagttcgtggagatcacctacgaacgctatctggaaaccgtcggcgaggacttcggcggcgttgttcccgccattttcacggacgagccccaattctcccataagagtgcgctggccttcgcccgggaggaaaaggacgtgttcctgccctggacggacgatctgccggaaaccttccgggcggcctacggagaggagctgctggagcatctgccggagttgctctgggagctgccggagggaaaggtttctttgatccggtatcattatcacgaccatatggctgagcgtttcgcacaggccttcgccgatacctgcggcggctggtgtcaggagcacggcctgatgctgacgggccacatgatggaggaacccacgctgaaaagccagacggcggcgctgggcgaggccatgcgctcctatcgcagctttcagctgccgggcatcgacatgctctgcggcagccgggagttcaccactgccaagcaggcccagagcgcggtgcatcagtacggccgccccggtatgaccagcgagctttacggcgttaccggctggaattttgatttccgggggcataagctccacggcgactggcaggcggcgctgggcgtgaccgtccgggtgcagcatctggcatgggtctccatgaagggcgaggccaagcgggattatccggcgtccatcaacgatcagtccccctggtggcaggattacgcctatgtagaagatcatttcgcccggctgaacacggcgctgacccggggaaagccggtggtgcgggtaggcgtgatccatccggtggagagctactggctccattggggcccggcggagcagaccgacggcattcgccgccagatggacgagcggttccaaagcctgaccgactggctggtgaacggcggcgtggatttcgatttcctctgcgaatccctgctgccctctcaatgcccgcagggcggcgcgcccctgagggtgggggagatggcctacgacgcggtggtggttccgggctgcgaaaccctgcgctccacgacgctggaacggctggaagccttccaaagggcaggcggacggctgatctttctgggcgatgcgccccgctatgcggaggcgaagccggacgaacggggaaaacgcctgtatgagcagtcccggcacacggaattcagccgggaggcgctgctggatgcgctggagccggtgcggctgatcgatatccgcgacgaaaacggcgtgcggacggacaatctccttcatcagctgcggcaggacggcgacggtctgtggctgtttttagcccatagccgggaaccctacaacaatgacgttcccactcgtcaaaatatccgtctgacggtcaagggagcctatcacgcgcgcatttatgacacgctgaccggcgatattcttccggcaaacgcggaaattcagggcgataagaccgttatccgggcaacgctgtacgatcatgacagcctgctgctgcggctggatcacgaaccggcgctgccccggacggagaacgaaggggctgccgcgtcccgcacggtgagcgtcccctcgctggtgcattatgtgctggacgagcccaacgcgcttcttctggataaggcggaatacgcgctggatcagggggagtaccagcctgaggaagagatccttcgggcggacaacgccctgcggcgggagctgggctggccgctgcggatggatgcgatggcgcagccatggacggtcaaagaagaaaagacggatcacaccgtgcgcctgcgctttgcggttcattcggagatcgccgtgcccgatgcgaagcttgctttagaggatgcggagctggcgaagatttggctgaatggcaagccggtagagtccgggccggagggctggtacacggacaagagcatcggcacggtcgccttgggaacgctggaacccggcgatacggtcatcgaggcggaatggcccttcgggcggcgcaccaatctggaatggtgctatctgctggggagcttcggcgttcgcctgcagggcgaaagccgtaccctgacggcgctgccggaaaagctgggctttgacgatgtgacccggcagggcctgccctattacggcggcaacattacctactgcatcccgctcacgaccgaggccggaacgctgtccgtctgcgcgccccattatgacggcgcggccattcgggcggcgctggatggagagccgaagggttatctggtctatgcgccctaccggctgacgctgggcgaggtggaaaaaggcccccatctgctggagctggccctgctgggcagtcggcagaacgcctttggcccggtgcatctggccgatgaaaaagaaaagtggattggccccaatgcatggcgcagcgaaggcgcatgctggacggagagctaccgcctgaagcggctggggatccgcagccgcccggaggtagaattccggccctaaacaggacaaaaagagggccttgcctttccaaatccattttcttataataggaacagaatttgaagactgggctttggccctttccaaaggagaaatgagtatgaacacgatcccccgcagtgaacatcccaagcctcaattccagcgcgataaatggatgaatctgaacggccagtgggcctttgagatcgacaatggccgcagcggaaaagcacgcggcctgcatcaggcggacgcgcagctttccgataccattctggtgccgttctgcccccagagccagctttccggcgtgaaccacaaggattttttgtatggcgtgtggtatcgccgcaccgttgacctgacgaaggagcagctttccggccgggtcgtgctgcattttggcgcggtggactatcactgcgaagcctttgtcaacggcgtcagcgtgggaacccacaccggcggctatgtttccttctgctttgacgtgaccgaagccgtccatgagggcgaaaacgtcatcaccgtgtatgcggaggatgacgagcgggatccgctgatcccccggggcaaacagagcgagctgttttattctcacggctgcgactacacccgcaccaccggcatctggcagacggtgtggatggagttccttccggagactcatatcgaaaagatcaagatcttccccaacgtggagaccggctcctttgacgtggaagcgctgctgaagggcgcgggcactctggcagtggaggcctcctacgaaggccgtcctatgggcgcggccagcgtaaaggcggacggcggactggtgcggctgcatctgtctctgcaggagacccacctgtgggagctgggctgcggccgtctgtacgacctgaagctcacctacggagcggataccgtgcagagctatgcgggcctgcgcagcgttcgtctggacggctaccgcttcctgctcaacggaaggtccgtgttccagcgcaccgtgctggatcagggcttctatccggacggcatttacaccgcccccagtgatcagacgttggaaaacgacattcatctttcgatggcctgcgggtttaacggcgcgcgcctacatgaaaagatttttgaggagcgctttctgtaccactgcgaccggctgggctatatggtgtggggcgagttccccaactggggtctggacgtgacccgacccgacgcggtctacagtgtgctgcccgaatggctggaggaggtggagcgggacttcaaccatccggcgctgatcggctggtgtcccttcaacgagacctgggatcgggatcaccgcaagcaggacgacaatgtgctgcgcgccgtgtatctggccaccaagagcgccgaccccaccc

SEQ ID NO: 111 - DNA, 6881 bp, Unknown
  16S sequences of unknown bacteria
taaatcacaaatagcccgtaggggcgaccattggtcgcctcatttcaaattatttgaactgtttttcctatataaaccaacaaccaaaccgcaaaaccggctctctttggtaaagagagctgtcagcgtagctgactgagagattggaaaacattttgtttacattcgatattcggtaataagttcgcttgcaaatcagtttatcgtatcaaagtcaatccctccggtttttctccgagaaaaaccacctccctttaccaaagggcggcaaaattgcggattttgggggttgttatttgtagttgaaattcgacataaacaatccgaatagcaacgctccatttggcacacttgttcagttgcaaatcagcacatcaacccaaacaaaaagctccgcattactgcggagcttaattattaagttacttctgtaaacaatcagattacaggatgtattccttaagacgacgagccatttcagcacatgcttctgtaggaacagccatgttcaaacgaattgagtttggtgcgtggaatggacgaccatcctgccagataacaccgtatttaacacccttcttctggagttcgtcgattgtcatacccttgtcttcaaggtatttatcgaactgagcgtaaatcatgaatgtgccttctggtttagcaacttcgataccaggaactgacttcaatgtgttgtagatcaagtcagagttctctgtgatagcttcctggaatgattttacccattcgtatccgtcttcacctgagtatgcaccgatcatagcgtgcatccagagaacgttcatgtcgttgtagtgtgagagtgaagcttccttgttccatctgtctctccagtacttgcttctgatgataccgtatgaacctacgaaaccagcaaggttgaatgtcttagaaggagcatagaaagaaattgtgttctgctgtgcccaagcatttgtgttttcaggtgggcagtgtttgtaaccaacgtggatacagtcagcccaaatctggtcagcaacaactttaacatcatatttctcgaagattgcgtatgctttttcgagttcttcttttgtccatacacggccacatgggttgtgaggtgtgcagaatactgtagcgtggatgctgttttctacgatcttcttttccatatcttcgtagtccattctccaaacgccgttttcatccttcttcaaccatgagtggatgatgtggtaaccgttgtttgtgatgcagcctgtgaagccgatgtatgtaggagcgtgaagcaatacattagcacctttttcgcagaatacgttcaaagctgagataacaccgccgagcaagccgttagcatatacgatatcgtcctttgttacatctgaatcgtactggttcttctgccatctgatgataccttcaaagtattcatctcttggtctgaagtaaccgaatgcagggtgttttgctcttgcgataactgcgtcctggatagcagggcatgtcttgaatgactggtcagcaacccatgtagggatgatgtagtttttccattcaggatctacttctgcgcctggaatcggaatgctgtcaacagcgattgagtccatgccgtgtctttcattgatgaaatcagcatgctggaaaaggtcataaaacttaagattcttgtccataataaaatttctcctttttattttcgagccggggctttgcgcaccaatgcccgatttcttattacggttttattatagaacaaattttatcaaaaggcaaccgctttttatgtttttaatatagaattttgccccctttttttggtaatttttcacaaaagcagctataaaattaaacaataacccattttagcttaatttaaatcaatataatttagaaagtaaaaccatataattttacaaagttttcatatattataaaagcataattatagaaaaatatttcaccgttaagttttttcctttttaacacaaatttatttctaaaaaaatttaattttcgcaaataaaaagccataaaaattttttataattctgctaaatttcgtaaaataatacagcccctgttatattccctattatatgctaatttatatatttttcacaaaaagaaaaaggcgaaaaatctcgccttttcatattataatttcgccccacaggtcaatcccctttgcgaagtctcttttccaaaatgcccacaaaatgggtaagaataaccaccattacaagataaataagggcaacggcaaaaagaggcataaaaggtgaaaatgtgttgcccctgatcaaatcccctgcccttgtaaggtcggtgattgtaacataacccgcaacggaagtttcctttaacagggttataaactcgtttgccaaagccggcaaacagtttttaatcgcctgtggaataatgatataccacattgtctgcacataattcatgccaaggctgcggccggcctcaaattggcctttttcaacggaagaaataccgctgcggaatatttccgccacataggcgccgctgtttataccgaaagaaagggttgctataagctggccgttggtagatgaggcaaaaattatgtaatacataatcataagctgaacaaccaccggtgtgcctcttataacagttaagtaaaaagaacaaaggccgttgccgaatttaagcaaagaccccttaaagccctgcaattcatctttgttgccctcgtaagatgtgcgtacaaccgccacaagggcaccaaggacaatgcctattacaactgccgccagggcgatttgtattgttaccgaaaggccgtttacaagccatttccactttgcgccctttataaagttaagtgcgaattcttttttaaatttatcaaaccaaattgacacggccgattgagtacccgtcattataaacctccaaaacaaatgagggcagatacactgccccctgtatatgctgtgttaattttattccgctgtgatgtatttgtcaacaatttccttcaatttgccctcttctttaagctctgcaagagctgtgttgatagagtcacgcaaacctgtcttgttgtcttttgaaacgcagattgcataatcttcatttgcgtattcggtgtcaagaattttaattccctcattctgttcaacaaactttttggcaggttcgttgtctatgattacgcagtcaactttgcctgttgtcaaagcaaggatagcgtctgtggcaaccttaaactgactgattgaacaagttgtaaggccgtcctcaatatcgccggagaagtaaatgtcacctgttgttgaaagctgaacgcctaccgtgtaatttgcgccctctgcgtacaaatcgtcaactgatgtgatcgggctgttttccggaacaataacaacctgaacgccgtttgcgtaaggatccgtaaagtcaacgctttcaagtctgtcctctgtaaccgtaaggccggccatacctatatcatatttgcctgatgcaacggaacttacgattgagttaaagtccatgtttacaacttcaagctccatgcccaatttttccgcaacggcatttgcaacttcaatgtcgatacctacatagttgccctcatcgtctatggattcataagggggaaagtctgcgcttgttgcaagggtgagttttttatttgtatcttcactctgtgaatttgaatttgatgaacaaccggcaagtgcaaatacaaggcagcctgccaaaataattgaaataatttttttcattttaaattctcctcttagattatcaaaacataataaaatcattatgatgtataaaatatacatcaacctcacaaaaatgtcaatagattactgcatataatttctaaaaattagtataatatttaataaatcttatcaaatgccgataatcttcggcggtgaattgtcaatcgggctgttgtcggttttaaattccttgttttgcagatattaaaaccttaaaattattccctgtgggcggttatatatggggttttatatataataaagaataaatattaaaagtcaagttggtcaagggtaaacatattgtacttctttgtcaggcgaatatcctcacgggaaagtttcaacgcctctttcagtttttcgttttccggcaattcggtttcggataaaatacacttggccgccgcaggcataagacttcttgcggaaatacccgtcaacattcccaccttttgtccgctgtaattaagggggtttttagcgcagattgtggcgtattctattttgtttcgctgatttctcatcaaatatgttaccgtgtcatcttcctgtgacatagaaccgtagtacaaagcacggcatttttgcggattgtcaaaagaaaccaaaccgtaaaacaaatttatcggcactttatcccctatgggccggccgtaaaccatcaacgcacggacaaggtcttttctgccgtccgaaacatagagatattcctttttaccgggggtcttaatggccgccggggtatatgtggtttcattttgatttaccggcaacaaaacccgtgggcttatgcccagggcgccgcaaatatccataagggtggccacatcaatggctaccaaaccacgctcgtacttgctgacattggattttgttttataaattttttctgccagttgttcaagggtcatgccacgccgcttgcggtatatgcgtatgtttttcccaagtaaaataagggtgttgttgtccatgtacttttcctccgaaaaataattattgttaatactataccatatttgaagaagaaaataaatatttttattgtattttgtctcacttagctatataatcatattaaataatatcggaaaagagtgttgaaaattatgaaaaatgtacttctcggctcagaggacagattaagcgttgcaaaggtgcctgccctggtggcggacaaccttgacacctactgctcttgctttttaaattgggtttgcacaaaccaaaatttaaaggttgacgacggggtttactatgacgaaaaaacctttatcgactttttaaacagccgcatcgccgcacctaagagctatattgaacaggaagttgacccacgggcagtgccggaggaatacagagattgccctgtgttcgatttttaatatggccgacagagagaaacttaaaatccggctggaggaatttaccccttttaaccggcaggaagaaaaagaccgccaaattatgctgaagcttttaaagcaggaggatattttccgccgcagtaatcttatcggtcattttaccgcctcggcttgggttgtaaacggcaacggcacaaaggttcttatggcctaccacaatctttataacgcctggtcttggcttggtggccacgccgacggtgaggaggatttatcccaagtggcactgagggaagtaaaagaagaaagcggagttaaatccgtaaaacttttaagccctaaaatttactcggcagaaattctgccggtggagggccacgaaaaacacggagaatatgttccctgccatcttcactacaatgtgacataccttatgcaggcagatgaaaaccggcatttaaccgtgaaacccgaggaaaacagcggtgttgcctggttcggtcttgaagaagtctacgaaaaatccaccgaaaagtggtttgtcgaaagaatttacaaaaaactgaacgaaaagctgaaagattggctttaatccgggcagatattcacaatcaaaaaaggcggccgacaggtcgctttttgttttggggatttaaaatctctcttgaaattaacacaaagctgtggcaaaatatataccgttgaaaaaagaaaggtgagggcaaatggattataatttaagaaaggcttttaacaatttagccgaaattgccgcaaactgtgcagagtttgtaaattttccgctggacagcaaagatattgaacaaatgatgcaatttgaaaccgcctcctttatcggctacattgcaggtggaagcggtgaaataaccaggcaggatttgaatatcttggctttttacacgggaattgacgcctcctttgaggaatttgcggactttatctccgaaaacgaacttctggccggggaatatgaatacaccgttccacagtttttgcagcttttggttcaatttgacaacattcttattgacaagggtgcggatatgggggcagaggactacatcagccttacatatattcaaatgatgtccggtttggcaaaagaaatcgccgaggaagatggcagagtaaactttgaccgtgaggaaaactgggatgtttacgccaaaactttgacaaattatgttgacgaaaatttgcacaaaacctccgacgataaattcgacaggtttgattatatggaagaatttgaaattcaatagtcgaaaaatttgacagtcgaaaaatttgccggttgaataatttgacagttgaataatttgattaaattcggcatttacatattttaattgaccggatttttaattgaccggatttataaaacttttataaaactttaaacggcggtcattcaccgccgttttttcatacaataaaagcaggtttgcgctatgaaacaacaaaccgaacaaactgcaaactcgccctccttgtacccacggggcatgacatgtaagggagggtgtcggcaaagccgacaggagggttgattgaacaatcttcccctgtaaatcaacaacccaaacaaaccgcaaaatcggctctctttggtacacttgttcagttgcaaatcagcacatcaaccccaacgaatagcaaggctctctttggtaaagagagctgtcagcgtagctgactgagagattgaataagcaaattgttttat

SEQ ID NO: 112 - DNA, 7071 bp, Unknown
  16S sequences of unknown bacteria
cgacaagccgaacaacaacaacaacaataataataagcccaacggcagcagtgccagcacaaacgggcaggccctgcaaaagcccacggccaatgggcaggcgagccagaccccggcaggcgccgcgggcgggcagcgagtccacgtcctctctgaggcactggcccagcagctggccggccggcaagccgcctcccccaaagacccggacggggacgccccggtgcaagagacggtccaggccgtgacgatgcagacagaggaccgccgctggtactacctgggcacagccctaggcgcgcttctgctggccgccctcggtgcaggcagcgcggtgggctactatagaaaagggagaattgatgcatgagtactgtatttcacaatgttctgcgggctgtctccggcgcgatggagctgccggtggtcatcctgctgattttactgctggcctttgccgtcttttccgtcggctggatcattgcggagtttttttcggagcaccgccacatgaaagaggacctgcccgcgctgctggagcatctgcgcgacaatgagacggatctggaagcggccattgccgaaagcaagctcaaccgccgccagaaggcgacactgcaggaactgacgcagcaccccgatttcacccgccccctgctggatgatctggcagataacctgctggagcaagagcaggcccactatgaccacatgattaaattcacggaccttgcctccaagctcggccccatgctgggcctgctcgggacactgatccccctggggcccggcatcatcgcgctggggcagggcgatacctacacactctccgtctccctgatgacggcgtttgatacgacggtcgccggtctttgcattgccgccgtctgcatgatcgtctcgacgatccgccgccgctggtatgctgcatacatggcagacctggagacgctgaccagctgcgtttgtgaaagggtgaagccgcaatgagaagaggaagaaggacccgccgccgcttttcggaggaagaggtcaacccgatgaactatctctccaacctctccgacgccatgctcgttctggctgtcggcatcatgctggcgctgatcgtccactggaatgtcgatatctccacctccggcgggacaatgtccgactccggccagtcctacgccgccgacggcgaaggcggcaattctgccattgaccgtgacagcgctgtcaacttctcccaggacgagctggacaacatgcagtcccaggacaagctggacagcagcgataccggcatggaaaagctgggcgaggtctattatgacgccgccactggccagtattatattgtagagaacggaagttaaatctatggagcaaacgacacacaagcaatatgcctggaagtttatcgtgctggccggggtgtttctggttgtcctgttcggctcagcattgctgggccgcttcaacctgacgccccaccagcttttttctttactccgctcccagttccaagcggtcgagccgtgctggccagtcgggtcggagaatgttttgtttgagatccgcctgccccggatcgccgcggcggccctcgtcggcgcttcgctggcgttggccggtgtcgcctaccagggcatgttccggaacccgatggtctcgccggatatcctgggcgctagcaccggcgccgggttcggcgcggccctggcgatcttatgcggcgcgggatattttgccatctcggcgacgtcctttttctttggcctcgtcgccgtcttcgccgcgtatcttgtcagccgtctgagccggacgaatcccaccgttgcgatgatcttggcgggcattatggtctcgtccctgttttccgccgggacctcttatatgaagctggtggccgatacgcagcagcagttgcccgccatcacctactggctcatgggtagcctctcctccatcaaggtgcgggacgtgcaatttttgtgcatcccctttgtcgtaggctttctccccctgtgcatcctgtgctggcggatgaacctgctgaccgtcggcgatgaagaggcccgggccatgggcgtcaatacgacgcggctgcgcctgatcgtcgtcatctgcgcaacgctgctgaccgcagccagtgtcgccgtctcgggcatgatcggctgggttggcctggtcatcccccatttttgccggatgatcttcggctatgactaccggcggctcgttccggccagcgccctgttcggcgcggcgttcctgatcgtcgtcgacgatgtcgcccggctagcaacgtcatcggagatcccgctgggcatcctgacagcctttgttggcgcgccgatcttcatctacttagtcctgacaggaggtggcaaccgtgcagattgaagtacgtgacctctccttttcctatcccaagcacccggtgctgcagcacctcagcttttccatcccccagggcgaactggtcgccctgctggggcccaacggcgcaggaaaaagcacgctgtttcgctgcattctcggctttctgcggccggagggggaaatcttgctgcgcgggcggcccgtccgctccctgacgcagcgggagctctcccgggaaattgcctatatcccccaatctgcagagccgatcttcaattacaccgtgctcgacaccgtcctcatgggcaccaccgggacactgcaattggcccagcgccccggcaaagcgcagctggaagcggcgcaccgggcgctggatcagctggagatcgcccatttggcaaaccggggcatcagtcaggtctccggcggtgagcggcagctggcgctaatcgcccgggcgctggtgcaaaatgcagccgtgctcatcatggacgagccgacggccaatctcgactacggaaatcagcagcgcgtgatggcccgggtctgtgggctgacccaccagggctataccgtcctggtctcgacccataacccggagcatgcgctgcgctatgccagccaagtactggcactgcaagacggctctctctgtgccttcgggccaacggcgcagacgttgacgccggacctcattgataagctatacggcatccatgtcaccatggcagaagtcatgacgccgcaggggcccgcctgcagcctgattgcattggaggaatgaagagatgaaaaaacgaattttggggatcatcctgtgcctgtgtctgctggtgcagctgctgccagccgtcggcctggccagtgacacgatcaccggcatcgtcccgctgaaggcggggcaggacgtggcgacgatccgctgcgagctggcggacaagagctacaccttcctggactttaccaaggaagccgatggctaccactacagctttgaaaaacccgaccagagctacgagatcatcccggaatacttctccaccaccgtctgggacggcgcagtggatatctcctggtatgatgaaacgaaggacgcgttttatctcgacaccccggcccagcttgcgggtctggctgccctggtttgcggcaacgtggacatcgacacgccagattaccgcatcaaaggagaccagaaaaaccttgtctccacaaaggtcgatgattacctgcttattggcgccggtggcggtgacattcacgacactgtctacgtcggcgacccaggccatgacttttctgacaaaaccgtatacctgacctgcgatatggacatgggcggtgtcaacaactgggtgccgattggcggcaaatacccgctggatgtagaaaattgcgccaaggtcgtcgaagcattttttaacggcacgctggacggacagggtcaccggatcacaaatgtcaaatgcaaccgctatggcagcaagcatttcggttattccgagggcatcggtctggtcggctatctgggccagctctatgaaaatgaagtgtcgcccaaggtggctccttccgtgcggaatctctcggtcagcggtgatttttacggtcgccgccgggtcggtggggtcgttggccgcagcggcagcgtcccgactgggatttacattgaaaactgcgcaaactttgcgtccgtcaagagtacagacgccaagggcgtcggcgggatcatcggcgccggctggagcaagggtgccatcgtcaattgctataacgcaggtgaaatcagcaccacctatgcctgccccgccggcgggatctgcgccagcaaccaggggctggatatttacaactgctttaacgtcggtaccattgattccaacggaaaccagcgcggccgcggcatcggcggccatgacagcggctcctataccatcgccgatacctactacctggaaggctgcgacgacgataccgagtctcacggctggtatgcgggcaacgccatcaccatccatgtggacattgcagcaaaatcggaaagctatatgaagtctcaggactttgtcgatggcctcaactgcaatggcgacgcctttgtcaaaacagaaaccggctatccccgccttgcctgggagcaggacaacacagccaaaaactgcaatgtgacctttgtactgaatgagcagggcagcgtctcggccacgcaggaaagcccagtccgtgcagggacggtcctgcacctcacaaacaagcctgccagcggctgggccttccgggcctacacgctgaacggcaagcgtctgaccagcccctttgccacagtaacccaggacgcctccatcggcggtatctttgaagcgctggccgctggtgcgctctacattgaagccaaccccgcctgtgatatcacagtcgtcaaggaaagcggcatggcagtggtagacggccaactgactgctgtccagaattaccctgtcaaggacggcgatgccttgtatgagggcgacaagctgcgggccaccgcgaagattcacgacggcatgaatccggatgacctcaactatgtttacaccggcgcctttgaatacagcttcacctacgaggacgagaacaagacccattggccctccaacaaaggcgatgccaccgtttcgagcctgatcaccactgcttccctgcatctgtcggtgctgccgctgatgacccacaaggtttggacacagctggcagagacggactggtatgacgcaagcaaaaccgaattcaccctcacaacagcgcgacagctggccggacttgcattgcttgtcaagcagggcaacacattttccggcaagaccgtccgcctgggcaaggacgtctctctaaacaacgacgacgcgacctacagccgcagtgtccgctggtttgacggcatcggttccaccagcgcccccttctccggtacttttgacggaaacggctacaaaattacggacatgcgggcagaagccactaccagctattccgccctcttcctggcaacggatggcgcgacgctgcaaaacattcaagtcagcggcgtcgctaaggcgagtggctatgtcgccgccatcgtctccagcgcgaaaaacacgaccatccaaaattgcaccgcagacgtcgccatcacggcgctgcagaattacgcaggcggcatcgccgcctacatagacggcggcacccggatcactggctgcgtcagccgcggtacgatcaacggggccgacggtgtcggcggcatcgtcggcgcctgccaggatacggccagcagtctgaccggctgcgtgaattacggtgccattgcagccgatggctccagcgccggagctggcggcattgccgggcgcatgaacggcagcatgacccgctgcgccaactacggcacagtcaccggcaaggtctggtacctgggcggcctggcaggcagctgcaataccgacaagggcggcgtcatcacaggttgctataatatcggcgccgtcaccagcacctccacctacggctccgccggaaccggcggtctcatcggctacggcaactattacaggctgcaaaactgctacgactacggcacggtcaccgcagccaagggcacgaccggtgccatcgtcggtcgggacagccgtcgctcctacagcagccgccagcgttgctattatctgaccggtgcctgcgccaatgccagcaataacgccgcccaggagacaaacgtcgaagcaatctctgccgccgcttttgccagcgacgccttcgccggccgcctgaacgagggtttaacctccgccgcctttgcccaggccggaaacggctacccggaattcctcgccggctgcgcgcacgacggtgcaacgcaccgggagaatgcccgggcagccacctgcacgacagccggttacaccggcgacctcatctgcgacctgtgcggcgagaccattgaagcaggccaagccatcgccccgtttgcttgccccagcaccggctttaccgaccgtccggccacaaccagctgggaccatgccgggatcgactttgccctgaacaacggtctgttcttcggcaccagcagcacccagttctcccccagcggcgcgatgacacgggccatgctcgtcactgttctctggcgactggacggcaggccagcacccaagagcagcaatcccttccaggatgttccggccaaccagtattactgcgacgccgtcacctgggcgtcggaaaataacatcgtcgccgggatgggccagggccgcttcgcaccggacgccagcatcacccgggagcagattgccgcgatcatataccgctatgccgcctggaagggctatgacacctccgcccgtgcggacctgtcgcccttcccggatcttagccaggtcagcagctgggccacggcgaatatcgcctgggccaatgccgagggcctgatctccggcaaccagtccggcggccagacctatctgctcccccagggcaacgccacccgcgcccaggtcgccgcgatcctgatgcgctacgtcgcgcgagtcgcaaagaacgaaagcggctaatacaaatcaaacaaaaccggtgctggcgcacaaagcatgtgcgccagcaccaagcttttaaaccacacaaataaacatcccccggccaagccgggggtttttcatatgcgggcatagcccttgt

SEQ ID NO: 113 - DNA, 10971 bp, Unknown
  16S sequences of unknown bacteria
atttgtgatgatacgattcttgtatccgtgatgtttgccaataacgaaattggtaccattgaaccaattcgggaaataggcgcagtatgcagagaaaaaggcgtggtttttcataccgatgctgtccaagcctttggagcgataccgatacaggtagatgaaatgaatattgatatgctgtccattacagggcataagctctatgggccaaagggaaccggtgcgctatatatacgaaagggcatcattttgaaaaacctgatcgatgggggcgcgcaggaacgtggaaaaagagcaggaacagagaacattgcaggcattgtaggcttgggtaaggcagcgcagctggcacaagcacagatgaaggaaaacgcacaacgattgacggcgctaagggataggctaattcagggcctactgcagcagatcccggaaacccggctcaacggccatccaacaaaacgattgcccaacaatgttaatgtttgttttcgatatattgaaggggagtctttgctgctcttattggatagggccggcattgcaggctccagtgggagtgcgtgcacctctggctcgctggatccgtctcatgtattgttggccataggcctgccgcatgaaattgcgcacggatcgctgcggctgactttgggcgccagcacgacagaagaggatgtggattacgccattgagtgcttgaaaaatatcgtttctcgcttaagggaaatgtcgcctttgtatcatcagtaaaggagcttgtatccatgtatagtgaaaaggtaatggatcattttatgaatccaagaaatgttggggatgtagaggatgccaatgccgttggcgaagtaggaaacgcaaaatgcggagatattatgaagatttccatgaagatcaatgatgacggcgtgatcgaagatgtgaagtttaaaacttttggttgcggcgcggcagttgctacaagcagcattgcaacggaaatgatcaaaggaaaaacagtggaggaagcggaaaaactttccaacaaggccgtgatcgaagctttggatgggctgccgcctgctaagatccattgcagcgttttggcggaagaggcagtgaaagcggcgcttaaggattatcacgaaaatcatgaaaaatgatttgccgaaaataaacagcattgccaaataacgctttcatgattgtgccccggatggttcatactatggatagactatcaaaagaaaggggaatttgcatgaaagccaaatatgtagtagcaggtatggcggttagctctcttctcggagctacggcagcgctggccattgcaggagatttgaatgccaacgggatgaaaaaaatctctaagcgtgttgaacgcggtgcaaagcaaatgggtatccagctttgatcctaggcggcctttgggccgcctttgctttttgcaaagaattggcaagatgatgcgtgtaggcgtataaaatcttcctaattatgatttgaaaaacagtgataaatcaggtatactggtatcagccgtattgagcaatttttagaattgaggtataagcgatggatagagatgatcgtaccatggcattcgcgcctgtacgcgatgagtcctgtggggaaatcctcttacgtgtatacgacgccttaaagaccaaaggatatgaccccgtcaatcagttggtcggttacttgatttctggcgatcctacgtatattacgagctataagaatgcgcgaagcctaatttgccgttttgagcgtgatgagctattggaagaggtcatgcgctattacctaacgcataaaacagaataaatggaagttcgtaagcttggacagagcggtctggtagtttcccggctttgctttggtacgctgacgatgggccctttgcaacggaattttacgccttcttatggcgcagagctgttggcagagggctttttgcaaggcataaactgcttggatacggcggagtattatcaaaattatgaccacattcgcgagggtttgcgctataagccggatgcagttgtcatcacaaaatgccacgcatacgacagggccggggcgttggatagcgttgacaaggcattgtcggggctaggtagaaagtatttagactgtatgatgctgcatgaacaggagagcagatggacgctgaaaggacatgaagaagcgctaaacacctttgcagagctaaaggacaaaggagttttacgctctgtcggcgtatccactcattttgtggactgtgcacaggctgcatctattcatcccgggattgatattcttgaggccatttgcaatcaaggaggcgtgggcatcatcgacggaacggaacaggatatggaagctgccctttccaaggcccatgactttggaaaaggcgttgttgccatcaaggccctggccggcggacattactcggccagcccggcccaaagcatacgctatgtgttaggaaagccctttatcgattgccttgctgtggggatgcaaagcgcagaggagattgtttgcaatgtagctttggccgaaaatagatgtagcgaggaaatgttgagcagtgtacagaggcaaagccgtgcgctgcatgttgcggagtggtgtataggctgcggtacttgtgagcgcaggtgccaggcacaggcaatccgagtagtcaatgggaaagcgataccggatctggataagtgcgtactatgcgggtattgtgcaggctcctgtccggaattttgtataaaggtgttttgatatgaaaatagcaggactcgatgtgggacaagcacgcatcggcatagcaatttccgatgagatggaaattttggcaagcagtgtggagagttatcactgcaaaggggagatagaaacagatgcacgggcagtttctgaaaaactaatagagcttggcgcgcagaaaatcgtgatcggtttgcctaaaaatatgaacggtacggaaggccctgcagctgaaaaatgccgggcatttggagagatgataggaaaatttttggatatcgagcaagtatattccgatgaaaggttgacaaccgtgcaggcgcagcgtacgttgataggagccaacgtatcgagaaaaaaacgaaaaaatgtagtggataaattggcagcgcaactcattttacaaaactatttggatgcacagggggttatgcgttgaaacacaactggcaggattcctttgtggtcaggttggccaacgggaaaaaccagcaaatggaatataggctctgggccattatgcagcatgatggaaagcaatatctcataatgcgagcggaggacaatccgcttttgatggaggatattatgctgttgcagctcgatgccaatgataagaatgagacatatacagttatcagcgatttggcaccgtttgcaaagatcttgcacaatacgctgggcgtaaatacttcgatacactgagaaggagagaaagacaatggcattgtttcgaaaaaatccttttacttcggccatcaaacagtatcatttttatgaagcgtttcaagaatatcttgtggacgaggatggctgtgaagaacagctgcagacgttgatggaaaaggataagacagcagcacaggactttaataactacctggaagtatggaatgattttcgacaagcagtcgtcgagggcgattgggataaggccgatgcagtgatggagaagatggaagcatccgatctatatacaagggaagatctgaagcatgtgttggtggacttggcagacaagacaagcaattacaattgctttaccatgtattggaagctgattgaggataaggattccaacagcgagctggatgaggccgtcaacctgttgctggaatgcctgccggattgccctgaggcatacgatcaagcgttggactttttgcagcaaatgatcgatagcacctcgaaactacgagaaaaacttacctatgtggaacgtgcactctccatttttgagcgccctaactgtaaagtagatattgagagagcggctcaatttattgcgattgccaaggcgatcaatcccaaaagccaatccgcgcacaaagtggagatggccttgtaccgtaccgatatggtggcattggggcaggtgcgcccgctggtggacgcgggggagcttcagcaagcagtggatcagcttttggaaaagagcagggacctgccgcgtagaatcataacgcgagccattacagggaattgggaggatgcagaaaccttttatcacctgggacagtgtttatatgatacgaccaaagatcccactgacgcgttctacattgcatctgctgtatggcatagcgagttgagagagcacgaccagattttgcaggaaagcatggagcttggcttaacagcagttgaccaaatgccggacaatgtgccatacatggcaacgctgttggatcagctgtatcttgtgcgtccgttcccactgccggatgaggtagcaaaggaatactgtgagaaggtattggcgatcgatcccgaaaatgaaattgcgattgaatgtatgaaaatttacgaagaacaaaaggaagaagcagcgctagagatcgagggcccagaagaaaattgattcttgcatatcatcacaggcttatgatataataactcggattaaaacacacctgttggtatactcccgccttgtgccctgttgtagggttgacggagaaaagccacagggagggtaacaaggaggaaaaaatgtctgttatttccatgaaacaactactggaagcgggcgtacattttggacaccaaacgcgccgctggaacccgaagatggcaaagtacatcttcaccgaacgcaatggtatttatatcattgaccttcaaaagaccgtacgcaaagcggaagaagcttatatgtttatccgcgacgtggcagcgcagggcggttccgtactgtttgtcggtacaaaaaagcaggcgcgtgaaagcatcgagcaggaagcaaaacgctgcaatatgttttatgtaaacaatcgttggttgggcggcatgcttaccaactttaagaccatccgccagagcatcgcacgtttgacccgtatcaacaatatggagaaaaacggtgattttgaagcgttgacgaaaaaggaagtcagcaaactggtgctggaacgtgaaaaactggagaaaaacttaggtggtatcaaagagatgcgccagttgccgagcgcgctgtttatcgttgatccccgtaaagagcacattgcgatttccgaagcacgcaagctcgggattccgatcgtcggcatttgcgataccaactgtgatccggatgaattggattatgtaattcccggtaacgacgacgccatccgtgccgtaaaattgattgccggcaaaatggcggacgctgtgatcgaaggccgtcagggcgaacaggaagaagaacaggtagaagcagaagccaatgcagatgcacaggctgtggaagagagcgcagagctgtttgcagaggcaaaggaagaacctgtacaggcataagacaaaacgaggaggagtatatccatggcagttagtgcaagtgatgtaaaagcgctgcgtgaagctacgggcgcaggaatgatggattgtaaaaaggctttgacggaagctgatggcaatatggaaaaagccacggagattcttcgtgaaaaagggcttgctgctgcggcgaagaaatctggccggattgcggcggaaggcgttgtggccagctatatccatatgggtggccgaatcggcgtgcttgtggaagtaaactgcgaaacggactttgtggcaaaaacggatcagttccagagctttgtgcgcgatattgcaatgcaaatcgcggcttccaatcctttgtatttgtcttcggaagaggtaccgcaggatacaattgataaagaaaaagagattctgcgtatccaggcaatcaatgaaggaaagccggaaaagatcgtaaacaatatggtggaaggccgtattaaaaaatacttcaaagaggtttgcctgctggatcagccgtttgtcaaagatccggacaagagcattgccgattatgtcaaagagcagatcgcagctttgggcgagaacattaccattcgtcgctttacccgttatgaaatgggcgaaggcctgcaaaaacgcgaagataatttcgtagaagaggtaatgaaccaagcaaaagcgtaataaaagggccatcggccctttttttatgccactatatgtagattgaccatagaaaaagacgattttagcattgacgcagactttctgcctctggtacgctattcgtggttatggtatatgcaggcagatatctgaaatgtttaattatgtaggaggaaaaactgtgaagccgaaatatcaacgcgtgatcattaagatgagcggagaagccctagcgggaaacgatcgttttggattgaacaacgatgtgctatcggcaattagcgatcagatcatacaggctaaagaaaccggttgtgagatctgtgtcgtggttggcggcggtaacttttggcgtggccgacaaggcaccaatatggatagaacaacggcagattatatggggatgttggcaacaaccatgaatgctttggccttacaggacgcgttagaacaaaaaggggcgcaggttcgctgtcaaactgccattgaaatgcgccagatggcagagccatatattcgtaggcgtgcggtgcggcacttagaaaaaggccgcgtggtcatttttgcttgtggcacaggcaatccgtacttttccacagacacagcagcggcgttgcgtgcggcggaaatgggggcggaaatgattttgctggccaaaaacgtggatgggatctatgacagcgatcctaaactgaatcctgatgccaaaaaatatgatgatattacatataaacaggtgttggcggatgatttagcggtcatggattctccggcgatagcgctttgtatggaaaacgatatcccaatcttggtatttgctatgaatgaggcaaacagcattgtccgcgctgtgtctggcgagcaggtagggacgttggttcacaaataaacgatacatctttggcaggagatgcttggcatttcctgccgttttcttttgcccctcatatttctctttgccgcatacatatggtgaaacagagggaaaggggggcaaatgttatgaaaaataaacgcaggagaagaattccgtatcgaaaatatacggcgcgcgctaaacaggatagctctttttccttttttgttgctgtggctatattgcttgctcttgcttatttgggggcagctaccaaggcgggtacttttttggcagaaaaggtggtgcgtcctgtatttgaacaattgggcgtattttcaggggaagggaccgcgccggaagcaacttcctcgccggtaggcacagtgagttatacggcgcctgccatggatttttattttttacaagtaggcgtgtacgcttctcaggagaatgccgagacagaggctaagtccatccaaagtcagggcggtgctggatatgtataccaagacaaagaggattttcgtgttatcttatccgcatatacttctcaggacgatgcagaaattgtacagcagcgtttggcagatacaatggagttaaaagtgcttcctatacatgtagaggagaaaaacatacaggcaacgtcacaagaacaaaatcaggccttgcagcaaggaatcgagcttttgctggcggccaaggatgaattgtttgctgccaatcaagcgattgagacgcaggagacctgtaaacagcatctaaatacggcaaaggatagatttcagcaggcgcagagcatcttggaagcgcagttttcatcggaagaaaaccaaacaggtgctgagcttgtgcagctgacatcacaggctttgcaagatacggagcaggccatagaggcacagggcggtgatctcaacacaaaagcgcaattggccctctgccgttttttgggcgcctatgccattgcaatgaatcaatagcaggaagaaacgactaaaaatttgtatagatttcaacaagttacttgtatccccctcccatatgtgtggtatgatagaacatattgcatgcgataagggggattttcattgattcctgtcattgtgattttactgattattccagtcattggtttaatcttatttttattgaaaacgattctaaagctgtccttttctgtggtaaagattttggtggtgctgtttgtattgtggctgctctatggatttattacgggtggcattcaggaaacgctcaaaaatattgggaaaccgagcatcacaacgcaagaggatggttcaggattgtatttgggcgcttttaccaagggcgaattggatgttgagccgtatatactggacaagataggcaatgttgaagtggacgttgctttttctgatgtgtatgtaaaaatgccagaaaactgtgtattgaagatagaagcacaggctgttttttgtaatgtagaggtagaggggcataagcaaagcatctcctacggatcaaaacagtttgtgacaggaacgggagaaaacatcgtgacaatgaagctgcggagtgcattttcaacggttcatgtaatcccgtaaggaggaaatggtgaatacaagttatcaatcaaaggacataaaggtactggaaggactagaagcggttcggatgcgcccaggtatgtatattggctctacagaggtgcgcgggctgcaccatatgctctgggaaattgtggacaatgccatcgacgaagctgccaacggctatgcagatcaggtaaagattactcttcacaaggatggcggtgctacagttgaggacaatggccgcggcatcccggtagatatccatcctcagatgggtgtttctggcgtggaagtcgtgtatacccagcttcatgctggaggaaaattttcctccagccaatatcaatattctggtggactgcacggggtaggcgcaagcgtagtcaatgcgctgtctaagcgggtaatcgtagaagttgcgcaaaacggttctctatacagaattgcgttttctccgcaaaaggatgaaaaaacggggaagatgattcctggtaaagcagagggcccgctggaaaatgtgggacgtacccgaagaaaaggaacaaaggttacattctggccggatgacgcagtatttgagacaacgaatttccactatgacatgatcgcacgcaggcttagagatctttcttttcttaacagaggggtgcacatcgtcttcacagatgagcgcatcaagggcgataagaaggatcaaaccgtcgagtattattcagaaggcggcttgatggattttgttaagttcctcaatcaggatcgggatactttgtatgatacgccgattcttttggaaggaaagagcggagagatgctggtatctgtcgccatccaaagcaacgatggatacaacgaatccatttattcctatgtcaacaatatcgcaaccattgatggcggtatgcatgaaactggctttaaggcagcgtataccaagtgtatgaacgagtttgcaaagaaaaacggcattctgaaagaaaaggatacgccgttgatcggagaggattaccgtgaaggcctgacagctgtggtttccctaaagttgaaaaacccacagtttgaaggacagacaaagacacggctggggaactctgaagcgcgtacgggtgtggaaagcgtagtgacggaacagctgagcatgttcttggacgatttgaggaatcaaaagatcgcgttggcaattatggaaaaggccgcgcaggcagccaaggtaagggaagcggagcgttctgcaaagaaaaaagccagggccctaaacaagctggatgcagcgccgctggtaggaaagctgtcctcttgtacggggcgcaatgccgaacaaaacgagctgtttatcgtagaaggggattccgcaggcggcagtgccaagcagggaagaaatcgcagatttcaggccatcttaccgctgagaggaaaaccgctgaacattgaaaaaaaaaggctagagcaggtattggccaatgacgagtttcgatctgtcattacagcgctgggaacgggcatcggagaggattttaatatttcgcagctaaaatacaatcgggttatcattctatcggatgcggatcaggacggcgcgcatattcgagctatccttctgacctttttctatcgctatatgaagcccttgattactggcgggcatatcttcattggcatgcctccgctttacagagtcagcaagggcaataagcatgaatatgcatatgatgatgaggcgctgggtgcgcttatcaaaaagatgggaagaggctatacactgcagagatataagggccttggagagatgaacccggaacagctttgggaaacgacgatgaatccggagaagcgtaccttggtacgtgtaacgattgaaaacgcggcagaggcagagcaccttgtccgcgtattgatgggagaaaaggcagatttaagaagagaatatatctttgccaattcaaactttaacagagaagaccactttatggaattaggaggcgttgtggaggatggcaggtaaaaaacagcagccgacaatgcccatcgcgcaaaaggttttggagcagccactggatcgggtgatgcatcagtccatgattccttatgcggaatatgtcatcatggatcgttcccttcccagggttgaggacggcttaaaacctgtgcagcgcaggatcttatatacgatgatggaactggggctaacgccggataagccgcaccgaaaatctgcgcgtattgttggtgattgcctgggcaaataccatccgcacggcgatacatcggtatatgatgctatggtgcgcttagcacagccttttaacatgtctgcgccgctggtggacgggcatggcaatttcggcagtgtagacg

SEQ ID NO: 114 - DNA, 3416 bp, Unknown
  16S sequences of unknown bacteria
cactggattgattcaacgttcgctgacggaagcaaaacgaaattggacgttcgctccatttcaacgcacagattaacgacaatccgcggttagcctaatccaattcagttataatttggtattctcgaccccgcgcgaaagaaaacgaatgaattcagtgcatttaccgcgtctacctccaccgcgcgaacattttaagctccactactacgctttatgcgatgccgcgcgactaatctgttaatgggggcgaagacggaagtgtatcatatcaaccaaactccaccgcaagccggtactcgcagagggatggcgcctgaatccctctgtgcgccctccgcgtaggagcgtcccctcaccgcagtgagatataattaaatttgaaagggcgcagctctttcttccatattttcttaaagaagaaaaaaatctccctgcgcgtgtttaacgcagtacgagattttttcttttccccacgcgcaatttacgttttgttaatgatttttctctccgattgtggtacaatcatctcattgacttgtcaacattttttgagggaaaggagataccaccccgtgagtgaagagcttgatgaaaataaagcaccccgtaacctgcggtcgcttatgcggtatttccgtttctcctccgctaccgaagccgtgaccaagagcatacaaaagtataaaaacgaaaagctctcccgcttcgggctgaaaagtatgcacctcaccttcctctgctgcctctataaagccgaggacggtatgacttcggcggagcttgccagagagtgcggcgtcgataaggctttcatttcccgcataacccacgagcttgaaaaactcggctatatcgactgcctgcaatcccaccccctcgagctgagatataagaaaaaactccgccttaccgagagagggcgcgatattatggctgccgtggacgaaatgatagacgacgcggtgacaaagctcacggacggcattcccgatgagaaaatcgacgacttttataaggtgctgtctctgctcgacggaagactgcggatactctgaataaaaaccacattaaatcagaggcttccgcgtgaactgggtttgagcaaataataagaaaataagctaaatcatacgatatattaaggaggacgccgcgcgggacttctcgttcggcaacacagatgaagaagcagtataaggttccgaatcataaaaagaccgagcatatatatacggttgtagaagatgttggggaatatctcgatgttcttgcggtgcacggcgacagagtaatgttcgcatggaagcatgacgatatcccgagcgagatgaagtactccgagttccacgacctgacggtttcctttgccctcggacttaaggaaaagctcacggaaaacggacaaaaagtggcgataatcggcgaaacctccccgttctgggtagcggcgtaccttgctgtcatagcgtcgggcaatgttgctgttcccatggacaaggagcttgaccccgaagaaatggcgaaattctttgccgccgccgacgtatgcgccgtggtttactcaaataccttcgcgaagattattcccgagataacatccggctcggagaaggtaaagctgctcattcccatgcacggctccggctacgaggcagacgagagaatcgtctcttacgacaatatcgtcgcgtccggcaaaaagagcacaaggttcttcactcccgacagcgacaacgagagaatggcggagattctgttcacttccggcacgacaggctcgtcaaagatggtaatgctcagccagaagaacgttttctccgtggtttcgagcgcgtgcgcaactgtggatttcaacgcagatgacgtgcttgtgtcatgtctcccgctccaccacacatacgagcttgcctgcaccctcgccgcgtgtgatttcggtgcgaagatatgcataaacgactccctgcgccacgttctgaagaattttaaggagtacagaccgacgggacttgtgcttgtgcctatgttcatctccacgatgtacaaaaagatactcagcgaggcaaagcgttccggcaaggacaagattttacctcctgccgcaagaatagcgcgctacctcaagctgtgcggaatcgacatgagcgacaagctgttctcggacgtaaaggaagcgttcggcggcagacttgagaagataatttccggcggcgcggagcttcccactgacatgatagcggtgttcgaggcgttcggcatctccatttacgagggctacggaatcacggaatgctctccccttgtggcggtaactccgtattacaagcgtaaagtcggctctgtaggacctcatgtgccgtgctgcaccgtaagaatagcgggaagcgaggtaggagaaagcggctacgtcacgggcgagattcaggtacagggagacaacgtaatgctcggctacatggaccctgtggcgaatgaagaggcgttcacgtccgacggatggttcaggacgggcgacatcggctacatggacgaggacggatacatttacatcacgggcagaatgaagtctgtgatagtgcttgagaacggcaagaacgtattcccggaggagatagaggaatacctcggaaagatagactacattgcggaatcggtagtgataggcaggcaggacggggactgcgtaagacttacggctctgatattcccgaactacgcgaagtatccggagatgagcgagaacgacctccgcacggagatacagaagcagattaccgcgctgaacaagcgtctgccgtcgttcaagcagatacacaagctggagttccgcaaggtggaatttgagaagacctcctcgaagaagatcaagcgtcatttgctgaaataattcgcccgcgcgaaatagagaaagagcgtcagctaatttctttaccttagactactttatccctttgggaaacgtagagtaaggaagaaagagcttgcgctctttgattttattgtatcgactgcggtcgaaggctgctcctacgcggagggcgcacttactatgtaagtgcggagtaccggcttccggttgagttaggcttagcaatgaactgctgtctccgcacacttgaaccgattagtcgcgcgctctcgcataaagcgtagtagtggagcttaaaatgttcgcgcgggagagtgagacgcggtgagtttggttgaattcggttgtactttgtcgcgcatagtcgagaataccaaatcaaagtgaattggattaggctaaccgcggtgagttgttagtttgtgcgcccacatagagcgaacgtccgatttcgttttgcttccgtaggagaaccgacgaacagtctatcaaatttcgaccaaataaacagacgcggtcattctaatgccactactaaggcttatgc

SEQ ID NO: 115 - DNA, 32759 bp, Unknown
  16S sequences of unknown bacteria
cacgccgtcatttctgattagagcctcgttcttccgagactttgtcaatactctggaaatttctttgccatttgggccgcgtggcgcgatttttcccaaatggaagaagtttttgcccaaatggcaggatgcgcttcaaaggggttgacggcgcagggcagggcgcgtataatagcgttatgattaaacgattgtttaattgttcaaatgatgtggaaatggtagagaggagctttcccatgaagaagacgtacaagattgaggtggactgcgccaattgcgccaatttgatggaggatgctgcccgcaagaccgctggcgtgcagagcgctaccgtgaactttatgacgcaaaagatgatcgtagaattcgccgagggcgaggacgctaccagcgtgatgaacgatgtggccaaagcttgcaagcgggtggaaccggattgcgagatttttctataagccttccggcgttacgggaatggatcctagggagcaactgcgagaggagaagggacgatgcaagcagggatcatcaatgcgctgctcgttgtggtggccgttcttgctgcggttttgcgtgccgtggggcaacgcgctaacagcgggatgacgaaaaagcaaaaaacgatgctgtggcgcattctggcggcgacggtgctgctgctggggttgcagattttgggtgcggcggcttttgaacggctggggagcgcgggtcgctgggtgcggctcatctgctatttggcggattatgccatcattggatacgacattctgcgaaaggcctataagggcattcgcaatgggcaggtttttgatgaaaactttttgatggcagtggctacactgggcgcgctggctctggcggtgtatgaaaacggagactatttggaagccattgcagtgatgttgttttaccaagtgggtgagtggtttcaaagctatgccgtgggcaagagccgccgcaacatcagcgacctaatggatattcgcccggactatgccaatgtcgagcacgaaggaaagttggtaaaggtcgagccggaagaagtgggcattggttctgtgatcgtggtgcagcccggcgaaaaggtgccgattgacgccattgtggtagaaggggcatccacattgaacaccgccgcactcaccggcgaatccctgcctagggaagtgcgggtgggaaacgagatcatcagcggctgcatcaatatgacgggtgtgctgaagctccagaccaccaaggaattcggggaatccaccgtttcgaaaattttggatctggtggaaaatgcctcttcccgcaagtcccaatccgagaactttatttcccgctttgccagaatctacacgccagcggtatgctatgccgccttggcgctggcaatcttgccgccgctggtgctcatgttgggcatggggcaagatcccgcgtgggaaacttggatttatcgggcgctcaccttcctggtggctagttgcccgtgcgcgttggtgattagcattccgctcagcttttttgccggcatcggcggggccagcaaggcgggtgtgttggtgaagggttccaattatctggaaaccttgtcccagaccaaaatcgtggtgttcgacaaaacgggtacgctgacgcgtggcgtgttcgaagtgaacggcatccatcacagcgagatagagaacgccaagctggtggagtatgcggcgctggccgaaagcgcttcatcccatcccattagcaagagcctgcaaaaggcctacggcaagcccatcgaccgcagccgcgtgaaagacattcaggagatcagcggcaacggcgtgatcgccaccgtggatggacggcaggtggctgcgggcaacggaaagctcatggaccatttgggcgtgccatacattccctgccacagcacgggcaccatcattcacattgccatagagggcaaatacatggggcacatcgtcatctccgatgttatcaaaccgcattcgaaagaaactattgcggcactaaagaccgcgggcgtgcacaagaccgtgatgctcacaggcgatgccaaaaaggtcgccgatcaggtcgccgaggcactggaattggacgatgtgtacagcgagcttttgcccgcggacaaagtggaaaaggtggaggatttgctcaggctcaagccggaaaaggccaagctggcctttgtgggggatggcatcaacgatgcaccggtgctgcgccgggcggacatcggcatcgccatgggcgctatgggttccgacgcggccatcgaagcggccgacgtggttttgatggacgatgacccgttaaagattgccaaggccatccgcatttcgcgcaagtgcctgcgcattgtataccaaaatatcacggtggcgattggcgtgaaattgctctgcctggcactggtggctctaggcttcgccaatatgtggctggcggtgtttgccgatgtgggcgtgatgatcctggcagtgctcaacgccgtccgtgcgctgttcacgaagaatctttagatccatagaatttgccggacgcggctcggaaaggagaagcgcccggcgttttgcgtccgtttttagccattcaaagcgatcagcacgatcatggcgtcctgagaataggcgatgcttagcgttgtattgcctttttggagcatcgcaccggcggaggcatcgttggcttccgaggcgatttccgcaaaaccggcggctttgagcgcggccacatattccgcagcatcctctatggataggttgcggaaggacagggcatagcgattcgaggcggaatagtcgtatgcgtagtcgatttctccgctttgcggcggaaaaatttgcgcggtaaaatcgttttctggccattgagaaacagcgatgggttccgcatcggccgcctgccaggccgcttcgcgcggtgaacaggcggatagaatggccagcacggcgaacagtagcgctagaatgctccatttgcgcacgttcattgctatacccccttatgcttgcgatggagacggcgcgccagaacaagccccgtcgcgaggaagcagaggcaggccagcgccaggaagagcgtgtgcggatcgatggcgggcccgcgcacctggattagcgtttgcgcgttcgcctggccaatggcgtttggcggcacggggttcaggcgcggcgcgattcccagcagcagcagcacgatgccagcgacaaggggcaagatgatggataggcaattgcgccatttctgtccacgcgcagggttggtaccgagctgttcctgaacgctgcgcgcgaactccgcagggctgcccagccgctcgatgacctgctgctctgtttcgccgtgttccaaggcgcaggcgaatgcttcgcgcaaatcgcgcgcaatagcctcttttttctttttgggcagggaaagctcttgttttacttgctggatgtaggtttccttcatggtgtttcctccctcaaagggcattatgcaaaaatccctcgacgcaggctgcgtatttttgccagaaatccgtgagctcgcgcagggtttcgcgtccgctttgtgtaatcgaatagtattttttgctcccgccgttggcggcggatggcgcgagacggctttggattagcccggattcctccaagcggtataagatggggtagaccgtgccttccctggcgtaccccaaaacagcggcgccgccctggttgagcttggcaatgatttcatagccataggtttctttttgcgcaatcagggcgagcaggatcatttccagcgcgcctttcttgaattgctgcacatagcggttgttcatggcgttctctccaatatagcgttgctaattagcaatactaaatagcgaggccattataccatgcgcgcgagcgactgtcaagcccttttgcacggtgcacagtggaaaatgatatgcagccaagacgtggaaaaggctgtgcttatgacggaaaagcatgcaattttacttgctatattgataataaaagtggtttattatatactatatgaagaggagattgtatacaacggcatagcaaatggggaatgcacaatgccaaaagaaaaatctgtatttgggatgggaagcgtgctcttgaaatgggcgtgctcttacttgctcgttttgctgattccgctggcgacgtttgtcgtgggcatgcggctggcgacttccacggtgcggcaggagatttcccgcgccaatgcggtgatgctggaaaatgtgcgcgaagcgatcgattcggatttgcaaaccatcgagagcgcgtttcaattcgctttcgccaatttgccgacggtttctctgaatttggcggaaagcaaagatgcgtcgcgcaattatgtggtgtatgatttggtgaaggcgctggacaaatattccggggccaatggcaatgtgaagttcacgctgtattttgcggacacggattttttggtttccaccagcacggccaacgatgtgcaaactctgtactatgtgcaaaagatggcggggctgcaggaagacgtggaggcgtggcgggcgcggttggcaggtagctacgcaaacgattatgcgtttctttccggcatggtgatcggcgaagtggaaaacagcatgacgttttgtcacacggtgcagcggcagccgggcaaggtgaacatctttatttccctgccggatgggctataccgcaacttgctgcaaaatgaggaaacgcgcgggctgtttatcgtggatgccgcgggcaatgtcgtgcagcggctgaacggtccctatgatttgcaaagcgtcaatctggcgctcgcgccggacgtgagcctgcgcgtggggcaagatcgctgcgtgcaaagcgccattccttcacagtacgcggattggtattacgtaacgctcacgccggagggagattattggcagagcatccagcgcgtgaccaccgccatggccgttacctgcgcgatttcgctcgccatcgggttggtgttggccgcgcaattggtcaagcgcaattaccgccctttgggcgcgttaaccctgcagctgggcggccggatcaatcgcaagcagaacgaattccaggcgatcgcggaatattgccacaacgtgagcgtggaaaaccaaaacatgcaccgggaaatcgacgcttacgccgcgcaattgcgggaacgggcgttgctcaatcgcttaaagggccggcaaatgctgctttccgataaagatgtggacgcgcactatgcgctcggcgaggcgggagagagttatgtgctggtcgtgttcgcgctggcgcgcgtttcggaagaggaactttcgcgctatcgcgatagcttggaatatggcgaagcgctgttccacgccattggtagcagctttgcgggcaggatgcaggggtattcctacgagcaaatggaagatggctatatgctcttgtatttgctgcggttgacgggcggacaggtggcaaagtggcgggaagaagggcgggcgttgctcacgcaggtggatgccttcatccaaaagagaatttcttccaaggtgacggtggcggtcagcggcgtggcaagtggctttggcgatatccacattttgtataacagcgtgatggacgctttggaataccgctcgattgcgggcgggcaggaacagggcgtggtgttcgcggaggaatgcgcggaattggttggcggaagcatgggctttcagaacgatgaaacgttccgcgaaatggagcgcgcggtgtgcgaaggcgacataaagcgttgtgaagaattgatgggacggctaggctgcccggaaggcgacgcgctgcaattcgcggttttccgcctttccatgatgaatggcgtgaaactcgtgatgcgcgcgtttttccagcgcgtgcaggacgcgcaactgcgctatcgctttacgcaatggatggaggcctgcctggaggcgcagcagaaggaggaactgcaggaaagcttcctgtggcttttgcgctttgcctgccagaacatcggcggcccaagcgctccgccggagcgggatcccctggcagagcgcgtgcggaaactggtgcagcagcgatatgacgatcccaacctgaacatcagcgccattgccgaagcgctgggcaaaaatgccaactatctgtcgcaggccttcagcaagagcgcgggcgaaagcctgatggattacatccgcggggtgcgtgtggcgcgcgcgatggacctattggccagcaccaacctgaccatcgagcagatttcggaaaaaacgggctttggcagcgtgcgcacgttccgccgggcgttcgtgcaggtcacaggcatgcaacccaatgcctaccggcagcggcacgctttggggcaggaatttgtcccttagggagaattttgtccccttcgcgggacaaaacaggacttttgaccggcaatctcatattttggctctttacagaaagggcggccacctgctattctggaagcaagaaaagcggcggccgcgcttttttatcatggaagggagaattggtatgaaaaagattgcctcattgctggtatgcttgctggtgttgttttctggcgtagtatcggcctgcgcggaggagatcgtctatcccatggaagaggggattacgctgtcttatgctgcgccggaaaatgtgcatgttttggctttatccacggactgggccgatacgccttttgtgcaggcgtggcaggaacaaacaggcgtaaccctagaagtctcgtattatacggatttttccctgttggtggcctcgggagattatcctgatatcctttcaggttcatggaatacctattctggcggtattgaccgcgccattgaagatggaatcatcgttcctatcaacgactatgttgaggaatacgcgccggattatttggcggcgctggaaagcaatccggattatatgaagaacgcgcgcaccgcgcagggctacatcccaggattttatcagctccgttccgatcccgctctgaattcttatggcgcgattgtgcgcaaggactggctggacacgctggggatggaagtgcccaccacgctggatgaattctacaacatgctggtggctttccgcgatgaaatgggcgctaccgcgccgctgagcgtggacgtcggcacgttgcggaacctttgtgtgtatgggatctttacctcgccttttaatctagtcagctcaggatactatcatgtggacgggactgtgcattatggtgcggcagaagcagaattcaaggatgtgctggcctggctaaaccagcttttcaatgaagggttgctggacgccaatgtgctgacggtggactctacgacgctggcttccaacatcatgaacggcgtttccggcgtggccgccggttacgcgagcggttccatgggcaattggctcaccacgatgaagaatgtggatccggaatttgccctggcgggcatgggctcgctggtgcgcaacgaaggcgagcgcgccatgtttggacagcggcaggatcgggtttctcaattgacggctatcactacggcgtgtgaggacgtggaagcagctgtgcaattcttgaattatggctatacggaagcgggcaatttgctgatgtactatggcattgagggcatcagctatgaaatggtcgacggttacccctatttcacggattttgtgaagaacaatcccgatgggattccgtttgcgcagattctctcgcaatacgactattctcccgccaatggccccttcctcgccaacggcgattattcccttcagacgtataacgaggcgcaactggcagcgctggcagcctggcaagacaacgatgtgaacgagcattacgtctccggcaccattaccgtagcgcccgaggacacggacgaatacgcctttatcaagagcgaagtggatacctatgtcaacgagaattttgctctctttgtaacgggcgcgcgctccctggaggaattcgacgattacctggctacgctcgaatccatgggcctttcccggatgctggaaatttatcaggcggcgtttgataccttcaacgcataaaccaccaaggcgcgtagcggcgcggctccgggcatccggagccgcccgcaaatttcgcgggaaaggatgtgccgaaatggtaagggactatcgccgcatggattcgtttggcagtcgcctggcgcgggatctggtgaaaaactatgggctatatttgctgctcgtgccggcgattctgttttacaccttattttgctataagcccctctatggcgcgattatcgccttcaagagatatgtgcccacgaaaggcattatcgcaagcccttgggtgggactaacccattttgaggcattttttggctcatattatttttggcggctgttacgcaacacgctcaccatcagcctgtcatcattggtgattggctttccggcgcccattattttcgcgctgctgctcaatgagctgcgcagcgaacgcttcaaaaaaatcgtgcagaccgtgacctatctgccgcatttcatctccatggtggtcatgtgcggcctgatccggctgtttacgcaggatactggggttgtggtacaggcgctatcgctgtttggctttgagccggtttcgctgctttcgcgcgcggaatactttgtgccggtatacgtgctttccggcgtgtggcaggggatcggctggggatcgatcatctatctttccgcgctcacgggcatcgatccggagctgtacgaggcggcgaccatcgatggcgccaaccgctggcggcaaacgctgcatgtgaccttgcctggcatcgcgccgaccatcatcatcatgctgcttttgcgcatgggcagcgtgatgaacgtgggctatgaaaaaatcattttgctgtataacgagggcatttatgaaaccgcggatgtcatctccacgtttgtgtatcgcaagggcctggaacaggcgcagtggagctatagcgccgcagtgggactctttaattccgtggtcaattttgtcattatcgtgctgatgaatcggtttagccgcgcgattaccgatgtcagcctttggtaaggaggtgccgcatgagggggcgttctctatcgggcaggattttttccggctgcaatggcctgtttatgctgctgatgatctttatcacggcatatcctctgtattattgtttgattgcttctttttcggatccgattcagctggcgctgaatccgggggcgctgtttttgcccctaaaaccctttacgctgagcgcctatcagaaggtgctggagcattctttgtttttgagcggcgtgcgcaacacgctgttcgtgctgtgcgtgggcactttgctgaacatggcactcaccatcctcaccggctacgcgctctcacgcaagggggcgatgctgatcgtgcccatcacgttctatatcgtgttcaccatgtatttttccggcgggctgattcccggctatctgaacgtgaaagacctggggttgatcaattccctttggtcgctgatccttccaggcgccatcagcacatacaatctgatcatcatgaagacggccttcgcttcggtgccagacgcactgccggaatccgcgcagatcgatggcgcgcgccatttgaccattctggcacgcatcatggtgccgctttccgcgcccactatcgccgtactggtgctgtattatgctgtggggcattggaacgcctggtttagcgcctcgatctatttgcaggattccaccctgcatcctttgcaactggtgatgcgcaatatcctcaattccgccgacgtttcggaaatgttgggcgatgtgggcggcgaggaccaggcgcgctatgtggaactgatcaaatacgcgctgattatggtttccaccgtgcccattttggtgttgtatccatttttgcaaaagtatttcgtgaagggcgttatgatcggcgcgattaaaggatagggcaagcggaaggagagaattttatgaacgaaaaagtgctcattttgggcgcgacaggaaccatggggcattatctcaccgaaaaattggcggcggacggttgccaggtggacgcggtttcgctggatagcatagcctcttctcggcccaacctgcgctatatccaggtgaaaaacgccaaagatcccgcctttgtggcagaaatcacgcaaaattcctacgatgccatcgtggattttttgatctacgataccatttctttccgagaaatgtttccccactatctcaagtgcacggggcaatatgtgtatttgtcctcctgccgcgtgtttgccaacgaagaaaatcccatccgggaaacttcgccccgcctgctggacgtttccaccgaccgacgctatctcttttcggatgattacagcctgcacaaggcgcgcggggaaaacgcgcttcgcgccagcagaacccgcaattggaccattgtccgcccctccactacgtatgggcgcaaaacttgccagctactcaccctgggccgggcgcaactgttgccccgcatgcgttcgggcgagccggtgaagctgtatgaggcggcgaaggatatccccgcttcgctcacctggggcggcgacgtggcggagatgatccgcaggctgttatttcaatcccaagcgttgggcgaggactacaatgtgacctcttcggccagccacacctggggagaaatcgctgaaatttatcgtgaaatctttggcctgcggtacgagtgggtggatgaattggcgtatcagcgcttccgcgacccggcgttcgacccggaaaacagcgtcggcctgatatggcaactgcgctatgcacgcatgttcaaccgcgcctacgacaacagcaagatgctgcgcgccacgggcctaaaacagcaggatttcctcaccctctatcagggcctgagccgggaaaagccctatattttggaggactaatgctatgcgaaaaattcgaattggacaactgggcatcggtcacaaccatggagcgggcaaaatgcaggcgtttcgcaagtttccggaacgcttcgaggtagtaggctacgcggaagaggacgcaatctggcgggatttgcggggcggctggccttgctacagcgatttgccgcgcatgagccccagcgagcttctggaaaaatgcgacgcggtggcggtggagtgcgcggtgccggatcttacccgctgcgcccgcctctgtgtagacgcgggcaagcatatccacctggacaagcccggcagtggcacgctggaggaatttggcaccatgctggagagcgcgcaggcaaaacggctggtggtgcagatgggctatatgtaccgctataaccctgccgtgcggcaactcctggcctggattcacgagggcaaattgggggaaatctattccatcaacgcggaaatgagcacgtatcacagcgtggaatacaagcgctggctatccacatttcgcggcggcatccagtatattttggggagccatctcgtggatttgatcgtgtatctgctgggcgagccgcaacgtatcaccagctttttgaaacatacgcatttcgagggtgtggacgtggcggacaacaacctttccgtactggaatacgaaaaggcgctggcacggattttcgtgagttccgtcgaggtcaacggctggggcaggcggcaattcgtcgtttccggcagccggggcacggtgagcattatgcccatggaaaatcccattgtgatgacttacgcagattgcgcgctgacggatcgcccctatgaggacgtaaaggaatgcatttccatcccggatgtgcccaaggattgccgctatgacgatatggttttggatttttatgattatatcacgggcgcgaaacaaaatccgttttcgtatgcgcacgatttcttggtgcaaaaagtgctgtgcgaaatggtggccggggattgcgtacatgccggacaggcgaatgggtatagcccagtaagcggcgatgcacggcgcgcctgaaagcgaggaagcatggaaaaccgcaaaatattgtttaccgctccgggaaaggcggaactggtttcctgcgaaatgccccggattgcgccggatgaagtcctcattgaaacggattatacggccatcagcgcgggcacggagcgggccaatctgctggatatgcccaatgtgacgcaccagtggcccaaacaactgggctacagcggcagcggccgcatcgtggaagtggggacaactgtgaagaatttccgcgtggggcaacgcgtgttgatggatcatctcggccattgcgcttacgcgaaagcgcggttccaagtcaatggcgatgggttttatcccgtccccgaggatgtggatccgctggaagcggcgtttgtggtcgttggcagcatgggcgtgcagggcgcgcgcaagacgcggctgcagatgggagaggcggctatggtcacggggctgggcattttgggcctgtttgccgtgcagagcatggtccgcatgggtgcgacgcctttgatcgccgtggactttgcggaggaccgccgtcgcgttgcgctggagctgggcgcggactacgcgcttgcgccggacgcgcattttgtggaagcggtgcgggaactcaccgagggccgcatgattcaggccaatgtggaggttacgggctcttcggcggcgcttttacagagtttgcaggttgccgcccggggcgggcgcatcgccttggcagggtgtacgcgcgtttcggatgtgcccatcgacttttatactctggtgcacaagcccggcgtgcaactcatcggcgcgcacaaccatgtgcggcctgccgcggattcctattggggatattggacgcggcacgacgatttcgcggccatgctgcgcatgatgcgcatgggcaaaatgcgcgttcggcccatgatttccggcgtgttcgcgccagagcaagcgccagaggtctttcgggaactgggcgaaaatgcttacgtgcctctgggccgggcgtttgattggcacaaatcagacgggagggaaaccatatgaaggcaatgctggtggatgaggcgcaaaggttggtttggagcgatgtggccgacccagtagttggcgatggagaagtattgatcgaaatccactgcgcggcgctcaaccgcgcggatctgctgcagcggcagggcaaatatcccagcccgccgggatgcccgccctggatggggctggaagtttccggcgtcgtagtggccacgggcaaaggggcaaagcgttggcgcatgggcgatcgggtatgcgcgctcctgggcgggggcggatacgcgcaatatgtggccgcgccggaagccatggtgatgcccatccccgctggcctggggttcgcggaggcggcaagcctgccagaagcttatgccacatgctatttgaacctgtttcacgaggggcaattccagccgggcgaaacgctctttttcccggcgggagccagcgggctggcgagcgtgggcattcccatggcgaaggcgttcggcgcgtacgtgattaccagcgtgttgacggcggacttgtgcgcgcgcatcgcgcatctcggcgcagacagaattgtcgatctgtcccgcgaaaatacggcggatgtgattcgcgcggaggccgaagcgggacatccggtggatgtcgccatcgattgcctggcgggggaaaccattggccaatgctttccctatgtgaacgagggctgccgctgggtgctgatcagcacgctggcaggcgtgaccacgacggtgccgctgcgcgccttgctcaccaagggcatcatctttaagggcagcatgctgcgcaagcgctcggtggcggaaaagggcgcgctgctggaagaattggtgcaaaaggtgtggcccaagctggaaagcggcgcaatccggcccacgatttatcgcgtgctccccatagagtgtgtgcaagaggcccatgccatcttggaaagaggggaaaatgtgggcaaagtggtgctgcaggttcgcccgtaaagcaaaaaggcccctcgcggctctaagtcgcgggggccttccttcctgccggaattaagcggccaggaagtccttcagatcgtttacgagattatcgttcacatgatcgcaaaccagctcgacgggctgattcagatccatagaaatgatgccgaggatcgactttgcatccaccacatagcggccatgcaccagagccatgtcctcgctgtactgcgacgtgatatcgacaaaccgcttcacttcattcatgtccttgagcttcaaagtcagcttcatgctgtttacctcctaatcctctatttccacggcggagggcaatgccctgctttcgccgactgcgatattgtaccacgctttgttgttcttccagtattgggcgagttataagtgcgatggagttttgtaaaaccggattttacctcaaattttccgagctaagagcgaggaatgctttttaaatcaaagtaaaatataatatatcacacgatgaatcatagaatgcacgcgttctatgtggaaatcgtcaatagagacgttgggatttgcgagattaaaataagattattacagaataacatttaacgataagttttttctgcatgttaaggcgcagtgggagagaaggagagggagaaaaggaagttttttaagtttgagctatggttttaacgaaacgtgcgtcgtaaggcagcaaaaaggcctttgggccgccgccagaaatgctggttggctgcccaaaagcccaggaaaaagggacggaaacgcgccaatgcgacgcgagtagtccctttttcgcggattttatgcctaagcaatgccgctttttggcggcgcgcaagtttgtccctttgcttctttcaggtacgcgttagctttcggccacgatttttgtgccggaactggtgccaatgcgggtggcgcccgccgagatcagttcgagcgcgctttcgcgcgtgcgtatgccgccagaggctttaacgcccatctcggggcccacggtttcgcgcatcagccgaatgtcgtgggcgttggccgcgccgccggaaaagcccgtgcaggttttcacaaagctcgcgcccgcttccttggcgaggcggcaagccgtgcgcttttcctcatcggtcaaaaggccggtttcgatgatgaccttgacgacgtggccagccccagcgcgcaccacgccttcgatatcgtgcttcacgagggccaggtcgcccgatttgagcgcgcccacgttgatcaccatgtccagctcctgcgcgccatcgcggacggcgacttccgcttcgaaggccttcacttcgggtgcgttcgcgccgagcgggaagccaattaccgtgcagacgcgcacgcccgttccagagagcagcgcggccagccgctttacgtggatggggttggcgcacacggatgcaaagcggtgcgcaatggcttccttggcgacggtttcgatttgcgcgtaggtggcgtcgggcttcaagagcgtatggtcaatgtaagaattcagttccatattgcgatcacctccatgcagtattgtacacggatggaaagaatatttcaaggggattttgcaaagcgcttgaaatgacacagtttttccggtatgatgatagaagagaaaggggggaacgcagatgaagaagatgtggatggcagtggttttgctgcttgcaatgcttgtaccactggcgcaagcggagcaggcgccggaagaacgggtgacggagattgccgcgcgaaccgcatatatcttggattacgactgggagcgcctgcccgattggagcgcccgggaatatctggaagcgccgggaacggtggcgacgctatattgtgagtccacttcggccgatgcgttgatttccctcgtgccgcgcgattctgccgcgaacgcgtcggattatctcttgcagcgcacaatgaacagcatggatgttatggtggtgcgcgaaacggtgggcccagaactgtggcaagcgccgtggggcgaggcgggcgcggccatgacgcaggtattcgcctatgtgagcggctcttataccagcgatttttattgtgaaaaatcgtatgtggcgcaactcaacgatgaatatttcctggtgacaaccgtgacggccagcgaagaagaggcggaaggtgcaatagaagaatttgaaagcgcgtttttcaccgacgcgctgcgcgtgagccccgtttcgattacggggcaagggtacgcctatttgcacgccgcgcaagcgaacgatggcgcattggaactttctttggatacgtttatcgtagaagaaggcgatgaaaccagcgaaatggtgatctataacaacgatccgtcgctcgccaccttcgcggtttccgcggacgccaacatttggctcatgccgcagggtgcgccgttcacttgggaatgcgtgccgcaggacgcggaactgctctccacgcacatctccgattatgttttggccaatggttcctatccgccttttttgctgtactattgtggggaacaaatcgtttggatggaacagcagggcgctatgattctcccgctcacatgatggcatacccctgtaaaaacagaaacgtataaagggcaaagagcagtgcgctggcggcgagcaaaagctgtccagcgcgcgcgcttttgatgtccgccgcgatgaggaacagcggaacgcagcccagcatatagcgcccgccgctgatcatccagccggaaaaataggtgaagatcaggtatgccgcgccatatacgagatagcaggtgcgcgtgccgcgccacaagccatagaacagggccgcagcggtgagaaaatacagtgcgatttgcgcgccatagatgatgaaggcaaggcctggataggcctgcgccatgtcgaaatgttgggcgagattttctgaaacccatttcgtggtttgataccagggcggcgcggcctggtgctccagaaagcggaaaaagctcccctgcagcacgcggttgagcagcagataggcgccaaaacccagtgggatgagaaaaacaaaccatccgcgccgcgatttgcgcgacacgatccattcatagagcgcaggcgcgagcagcagcatgccctgcgtgcgcgtgaatgccgcgagaaagccgaatatgccggcggagagatagcgccgctcgcgaatggcggagagggtgagcagcgtgagcagcaaaaagaggccttcggtgaacacacccatggtgaacacgcaaaaagggtataacaccatcagcagcgtgcccagccaggcggcacgcgcgctgtgatccttttcgattaggcggaaaagcaccacgctggccgcggaaaaggatacctgcgatatgaggatgccggaaatggcggcattgccggtgacgaaggacaaaaggcgcatcaaaaggggatacagcggatagaacacaatgaggttggcctgctcccccgtggcctgatagccttcggtggcgagaaacaaatagtgcggcgcatcgcccgctgtggtgaaacgcgtttccagcatggcgaacagcgttcccgtaccgggaacggtggcgcgcatcacacaatacgcggcgatcacggccagccagtgcaggcccagcgccgcaagcgcgactttccaatcgatttttctcatagacacacaaagagggcgaacgcgccgagcaatatgcaggcgggcgttagccagggcacagaaaggccgggcacggcgaggccgcgtccgcgaaacatccagtaggccagcgcgcttgcggcgcaaaacgccaacgctaccgccgggaccgtatatagatagaaggcaaatggcagccataccacgcgccacgcgccgcggaacgccccatccagcaacagcgcgcccgcgatgcaggcggcaaagcaaaggtacatggcaaagtcgttcagcccccacacggcggcaatgtcccacgcgctgccgccgctgcgaaaaaagtggtggtaaaggccacccaccgtcatccagcacaggcccgcgcaaagcacgcacagcgctgtgcgcaggccttggcgcacggcggcgcggtctttcagccagcccatttcacaaaaaaagcgcacgccaagcgcagccaccagcgcgacagccacaaagccgcccatctcgccaatccattttcccatacaagcctctttagcgcaattgatcccttcttccttaattataccacagcgcggctggtttgacaaccgcgccaatgccgcaaacggaaacaagggaagaaagccatttttcggcgcgtcgaagctttttcccttgtattcctaggtttaaaatggtataatggaagcaacacaataggagggataagacatgattcgacaagcggcgttcacgggcaatgcccggttactcaagggcggtctgcattgccacaccacgcgttcggacggcaggggcacgccggaggaagtcatccggctgcacgcggaacatggctatgattttttggccattacggatcaccggaaatacaattatcgcaattttgcaccggaaacgggtatcacgatccttcctggcatggaaatggaccgcaacttgcgcagcgaatatgggtatcgttgcttccacacggtgtgcattggcccggaaaaaggacagggcaacgcgtatgagcaggaccaagtgtttgaatccggatttgtgaaggatcagtatgaatatcaggcggtgctggatgagattcacgcggccggcaacctgacgatttattgccatccggattggagcggcacgcccgcgcatacctttgcggaaatgaagggcaacttcgccatggagatctggaacacggggtgcgtggtggaaaacgagatggacgtggataacggtctctattgggatgaattgctcatgcgcggcgtgaaaatttatgccgtcgccaccgacgatgggcattccatgtaccagcactgcaagggctgggtttgcgtgaatgcgcaaaacaacgtggcggccattttggaggcactgaaaaacggtgcgttttattcttctactggaccggaaatccgcgattttgccatagaagatggcgtggcgcgcgtggcttgctcgccctgcgcgcacattgatttcctgtatggcggcttccccagccgcgtagtccggggcgatggcattgagacggccgaatgcaaagtgccggaaggcacgcgctatttgcgcgcccgtgtggtggacgcgcagggccagcgcgcctggacgaatcccattttcctggcggaataaaaattggcgggcatttgagccgccgcgtgttttcgcggcggcttttgcgtgcgtgcttgattttttacgcaatattgggtattctataagcaatgtagggatcgattggcaggaggatattatggcagaaaatcaggcggcaatccgcaatttttgcatcatcgcacacattgaccacggcaagagcacgctggcggatcggctgcttgagaaaacgggcgtgatggcgcagcgggacatgacggaacaggtgctcgattccatggaactcgaacgcgagcgtggtattacgatcaagtccaaagccgtgcgactgccttatcgcgcgcgggatgggaaggaatatatcttcaatttgatcgatacgccaggtcatgtggactttacgtatgaagtttcgcgcgcgctggcggcctgcgagggcgcgctattggtggtggacgccagccagggcattgaggcgcaaacgctggccaacgtttacatggcgctggatcatgatctggaaatcatccctgtgatcaacaaaatcgatctgcccagcgcgcagccggatgtggtctgcaaggagattgaggatgaaatcggcctggacacggagggcgcgccccgggtttcggccaagcagggcatcggcattgaggacgtgttggaagctgtggcggatcgcgtgccgccgccgcgtggggacgcggacgcgcccctgcaggcgctgattttcgattcgtattatgacaattatcgcggcgcgatcagctccgttcgcctgatgaatgggcgcgtgcgcgtgggcgacaccatccgcatgatggccagcggccgcgaatttgaagtcacggaatgcggcgcgttcctgccgggttcctatttgcccatggaggagcttgtggcgggcgatgtgggctacatcgccgcttccatcaaggatattgccgacattcacgtgggcgacaccatcaccctgcgggacgcgccggcggacaaggccctgccgggctacaaaaaagtgcttcccatggtgtattgcggcatctatccggcggatggcgcggattacgaagacctgcgcagcgcgctggaaaaattgcgcctcaacgatgcggcgctctcttttgaacccgaaacttccgtggcgttgggctatggtttccgctgcggcttcctgggccttttgcacatggagatcatccaggaacggctggagcgcgaattcgatctcgatttggtcaccaccgcgccgagcgtggtttatcacgtaatcaagaccgacggagaaaaggtgaccatcgacaatcccacaaatctgcctccagccacggaaatcgcctatatggaagagccgatggtggccgcgcaggtgatcacgccgcaggagtatgtgggcgcgatcatggaactgtgccaggataagcgcggcacgttcaaagacatgaagtatatcgagggcaaccgcgtgctgttgacctacgacttgccgctgaacgaagtgatctacgatttctttgaccagctcaagagccgcacgcgcgggtacgcttcgttcgactacgaactgaacggctatgtgaagagcgatttggtgaaactggaaatccttctgaacggggagcagtgcgacgcgctcgccatcatcgtgcatcgcgaccgcgcttacgctcggggccgttccattgccgaaaaattgaaggaagtcattccgcgccagctgtttgaaatccccatccaggcagcggtgggtggccgcgtgatcgcgcgcgaaacggtcaaagccctgcgcaaggacgtgctcgccaagtgctatggcggcgatatcacgcgcaaaaagaagctgctggaaaaacagaaggaaggcaaaaagcgcatgcgccaggtgggcacggtcgaggtgcccagcgaggcgtttatggcggttttgaagatggattgacgggcttcggatggatagaaaaggacttggagcatgagcggcgtatacattcacattccgttttgcgcgcgcaagtgcgcgtattgcgattttgcctcctggccggggcggcaggcggattggcggcggtatgtgcgcgccgtggaagaagaaattcgcgcggtgggcggcgggccggctgaaacggtgtttttcggcggaggcacgccgtcccttttgccggcggaatggctgtgcgggctgctggacgccgtgcgggaaacctttgccttggcggcggatgcggaaatcacgttggaggccaatcctggcacgatttcgccggattcgctcgcgttttaccggcgggcaggcgtgaaccgcatatcttttggagcgcagtcggccaacgacgcgcttctgcgtgccattggccgcattcatacctgggcgcaggtggaagaggccgtgcgcatggcgcaggacgcgggcctggagaacatcaacctcgatttgatgtatggcttgccgggacaaacagtgcaggacgtggaaaccgcgctcctgcgcgcaatggcgctgggcgtaaggcacatttcctgctataatttgatcgtcgagccgggcacgccgctggcgcgcggcgtggaacgcggggaaatccgcctgccggaggaggatgcgcaggccgaaatgcagcgcgcagtatgcgacacgctgcgcaagggcggctttgagcgctatgagatttccaattatgcactgcccggctgggaatgccgccacaacatcaactattggctgcgcagggactattttggctttggctgcgcggcgcattcgctggtggctggcgtgcgctacgcaaatccggattcgctggatgagtatctgcggggggcacggcaaacgtatagggaaacgctgacagaagcggatgtgcggctggaaaccgttatgctgggcacgcgcacgcgctggggcgcggacatttcttatatgaaggcggatgcattggagccactggtgcgctcagggtttgcgcggatttgcgcgggcaagttggtgctcaccgatgcgggctgggaagtgcataacgccattttgcggcaaattcttttgtaataaaaatttaacatgaattccgaggcggagctattgacaaaatacgggtgaagtgatactcttatgcccagaggttagcactcgacgggcgagagtgctaacaggagccaggaggtgagaatgtgcaactggacgaacggaaattcatgatcctgaaagcgattatcgacgactatgtccttacaggcatgccggttggttcgcgcacgatctcccgcaaatccggcgtgggcttttccccggccaccatccgcaacgagatgagcgacctggaggaactggggtatctggatcagccgcatacttcggctggccgcgtgccttcccataaggcgtatcgcctgtatgtcgaccggcttttgcaggtgggcaatctctcgcccgaagaaacgaagaagattcaggcgcacttgcgggagcgcacttcgcaggtgcaggaagtgattcgctcagcggcgcaggtgctttcagacgcgacgcattatacttcggtaatcgtagcgccgcaagcgcaggcgctgcgcatccgccgggtgcaactggtgcccatcacggagaacacggcgctgctcgtgatcgtaacgaacgcgggcatcgtgaaggacgcggtggtgcgggtgccgggtgagctttctgccgagcatctgcacgcaatttccaatttgttgaccgatcagttggccgaccggccgattgaccaggtgcggcaacggttccgcgtgctgatccatcagcttggcgagcaccgcaggctgctggccaacgtgatgaacgtgatggaaaccagcattgtggagccgagcgaaagcgacgtggtcgtgggcggcagcgcgaaccttttgagctatccggaatattcggatatcgaaaaggcgcgcaacttcttggccgtgctcgattccaaggaaacgctcgcgcgcctgctgggttcgcgcggcggcgtggaattcaccatccgcatcggcagcgaaaacgaagcgccggaattccaggattgctcggtcgtgactgcaacctaccacattggttcgggcacgagcggcacgctgggcatcatcggccctacgcgcatggattatcagcgcgtgatcgctgtgatgaaaacgctgaaatacgcgatgaacgagcttttgtctggggaataaagccctcataattttaaggaagtgattgaaatgagcagcaagaaaaaggctgaggaaaccacctctcagcagccggtgaacgagcagacgcaggagcaggcggcgcccaatcagcccgagcaggaagctgccaaggaagcgccgaaggacgattgcgcggcaaagctgaacgaagcggcgcgcaaattggccgaggcggagagcaagcgggatgaatatctggattcccttcggcggtcgcaggccgatttcataaattacaagcgccacaatgagcgcgcccgcagcgacggttatgaggaaggcaaccgcgaggccatcgcggcggtgcttccagtgatcgacaatttggagcgcgccatcgcggcggcggaaaaggcgcaggagaccggcgcgctggtcgatggcgtgcgcatgacctataaggccatgatggaagcgctttcgcggcgcgggctggaagaaattcccgcgcagggcgttgcctttgatcccgaattgcaccacgcggtcgcgcgggaagagggcgagggcgaacccggaacgattctggaagtttaccagaagggctatcgcgtgaaagataaaattgttcgctacgcgatggtcaaggttttaagcgaataagagaatttggaggataaaatcatgagcaagattatcggtattgacttgggtactaccaatagctgtgtggccgtcatggaaggcggcgaacccgtcgtaatccccaacgcggaaggcaaccgcaccacggcttccgtggtggctttcgccaagaatggcgagcgcctggtgggccaggtggcaaagcgccaggccgttatgaattctgaccgcactgtgatctccatcaagcgcgagatgggttcttcctaccgcgtgaagatcgacgataaggaatacaccccgcaggaaatcagcgccatgattctgcaaaagctgaaggcggacgctgaaagctacttgggcgatacggttacgcaggccgtcatcactgtgcccgcctacttctcggacgcgcagcgccaggcgacgaaggacgccggccgcatcgcgggcttggaagtgctgcgcatcatcaacgaaccgacggcagcggcgctggcctatggcttggataaggatgaatcgcacaagatcctggtgtacgacctgggcggcggtacgttcgatgtttcgctgctggaagtgggcgacggcgtgtttgaagtgctggccaccgcgggcaacaaccgcctgggcggcgacgacttcgacaaccgcatcatcgactacgtggcgaacgagttccagcgcgagaacaacatcgacctgcgcaaggataagcaggcgttgcagcgcctgaaggacgccgccgagaaggccaagatcgagctttccggcgtgatgaccgcgaacatcaacctgccgttcatcaccgcggacgcgactggccccaagcatctggacgtgaccctcacccgcgcgaagttcaacgagctgaccgctgacctcgtcgaaaagacgattgggccgctcaaccaggcgctcaaggacgcgggcctcacggcttcgcaggtggataaggtcatcctcgtgggtggttccacgcgcattcccgccgtgcaggaagcggtgcagcgcatcacgggcaaggaaccgtataagggcatcaaccccgatgagtgcgtggccatcggcgcggccatccaggccggtatcctgggcggcgaagtgaaggacgtcgtgctgctggacgtgacgccgctgtccctgggcatcgaaaccatgggcggcgtgttcacccgcctgatcgaccgcaacaccaccatcccggtgcgcaagcagcagatcttctccaccgcggcggatgggcagacggcggttgacgtgcacgtgctgcagggcgagcgcgagatggccgcttacaacaagacgctgggccgcttccagttgacgggcattgctcccgcgccgcgcggcgtgccgcaaatcgaagtgacgttcgatatcgacgccaatggcatcgtgcacgtatccgccaaggatctgggcacgggcaacgagcagaagatcaccatcacggcttccacgaacctgtccgaagaggaaatcaagaaggccgtggacgacgccgcgaagtacgccaacgaggataaaaagcgcaaggaagaagtggaaaccttcaaccaggcggatcagctgatctactccactgagaagaccttgaaggaactgggcgataagctcaccgacgcggacaaagccaaggtgaacgacgaactggagcgcttcaagaagacccgcgaaggcaacaacgccgaggaaatcaagaaggccatggaaagcttcacgcaggagacctacgcaatcttcggcaaggtttatcagcagcagcaaggcaacggcggcgaccagaaccagcagggcggcccgcaggcgggcggcacgtcggatgatggcaccgtggagagcagctttacggaataaggcacagggcgcaattccggcgcgaaaggcgctgggaaacgcggctgggcggcgctattcgccgcccctcgccgcaatgatttcgctctgggcgtgaaatcaatgagcagggatcgccggaacatgcgcgcaacagggcatattccggcatctgtgcgttcagatagaggtgagccaattggcgaaacgggattattacgaagtgttgggcgtggatcgctccgtggacgaagccgccttgaaaaaggcgtaccgccagctagcgaaaaagtaccaccccgacgtgaacccgggcgataaagaggccgaagccaagtttaaggaaatcaacgaggcgtatgaggtgctgtccgatccccaaaagcgcgcggcgtacgaccgctatgggcacgagggcgtgaacggcggcgctggcccggctggcggcggggcatataccagcgatttcggcggttttggcggcttcggtttcgaagatattctcaattccttctttggcggcggcatgggcggcggcgccgctggcggcagccggtacaatggcccggttcgtggcgacgatattcgctatgaagtgcgcctgagctttgaggaagccgccaagggctgtgaaaaggaaatcaatctggtgcgggatgaaacctgcgaaacctgccacggcacgggcgcgaagccgggcactagcccgcagacctgccaaacttgccatggcacgggccaggttcgcgtgacgacgaacacggccttcggccggattcaaaacgtgcgcacgtgcgatgcttgccacggcacgggcaaaacgatttccgatccgtgccccaagtgcaatggacgcggcaaggtacgcacctccaagcggcgcaaggtcaagatccctgcgggcgtggacaatggtcagatcgtgaccatccgcggccagggcgaagcgggggaaaacggcggcccggcgggcgacttgcagattttgatcgccgtgcggccgcacaagctgttcaagcgcaacggctatgatttgtacattgaaatccccgttacgttcacgcaggcggcgttgggcagcgccattgacgtgcccacgctggagaaacccgtgcgctacgatttgcccgagggcacgcagcctggccaggtgtaccgcatcaagggccaaggcgtgcaaatgctcaacagcacggccaagggcgatctatacattacggtgaaggtggaagtgccgcgcaagctcaacgatcgccagaaagagctcttgcgccgctttgaggaatctaccacggggcgcgagtacgaggagaaaaaatccttttttgagcgcgtaaaagatgcctttaacaattaaaggcgcgcatcacgaacgggaggaagcgtatggactggctggaactgacggttttgacgaccacggaaggctcggagttggtttcgcagattttgatcgacgcgggcgcttctggcacggtcatcgaggacaaaaacgacgtcgctttgaaccagcgccccgaagggcagtgggacatcatcgacgaggaaattgctcgccgcatgggcgatgatgtgaaggtgaaggcctattacgcgatggacgcgcgcgtgaaggacactttggcgcacatcgcctctgcgcttaacgatttgcgcgccaacgccgccggtttgccgctgggcaagctggaaacgctggtttcgaacgtggacgacgaggactgggcggaaaactggaaaaaacagtataagcccttccggctggggcggcacatggtcgtcaagcccggctgggaaacgttcgacgcgcagccagacgataagatcatcgaaatcgacccgggcatggcctttggcaccggcacacacgagaccaccggcatgtgcgtggagttgatcgaggactacgtcaagccgggcgatacggccatcgacatcggcacgggcacgggtattctcgccatcgcggcggcgcttgcgggcgcgaaggatgtgctggccacggacttggatccggtggcggtgcgcgtggcggcggagaacgtgcgcatcaatggctttgcggatgtgatccgcacgcgccagggcgatttgctgcaagctgtggacgagcgtgcgaacgtcgtgattgcgaacatcatcgcggacgtgatcgccatgctggctcagcccgtgcgggcgcatatcgaggacggcggtttgttcatctgctcgggcatcgcgcgggagcgctcggatttcgtgattgaagcgctgaaagcggcagggtaccagcagcccatggacattcgggaaaagggcgagtggatggccatcgccgcgaggaaatagcgatgcaccggttttttgcggcggacgcggcggagcgggaaacgatcctgctggacgagaatgaatccaagcacgccaggagcgtgctgcgcgtgcgggatggggaaacggcggaattgctggatgggcaaggccgtcgttttggcgcgcagatcgacggaacggaaaatggccgcgtgcgcgtgaggcggctgacggaattgccgggaaacgagccggaagtgcgcgtgaccttgtatcctggcttgcccaagctggataagctggattttgtggtgcaaaaggcggcggaactgggagccgcgcgcgtcgtgccggtggaaatggagcgcagcgtggcgcgcatcagtggagatggcgcgaaaaagcgcgagcgttgggaacgcatcgcgcgcgaggcggccaagcagtgtgggcgtgggcgcgtgccggaggtactggcgccgctctcgtggaaagaggcgcttgtggatatgcgcgcgcgggaacttttgctggttccttgggaagaagcgggcatggaagggcagcgcttacaacaggtctttgccgcgcacacggccgcgcgcgacattggcattttgatcgggccggaaggcggcatttcagcggaagaaatcgagcaggccggcggcgagcgcgtgacgctggggccgcgcattttgcgcacggaaaccgccagcgtggcggcgctttccgtggtgatgagcctgtggggggacatataatattgaaggtagcatttcacacgctgggctgcaaggtgaaccagtacgattccgaggcaatgctcgagtgctttgcgcgcgcgggctatgaagtcgttccttttcaggaaaaagccgatgtgtacggcgtgaacacctgcacggtgacgggcacgggcgacgcgaaatccctaaagctcattcgcaggctgcaccgcgaacacccggaggcgaagatcatcgtgtgcggctgcctggcgcagcgggacgcggcgcgcgtgctgttgccgggcgtcgtgttggtgatcggcgtgcaataccgcgcgcaggtggtggaactctttgaaagggcggttgccagcggcgaggcgctttgcgcggtcgattcgctgaagggcgcggcctttgaaaatctgtttgtttcgcggcacgagggcaaaacccgcgccaccatgaaaatccaggaagggtgcgaccgcttttgcacctattgcgtgattccctatgtgcgcgggccggtgcgttccatgccgctgccagccgtgcgggcggaggcggcacgcctggcgggcgcgggataccgggaaatcgtggtgacgggcatccatctggcgagctatggccgcggcgaaggcgcgactttgctggaggcactgcgcgcggtggccgaaccggaaggcgtgaagcgcatccggctgggttcgctggaaccgttgattgtaaccccggaatttgtggaaggcattgcggcggaaagcaaggtctgccggcattttcacctttccatgcagagcggcagcgcgggcgtgcttaggcgcatgcaccgccgttatacgccggaagaatacctgcgcgccgtggagcggttgcgggaggcgtttccggattgcgccatcaccacggacgtactcacggggttccctggtgaaacagacgcggaggcccaggagaccgtggattttgtgcggcaagtggcgttcgcgcgcatccatgtgtttccctattcgccgcgtgcgggcacgctggcggcggccatgcccgatccggtggacgatgcgaaaaaacagtggcgaaccaatgaacttttgaaaatcgggaaccaattggaaatcgcgtacgtccaaaagctgacaggcacaacgcaagaggtgcttttcgagcggcagctggaaggcggctgggcggaaggcctgacggggcaatatgtccgcgtgcgcgctctggcgcgggcaaacgagctgttgccggtgcggctgctttcccaggagggaacgcttgccatcggcgaggcacaggggaggtgataccatggacaactgtattttttgcaaaatcattcgtggcgagatcccgagccagaaggtgttcgagaatgagaggtatttcgctttccgcgatattcatccgcaggcgaaaacccatgtgctcgtcattccaaagacgcatgtgaaaaatgtgctggaagcggatgaggcgctgttgggcggcctgtttcacacggcggcgcaggtggcgcgccaggagggattgaacgaaggattccgcttggtgaccaattgcggaaaacatggcgcacagtcggttgagcatttgcatgtgcacgtgctgggcggcgaacaactgggcgaagatatgcgcggaaaatgaacggaatgaaaagaatttgcgaaaagggtttcattacacaaatcttcgcttgacgtggatgggtgggttgcggtataatagcatttgtggcaaccccatgctacattggcatttgccattaaacgcgaggggagggaaaaccagtgtctgaagttcgtgtcggtaagaacgaatccatagaaaacgctttgagaaaattcaagcgccagaccgcgagggcgggcattcttgcagaagcacgcaagagggaacattacgagaagccgagcgtgaagcgcaagaagaaggcggaagccgcccgtaagcgcaagtattaagtttgcctaaaaagcccctttgtttacaaaggggcttcatcctgtctttctggagttgttcatggtatatggcttattaccggtgaagcataccaatgcaaggtaccaggcgggtatccatgtgctggcgcagaaggaattgcaactgctgctttcggcgtgcggccttgatcctgttgtttatccgctgtccctgtctggcatggaagtgatcgcttttgagagtccgccgctcacggctgggcaagccgccattgtggccgatcattcccttctatactggctgtttgaagtacgcgaggatcaatctcttttgccggtgctttctcacaggcaagaattgttgggcgcagacttgccgtatattcaaaaatacaaaggaaaaaccaacgaacgattcacagaactgctcatcaacatggcgctgtattccagcgcttacgctacggaaaaagccgtgcgcctgctcgaccccatgtgcgggcggggaaccacgcttttccttgcgctcaaccggggcatgcttccgacgggggcggacgcggaccgcggcgaagtgcaggaatgcgcccggttctttcagcggtatctggaataccaccggatcaaacataagcatcaaaaacatgcgcgcacctataagggcgccaatattcccatggagtcgtttgctttttctctgccggatagcggagaaggcgaactttcgctggccgtagcggacgcgcgccaggcggcgggactgagccgccgcaggtaccatattttggttgcggatctgccttatggcgtgcagcacgcgccttctgggaagggaagtttgcaggccctggtggaagaggcggcaggcgaatggctcgcttcgctcgcgccgggcggcgcgctggcgttggcctttaatgtacacacgttgaagcgaaatcaggtggtttccgcgcttgcgcgcgctggattttgcctggcggagggagcgccctatgaggggctggaacactgggttgagcaagctgtaatgcgcgatttggttgtggctagagcgccattggcataatagatgcgcatatgcaatagtattttggcaagaatgaattggccaatcttttctttaatgaggttcaaggagggttagacttggattatcgctcacttcacgccaaaacagtggcagatttgcggcaaatcggcagatccttgaaagtaaagtttcccgtaggaaccacaaaagcacgcatgatagagatgattctccagcatatcatggaagagacggagcaagccgcacaggagcagcagaacgccccgcaggaacagaatatcgcgcaggaaagcgctcccgcacaggaaggttttgccgctcccgcggcggaggaggcgaaaaatcctcaaccagaggtgaaggaacgctcggcgacgcccagcgttcgcggccggccgggccgcaaacccaaacgggcgccgcgggagcaggaggcgcttgcgtcggcgcccgaacggccggcagaagggtcggaaacgctggccgcggctcccgcagaagaatacgaaaagccgcaaacaccgtctgtggcagaagacgtcggctatgaacagcgctatgacgagcgccttacgccgccacgcaaccaaaagcaagcggtgatgaaccggcagcccatagccatgcgagtgcagcaaccgcgcctttcccagggcaatgcccggcagggcagcgcagggcagcgctttgagcgcaacgcccaaagatacgacaacaaccagcggttggaccgcaatgcacagcgctatgagcagccacagcagcggtacgaccagcagcgctatgaccagcagccgcaacagcgctacgatcagccgcagcaacggtacgaccag

SEQ ID NO: 116 - DNA, 9621 bp, Unknown
  16S sequences of unknown bacteria
atgatttcggtcaatccaaagcatacacgataaagcagtaagtagaactcgtgagagtctacattatctcgatgtaggtatatttaatcacattttgagtggcaggacataagatgaatcagaaatttcagtggaacgaaatgaccatgggagtctgctactacccggagcactgggagaaaagtctgtggcgggacgacctgaaaagaatgaaagaaacaggaatttcggtggtgcggattgccgaattttcatggaataaggtagaatcggaagagggcgtgtttacatttgcatttttcgatgaatttctggatctgtgccgggacgaaggcatgaaggtgatcttctgcacaccgtctgcgacaccgccggcgtggatttcggagacttacccggagattttaaatgcaagggaggatggcgtactctaccgacacggcggacgtcatcagtacaattataattcaaagaaataccaggagctggtcagaagagtcgtggagaaggaggcagagcattatggaaagcatccggcgatcatcggctggcagatcgacaacgaactgaactgcgagacgtgtgaattttattcagagtcggacagcgctgctttccgcgtcttcctgaaagaaaaatacgggacactggatgtgctgaatgaaaactggggtaccgcgttttggaatcagacgtacacagactgggggcagattcacgtaccgcgcacgctgcttggaaacgggtacaatccacatcttcacatcgactactatcgatttgtatcggcgagcacactgaacttctgtaaaatgcaggcagaaatcattgcaaaataccggaaaccggaggatttcattacaacaaacggtatgttctggaatgtcgataaccacgagatggcacaggagattctggatgtatatacgtatgattcctatccgaactttgcatattgcatcgcagaagatccgctgcacaatgatacgctgaacgaccgccactggtcaaaaaatctgacagaggttcgttcgatctgtccgcattttggcattatggagcagcagtccggagcaaacggctggacaacgcgtatggaagcgccgacaccgcggccgggacagctggagctgtgggcaatgcagagcgtagcgcacggggcggattatatttcctttttccggtggagaacgtgtacatttggcacagagatctactggcatggaatcctcgattatgacaatcgcgataatcgcaagctttcagaggtaaaagagttttatcgcaggctgaaaaagctggatcctctgtgcggttccgcgtatacggctgccttcggactgctgaaggattatgacaatgcatgggatacgaatgtggacgtatggcatcgacggatgattgaggcgagcgaggaagagatcttccaggccgcgcagcgcacacatacaccatatgatcacgtttatctgagaaaaaatacgaagctggaggagcttgcagagtatccggtgctcttctatccgcacccgacgatcatgacgcaggagcgcgctgatcttctgaaggcttatgtggagcagggtggtacgctgatcatcggctgccggtcaggttataaaaaggagaacggtcagtgcgtgatgctgccgcagccgggacttttaaagccgctgaccggatcagatgtgcgcgaatttacatttgcaagcccggcggagccggcagtctatgccaggtgggaagacggcatggaaagcgagatgccgatttaccatgacgtaatggagatcgcacagggcgtagagaacgcaaaggtgctggcatattataccggcagcttttatgcgggccgcccggcggtgattgagaagaagaccggaaaaggccgcgcgatccactacggaagcacgttcagccgcacgaatgtaaagcagctgctttcgtacaccggagtgctcgcaccgtttgaagagatactgtccgcaccggaagaggtggaagtcatctgcagagaaaaggatgtccggaagttttatttcctgctgaactatctgccggaggagaagacggtggtattgcatgagaagatgcagaatctgtatgatgatgcgttggcagagggcgaatttgtgctgaagccgtacgggactgcggtgtttacagcgcaaacccgatctgcagattgatcgcctgcggatgatccccgaagcgatccccaaacagattgattccgtttacgtgtctggaatcggggtcgatgccaatacgcacactgatgtatggagattcctcaagcttcagatcggcgatgcgcacgttgctgatccgctcatggtcgaggtagctgccggtgcggtcgatccgccaggatttcagaaatccaaactgtgtgttggccagtccccaccactgcggcgtcagatggccataccgtccgccgcagtcgcttggcgaggtccaggtgccgagccgtttgtcgttgatctcgacagagatatcacttggccagttggcacggtacatgggggcttcggagcaggcttcaaaggaaaggttcagccagtcgatcttgctgccgatgctgtcgatgatcgaaaaacggtattcaaggaagccctgctgaaaccacaaaagctgcgctttaaagcgctccggtgagtaaaacatgcgaggcagatcgagaggaccgagcggctgcgtctcggagagcagtccgcaggttggcttgatcccttcagcgctggagtagccgccgatcggcatggaaaacataaggggcatcggtgcgtcctgttcagattccggatacagggagatcgtgatcgtatcgagcctgcggctgcaatatttggtagaaccatgtatgccgggctgtacatcactgatgatcagcccggcttcatctaacgtgcggatggcgagcgccatcgtggacatcggcacatccagcttttgggcaagctcaccgacattcatgctccgctcggagattgcctttaaaacttcaattctaagcggagatgacaaagcccgtgcaatctgggtaagtttttccggccgctcaacagagaggtgagcgatttttccttctatttcctgcatataaattcccccttcattttgtatgtactctcagagtctttcctgcacttgcttttgtggccgattttctgccggttgcacccgaatttcatcaacgtacataccgtgtacgcctcagaaatttgggcacaactgacaaaaaatcttctcacaaaatcaagcacaaaaagattccgagagtacagttatcattatcatagtttaagtatatcacctcattctgtcctgtacaatgtttattctaaaaaatatgtaataaaaaacgaaaaacaggcaggttttatattataaagtaaacatattgacaaataaaaatgaatcatgcataatgcaaacatacaaaataaataaaaacaagcgcttgaaaagcagaaaagatagaaaaatcacagaaaaaatcataacgtgagtatgcgcatttctattttttttgcaaatttagaacaaaaattttgtaattaaaacgtgtagtaaagtgatcgacagatcagcataatgtatggaggattatttttatgaagagagtaaaatttttggttgcagcaatggcacttccgatggcaatgacggcgatgacggcatctgcagcaccggtagagattgattactggtctgtattcaccggcggagatggggcaacgatgcagagcatggtggatacattcaacgagtcacaggatgaggttcatgtgaaccacacgccgatgacagcagatgacctgtatcagaagattccgcttgcagtacagacaggaacagaggtgccggatgtggcagttgttcacattgagcgtattccgaatttcgtagagaatgagatgctgtggtcctatgatgaggagatcctcgcagaggcaggcatttctgccggggattatatcgagtctgcctacaacgcaagcaacatcgatgatgagcagtacggcattccgcttgatgttcacagctacgtgacctactacaacaaggatctgtttgacaagtatggattaaatgaatacgtggaggatggagttctgacctttgatgaactcaaagagctcggcgataaagcgaaggagcagggctttgagggcgacgtatttgaccttggctggatgagggcgcagcttctttgcttttatgcgcagcttgatccaagcctgactctttccgaggatggcgtagagccgtgcatcaacaacgagaacatgaaaaaggtgtttgagaccatgaaggatctctatgatggcggatataccaataagaaggaccaggatgcagcagctgagttctacggcggtgagatgctcgtatggatggaaggcatctggatgaaggcagcagttgtagacgcaggcatcaactttggcatgattccggcagttgcgtatgatccggcggtcatcaagaactggacttcttcccataattttgtacagtttgcagacgaggagcgtactgaggaagaggatcttgcagtggcaaaattcattaaattcatgggtgaacacaattctgagacatgggcaaaggatgcgggacagtgcccggcatacgtaagtgcatgggataacctggatctggatgagcttccgcagggcttcctggcaaaaccggagaacgtggatactctggcaatctactcctatcagtactggggactgttcgatacagcattctcccgtgtaggctgggattttgtggatggcacaatttccatcgatgatgcacttgcacagatcgatgctgagatcacagacgcgatcgcagcacagtaaacgaagagacggatcgaatgcgggcatgaatttgcccgcattctgtataagaccagggaaaaagggcagaaagccgatgcaatccggtcttataagataagatcagagaaagaggtattattatggcacgttcgaagactgctgcaggtgtcggaatcctttttctggtgtttttctgcctggctggagcgggcgggacgacaaccgtaaaagagattaccgcaactgtagatatgacattgccacagctgtttttctcgctgagcagtgcaagtattctgttgcttccgctgtcggtggtagccatggtgctggcaattgtcgcatatcttggaaaacgcagaaatgtcggttttgcgttttccgttatctcgtttgtaacgttcgggctgtttctgtttctctttgcaagggaaaaaatgaatgcgtcgttttacaatgctttaagcgatgcactgaaagaagcaggcgtaaaaaagctgaaaaaacgtgatgtggaagaaattattgtgacctatacaccgtttgcctatcttgcgctggcggcagcaggtgcggcggtctgccttggaatgccgcgttttggtgacagctccgaacggcgtaaaataaaaaaagagctgcttccgtatgcatatattgcgccgcagctgttcttctttgtcatcttttttgtgactccggctatatacggcatatacgcggcgttcaccaaatgggatctgtttaatgaaccggtatttatcgggctgtccaactttaagacgctgttgtttgacgcgggaaacacgtattacaaacagcttcgaaacggtcttggaaatacatttaaatttgtgatcctcagtgtgccgctctgtatcattgttccgctggcgatcgcggtcgcgctgcagacgaaggcaagaggaagtaaatttttccaggctctttactattttccgagtcttctgtcaattacgacggtagcattgtcctggaagtatatgtttaatacgaagtatggtgtggttccgaacctgttcgggctgaagacggactggtttgcacctccgtattcgtgggcggtgcttgtaatcgtgacgatctggtggtgtgccggaggaaacatggtcatttaccagagtgcactggcctcgatcccgaaagatcattacgaggcggccgcggtagatggagcgggggtatggcagcagtttgtgaatatcacgatcccgggtatgaaatatccgctgacgtatacgcttgtcatgtcagttgtggcacagttcaacatctacggacagccgctgatgctgacaggatttaacaacaatgaggcaaatgcggtacttctgatgtacattcaggaaaatgccgtaaagaaacaggtggccggaatgtctgccgcaatggcagtaattcttggattgtgcattatggtggtctccttcattcaaatgagggtgctgcgctcaaatgcatcagagtagggaggaaaaggcatgactacaggaaaaaaaggaaagcgggtcgccggcattttcatggcgatccttggaatcctctggatactgccgattgtctggctgatcctcagttcttttaaaagcgattctgatttcattacatcgtttgcaaatctgaaggggccgcttgactatctgacgagactgattccggataaatggacaatccgaaattatatttccgtttttgtcggtggagagggtgcaaatacaaccgcgaacatcctgccgatgttccgcaactcctttgtggtttcgatctcagtgacgatcggtacgctgatcgtcacgagtctgagtgcatatgcttacgagcgtctggatttcaagggcggagacaagattttctgggtgctgatgtacatgagcatgttcccaaatgttgtgaatctcctgccgatgttccgaatctgtaatgcacttggctggatcgacaacctgaatgcgctgatctggccgagcctggcaggcgtgttcaatatctttctgatccggaattttcttaagggaattccaaaggatctggatgaggcagcggcgattgatggagcgggcagctttgccatctaccgccacatcattttaccatcgatcaagccggttctgatcgtggtcgggctgtttgcgttcaacggtgcgtggaatgatcttctgtggccatcaatcgttctgacaaatccggcaaatcagacgctgacaccgggactgaggctgctgagcggtcagtacgagcagaaatgggggctgatgatcgcatcctgcctgatcagtatggttccgcctctgattctgtatctgttcgcacagaaatatttccttgagggaatttctgtctcagagggcgtgaagggctgataaaacgaatgtccgctttacaacctgttttgacaaaaataaaaaagtgcagagaaaggattttttgacatgaattcgtatatcaaaaattatccgcgtccgcagctggtaagaccggcatggaccgacctgaatggaacctggaaattccagtttgacgatcacgataagggcgaaacggaaagatggtatgaaacgtttccggagaaaacgcttcagatcgaagtgccgtttacgtatgagacgaaatgcagcggagttgaagacacggcgcaccatgcgcaggtgtggtacagccgcagcgtggagctgacggaagaaaaacggaaaggaaagaagacgctgattcattttgaaggcagcgatttcctgacaaagctctgggtaaacggtacttatgtgggctgccacagaggcggctatgcaagatttacctttgatatcacccggtatctccacacaggagcaaacgatctgactgtaaaggtcgaggattcctgcagcattgagcagccgcgcggaaaacagcgctgggtgccggagaattttggctgctggtacgtacagacgaccggcatctggaagacggtatggcttgaggctgtgccggagacatatctgaagggaatgaagctgacaccggatctttcgaacaatacgatccgcgcagagtatgagacaagcgcactggaagaaggcaattgggagatcgagacagaaatctggtttggagagcagaagatcaaccgctccgtaaaaccggtgcaccgcgaccgtgtgctggatgtcatcagtgtatatcgcccggatctggagccgtggggggtataccactggatgccgggtgccccgaatctgtacgatatgacagtccgcatcttaaaggacggcattgttgtggatgaggctgcctcctacttcggcatgcgcgatatccgcatcgaggcaggcaatatcctgctgaacggcaggccgctttatcagaggctgatcctcgaccagggctactgggagaattctcatctgaccccgccggatgaagaaacactgatcgatgacatcgataaaattcaatctatgggttacaatggggtccgtaagcatatgaaaatcgaggacgagcgtttcctgtactggtgtgacaaaaaaggattgctggtatggagtgagatggcagcgacgtatgagttcagtgatcaggcggtgcaggaatttacgacagagtggatggagatcgtccgtcagaattacagccatccgtcaatcatcacatggacaccgtttaatgagtcctggggtgtgccaaagatcaagactgataagcagcagcagaaatttaccgaggcaatttattatctgacaaaaagcatggatgcaatgcgtccggtcattgtcaacgacggctgggagcacacagtctccgatatcatcacgctgcatgattatgaggaggcgggagaggtatttttcaaccgctacaatggcaatctcgaaaagatgatgagttctgaaatttatcattgcaaggacaaatcatcaatggctgagggctacgaatacaagggacagccgatcatcatcagcgagtttggcggtatcgcgttctccggcggcggaaaggatgactggggctacggccacaccgtatcgacgcaggaagaattcctggatcgtttcgacaggatcacgaccgcgatcaagaagctgccgtacgtggtgggctactgctacacgcaggtatctgatgtacagcaggagatcaacggactgctcgatgcgaaccatgcatacaagcttccgacagacaggattaaagaaatcaactgcagagaggtcggaatccggaggatcggggactgagaatacgtttataaccacgcgtaaaagcaaccgtaaaaaatacgattgcttttacgcgtatttttgaataactgcgcgtcggaaaatgctattttaaccgagtcaagcaagtcccctgcttcaattgcgtgcagcaataagcaatgggtagggacttgcttgtatcatagtgagacaggctcacatatgataaaggttatgagcaagtagcgaagcggattgcgaatatccgctttgactcgtacttccgatattggaaaagaatctgagtttgacagaagatgaaagaatcgtctataaaaatctgagcaggacggtgctgaaaccaatcagcgagattgcgccgtatgttccgtttggaaaatcaaagacagcacagctgttgaaaaaatggaacaaaaaggtgttattatgattgagggaaaaggcagagggacaaaatatattataaaataaatgtcggtaattttgaataactgcgcgtcgcattctcgttacttcagtgatgagttagacgcgccaatttttttgta

SEQ ID NO: 117 - DNA, 32759 bp, Unknown
  16S sequences of unknown bacteria
tgaacggtgcaggtttgttcttttattaaaatccccgagaaaaaagtgaagaaccactttttttactaatattctttaaattattctgccagttcggctgcggtctttgcgatttctgcgaaatcctttaccttcaggctggctccgccaatcaggccgccgttgatgtcggttttctccagaagctctttcgcattgcccggcttcatgcttccgccgtactgaatgatgagcttatctccgatggacatgtcatacaatccctgcatcattccgcgaatgaatgcacacatctcttctgcctgctccggtgtcgcagtgtgtccggtaccaatggcccagatcggctcataagcgataaccaccttctccgcatactcctgcggaattccggcaaatgcttcacccagttgtccgcatacgaatgcctgctcctgcttcttctcccgaacttccagggactctccgacgcaaagaatcggggtgatgccctcttccaaaagaacctttaatttacggttcaccgtttcatccgtctcgttaaagtattctcttctttcagagtgcccaacgacgcaataatccacaccgatttccttcagcatgtccacggaaatctctccggtgaatgcgccggaatgctcatagtgaacgttctgcgcacccaaggaaattccggttccttccagctccttcttcaacgcttccagctgggtaaacggtgcaataattgccaccgattccggattggtcagcttctgcgccttcagctcatgtacgtaatgaacggcctgcgcagtggttttgttcattttccagtttcccgcaattaaaaatcttttcattctttgcaatctcctatcctatttctcatccagaatggcaatacccggaagttctttgccctccaggaattccaggctggcaccaccaccggtggaaatatgtgtcatggaatctccatatccgaactgctgaaccgcagcggccgaatctccgccaccgataatggtggttgcgtcggaatctgccaggcatttcgcaattgcttttgtacccactgcgaatggtgccatttcgaatacgcccatcggtccgttccatacgatggtctttgcggtcttcagtgcatcggtaaagagctcaatggtcttcggcccgatgtccagacccatacggtcttccggaatccgatctgcatcatagcaatcgtaagccgcatcttctgcaaacttgtccgctgcaacggtatccaccggaagaagcagctgaacgttgttttcttcggctttcttcagaatttccggaaccagtgccagaccttcttcgtccaacagggatgttccgatggaatagccctgagccttcaggaatgtatataccattccgccgccgataatcaggatgtccaccttgttcagcaaattggtaattaccggaatcttatcgccaacctttgctccgcccatgattgcggcgaacggtctttccggattgttgactgcctgtcccaggaactgcagctccttctcaatcaggaagccggataccgccgggatataggatgcgattccggttgtggatgcgtgcgcacgatgagctgtaccaaacgcttcctgaacgaatacatcgcccagctccgacagttccttggagaattccggatcgttcttcgtctcttcatttctgtaacgaacgttctgaagaagggcgatatctcccgccttcaaattgcgcacccggttcttcacgtcctcatctactacgcggtcggaggcaacaaagtgaacctccagattcaggtactcggacagcttcttgcataccggttccagagagaattccggcttctgttcccccttcggtctgcccatgtgggacatgagaacgatttttgcgccgttctcgtgcagataacggatggtcggcagcgcggccacgattcttgtatcgtccgtgataacgccgtctttcatcggaacgttgaaatcacaacgcatcaccgctgtttttcccgcccactgaatgtctctgacagtttttttcatagtacacctttctttctgttgtacaaggaataacattcagaaaccgcgccgaaaacagcgcggcttcatcattcattttttcttacttgtgatctacctgatacatgtgacgaatcagctccagaatctttgcactgtaaccgtactcgttatcatagaatgcaatcagcttgaagaaacggtcgttcagctcgataccttctctggaatcgaagatggatgtgtgtgcatcgccgatgaaatcgccggaaaccacttcgtcatctacatattctagaatgcccttcatggttgtctcggaagcttccttcaccttcttacaaatttcttcatagctggtcggcttcttcagcattacgttcaggtcgataacggaaacgtcagaagtcggtacacggtaagaaataccggtcatcttgccctgcagttccggaattaccagaccaacagcctttgctgcgccggtggaagacggaattacgttgccgaatacgcttctgccggtacgccagtccttcatggaacgagcatctactaccttctgctttgcggttgccgcatgaatggtggacatcaggccctgatcgatgccccagttgtcgttgattaccttgcacagcggtgccaggcagtttgttgtgcaggatgcgttggataccacgttgtattccggcttgtactcttcgtggtttacgccatatacgaaggtcggggtcaccttgtcctttgccggagcggagatgataaccttctttgcaccggcatctatgtgcgcctgcgccttctcggtggtgttgtacgcaccggttccttccatgatgtattctgcaccacagtctccccacggaatatcgtgtgcatcgccttccatgaataccgggatcttctttccgttaaccatgattcccttgtcatacttctcaacagttcccgggaatctgccaaatgtagaatcatacttcagcatgtatacgatgtagtccagatccgaatttctccagttgattccggcaatttccacatcctccatgtccatcgctgctctcattacgacacgagagattcttccaaagccactgattccaactctaaccattttctcctccttgcattgcctttctgcaataaaacattttctaattcaccaattattgaagtccggggaaaccattttgccgcagggcttcaaataaaatgatgttcacggaattcgacagattcagggaccgcagacgggtctgctcgctcatgggaatccgtaccgctccttcgcggtgctcctgaatgaagtccttgggaagacctttcgtctctcttccgaaaagaatcatatcaccatccttgtattccacatcggtgtacttctttccaccgtgcgtcgttgccagaaaccagcgatgatccccatattcccgaataaatgcttccagactgtcgtgaacttccaaatccacatactgccagtaatccagtcccgcccgccgtacggatttgtcatcgatgttaaatcccaaaggacggaccaaatgcaaccgggtatttgtggctgcgcaagtccttgcaatatttccggtgttttgaggtatttccggttcaaccagaacaacgtgatacatagatactcccttactaaagtcaattccaaccatatattaacagttttgtaattatttttcaaccgttaatgaactgcggcagatttcttttaccggacagtgggcacaatccggctttcgggcacggcagctattccgtccgtgaaaaatcaaaaggtgatgtcctcgggtccaccgttcttccggaagaatctgcatcagctgcttctccgtctccagcactttgtccgaattcgccagaccgatacggttggaaacacggaacacgtgggtatccaccgcaattttcggtaccccgaagccttccgccaggacaacatttgcggtcttccgccctactccggccaaaacggtcaaagcggtgaaatctcccggaacttcgcctccgaactcctccgccagctgccgggacatgttgatcagattccggcttttgtttttgtaaaggccaatggaatgaaggatttcttccaaggaagccggttcggcctttgccatggcaaaagcatccggataccggcgaaacagttccggggtaatccgattcacgctgacatccgtagtctgggcggaaagcatcaccgcacacagaagttcaaagtgattttcaaaatggagcgcgcagcctgcttccggataggcgcggtccaacagatccaacacctgcagtgcctgcttggaatccaacaattttgacataattatttcctttctggtattgacatgtatcgtacacagattatataattgtatacatagagaccaaagtattacaagggggttaaatatggataagaaaaccgaagaaatcagccagcctctttcgaacacgcttttcaccgcgattcagaaagatatcctttccggaaagattaaatccggagagaaattaaccgagcagcgaatttgcaagcagtatgatgtcagccgcacaccggttcgcgaggcgcttcgccagttggaagccgacggtctgattgagaatattccgcatcgaggcgctttcgccatcggcctaagccgcagggatatctccgatctcttcgatcttcgagcacagtttgagatgaaagccgtagaatgggccatccagcgcatggacgaggaaggcgtcgacaagctgagagagaatatcgagttcatggaattctacaccatgaagggagatgtagaaaaagtgttgagctttaactctcagttccacgacatcatctataacggcacccagaaccggatgctctatcagacgctgcacacctaccagacgtatctgaagcattccgcaccgccaaaatcattctccgatgactatctgaacactattttggcagaacaccgggcgattttcaatgcttttgaaaccaaaaatccggatgaaggccgggaagccatgcaggttcacatggatcattccaaactccgccgcatgagcaaattcttctaatcgaataaaaataccatccaaacgggccgggttcataatccccggcccgtttccttacttattctgtttcgtctgattgtagcggcgaatgcaatccagagattttctttccagttcaaactccccttcctccggcttcggaaggtccataacgcccttgctgctcatggcccaaagaatcaattcctgtgccagccacggatttttcaccagaaccggtcccaacatattggtaaaaatcaggttttcggtacgagccccctctctccggtcttcgtagctgcagttaccgtatccgtattccacatctcccagcgcaatatcgccgttcaggaaggtatccatcacctgaatctggcttccgttcaaatcgaagcacgtctcccgcatcttgcagatcaggtcatctcccacgatactgtcccgttcccggcattccatatccaggtatcccaggccggtgacggcagttccgtccagcttgcgaatggtcttaccgaaagacgcaccggtggttcccaccgcaagaatcacgcctccccggtagatgtagtcgtccaaatcttcttttatccgtgaaaaagcgttaacgatgtactcacaggatttgaattctcccgggttcagcagcaatatgtccgtgttgtccagatcgatttcatcgccgaagttcaccactttgtgcacttccgcttccagccccattttctcggcaattcgtaccagcgccatcacattgccccgatctccgtggaggttcaggatgtccggccagcaccatgtaatgtttaacttattcatacttcggtaaatcctccatcatctgctcatatttatgaagccacgtaatcagatatacgttgtcgcagtcgtacttatccagttccgcaaaaatatcatcgttttcatccgaagggatcacggtgatccggtcttccgggaatccgccgtagatcagccgattggccgtatcgtatgccaccgcttcggagaagctgatgcagtgctcgatattggaatggagcaaggattccacatcgcagtcaaaggcgtagaaggtgttggtgtagaacggctggaagtcttccagctgctccagtccgatgaggaaaatcttccgttccttatcctgagaaatgaaatcaaaagcggtggtcagggtttccgggttctcctgcttgattcgaatgtatttgatttccttggtcttgtacggaatcagttccagtcttccggcgatatttcggaaggattcgaaggatttgcttaccgattccgcactcacaccgaacattttgcaaaccgcaatggccagcgcgtaattgtacaggaagaacggctgatcgtacggcatgtgaacggaaacgccgtcgcagcggaaggtgcggttctcgaagtccacatccgtcacctgaacgtccggctgaatccggctgtggaacccgcaggaagtgcatcggaattcccccacattatccacgttgtaatagttaaaagcaatcttgttgttgcatttcgggcagcccatggtcacatcgtagaaaccgtttttctcaaaggacttactgtggcgttccacgctataagtccgaacttcccccgcatagtcctccagggaaagtgctctcggctcttcgttattcacgaagattctcatatccttgttcaccactttggcgattttcttgtagatgaaatccggctctccgtttcgctgaacctggtctttctgaatgttggtcacgcacaggttcttcgccgggagctgctcatagatttgcgccaaataccgctcgtcggtttcgaagatcaggtaatccccgttcacacggcccagcatggaagaatcccgaatcatggcggtagccacgccggtaatcagattggcgccctccaagttggtggttaccttctttccggatgcccgaagtgcgtgcacaatcaggttattggtggtggattttccattggttccggtgatgaacagggtccgctccggatccacatgggtgaaatgggtaatgaagtccttctgcagcttcagtgcaaaagctccggcaatataggttccgttctttcccagaagccggcacaggaacaggccgaacttcgacccccatagaacaattgtaaaccagattcgtttcatgctttactccttataaattcccagtttatgtgcaacagcatatatttttccgcccatcggaatatccaccagctcgtccttggtgaacatcttcagtaccagaatcatccaagcatagatgatcgcacccaacaggatgcacagcagcgtggtgacggcatttccaagcaccccgctgagcagacggtacgcaatcagaatcaccgcacccatcacgccgccggaaatcaccggcaccgcaatgcactttcttttgttcatgcgaatggtgatggacttcttcagcgtaacgtatatgatgataaaagcaatcatctggcagacaaaggaactgattggtgctccgtacatgccgattttcggattgctgattaaaatcaaattcagaacgattttcaccaccgccccggtgagcagcgccaccgccggcgtatacatccgtcccagaccgaacaacgatccctgcagcgtgtgatttaccgccaccagaatcatggtcaccgcggaaagctggaacaccaacgccccgtccggcgcattgggatacagcagccggagaatcggattcgccagcaccgtaaagcccaccgcacacggaatgatgatcagcatggagacggtgacggacatggaaatcttctccgccgcctgtctgtaatccttcttcgtcagcagcgaagtgatttccggaatcagcgccgaatagaaggacaggttcaccgccagcggcaaattcgtcagggtgtctaccttggacagaatgcccgtcgctcgcatcgcctcttcctccaaagcttgcttgctgctcagaattcccttaaacgcaatctgaatgcagttgctcacggttaccgtatcgataaaagcagttacgacggaaatgacggatccgatggtcagcggaatcgccgtccagaaaatcagcttcgccatgcgtctgttgctcttccggtcggtcttcaccccatcgtcggatttcatccggtattccccgatattttttcgataatagtgaatcaagtaggagaaggaaatcagcaccgccagcgtggtggatacattccctgccgccgccatgatgtacgcatccctaccgattgtggcatagacgaacaggatggtcagcacgcagttgaagaactgttccaaggactgagaaatgctgctggcccccatggtacccaagcccgcaaaatatccccggacaacggcggatacgcagacgaagaaaatagccggtgccaacacccgcaacacataggctaccggcggtacgtgcatgatattcccggcaatgacatccgctccgaagtacaggagcaaggagcacgccaatccgatggcaccgaataccaccaatgaaatcttgaacacccgatgggcattgttgtattcgcccagagccgttcgctccgataccagcttggagaccgcgcccgggattccctgggaggacagtaccaacagaacggcgtatacctgatatccggccgaatagtaaccgtttcccagatcgccgaacccgtgaatattggtaatggctagtcggtacactaagcccagaagcttgatgaccagctgtgccaccatcagcatcagaacgtttttggcaaaggaattgcttttatttttactcaaattattaaaccaccttgtgtcttaaattaaactacaaaaactgaaataggagatgtctcccctatttcagtttacactattcgttccattatagactattgaacagaaaaattcaatttattatttgctgcatccactcgaacggtgtggccctctgtcaggtcgcctcggataatcagttctgcaatctcgttttcaacgtgcttctggatgtatctcttgaccggacgagcgccgtagacttcgtcgtaggattccatcgcaatcagatgggtcgcttccggtgtcatttccaccttcatatcccggtcggccaatctcttctccagagacttcatggtcaagcccacaatcttctcaatttcatcctgagtcagtgagtggaagaccacgatatcatcgattcgattcaggaactccggccggaagaagctgtgaagctgttcctgcggtaggttggatgtcatgataataaccgtgttcttaaagtccacggtccggccctggttgtccgtcagccgaccatcgtccagcagctgcagcagcaggttgaatacatccggatgagccttctcaatctcatcgaacaggataacactgtacggttttctccgtaccgcttccgtcagctgcccgccttcttcataaccaacatatcccggaggcgctcctaccagacgggacacagaatgcttctccatgtactccgacatatcgattcgaatcaggttcttttcggtatcgaacagggtttcgcaaagtgtttttgccagctccgtcttaccaacacctgtcggccccaggaaaataaaggagccgattggacggttttcgttctttaagccggctcttgcccgaagaatggcttcggtaaccgcattgatgccttcatcctgaccgatgacccgtcgatgaagaatgtctttcaagtgcaggagtttctctctttccgtctctgccagacgggaagccggaattccggtccagtcggaaataacctcccgaatctcttcttctcctacttcctctttcaggagcttgtgttcctgatccttattgaccttttccttcagcgcatcgatttccttctccagcttcggaaggtcgccgtatttcagtttggccagtttctccaggtcataactccgttctgcggtttcaatttcgtgacgcagttcttccagttcctgtttctttgctttcagattctgaattccctgcttttcattttcccattttgcccgcagctcgttgttgtctgactgcagatcggccagttccttttcaatcgtttccagtcgagtcttgctgcccttatcttcttctttcgacaaagcctgcttctcaatttccagctgcatgattttacgggaaatggtatccagttccgccggcatgctatcgatttcggtccggattcgtgccgccgcttcatccatcaaatcgatggccttatccggaaggaaccggtcactgatgtaccggttggacagggtggcacaggcaatcagcgcattatcctgaattcgaacgccgtggtggatttcaaacttttccttcaaaccacgcagaatagaaatggtatcctcaacgctcggctcatccaccattaccttctggaaacgacgttccaatgccgcatccttctcgatgtacttccggtactcatccaaggtggtggcgccgatgcagtgaagctcgcctcgagccagctttggcttcagcaggtttccggcatccatggaaccttccgtttttccggcacctacaatgttgtgaatttcatcgatgaacaggataatcttaccgtcggacttgtcaatttcattcagaaccgccttcagccgttcctcgaattcacctcggtatttcgcaccggcaatcagagatcccatatccagggagaagatggtcttgtccttcaggttctccggaacatctccgtttacgattcgctgtgccaatccctcaacaacggcggttttgcctacacccggttcaccaatcagtaccgggttatttttggtccgtctggacaggatttcgatggtccgacggatttctttgtctcttccgatcaccggatccagctttccctttcgagcggattctaccagatcgataccgtacttattgagagcatcgtagctgtcttccggattctgattggttacccgctggtttcctcgaaccatggtaagcgccttcagaaactcatccttgtggatgccgtatcgacgcatcagctgttccgtttcgttgtcgccggaccggagaatggccagataggcgtgttccacgcttacgtattcatctttaaattcggatgcgatgctctccgcattcatcagcaccttgttcagcttcgtcgaaagatatacctcgccgccgctgacctttggcagtttctccagactttgtttcaaatcctccttatatgaagagacgttgacgttcatcgcttccagaagctttgcaatcaagccgtccggatcgctgacgatggcgtagtgcagatgctccacttcgatggcctggttgccgtaggacatggccaggttctgtgcatccatcactgccgactgcatcttctgcgtatacttttcaattttcattccacttcacctccgtgaatttagttttcatttatgtgaacaatccttgattgattggttgcccttttgcttacaataaaaatttagcactcgactgtgtcgagtgctaacaattcttgtgaagattctgtgaaattctaattttataaaataatatactgcagcaagagtgcgtagacgccgtttaccatcggattaaggatcttatccaccacgcccacgatcagcagaatcatgagaattgggaagccgtagttgtacagcgtatagtagaagctcttttcccgcaggttaaaaatttccgtgacaatgccgaaaccgtccagcggcggaaccggaatcaggttgaataccatcaataccacattgacgataaccacctgcaagaggatgttgaacagcgttcccataagagttccgtcggacagcttatcatacggtacgttgatgtacacgaagtgaacgatgaagctgaatacgatggcgacgattagattcatgaccactccggccaaagataccagcagttcatcccttctcggatgcttatagtatctcggatcgatttccaccgggatgccccatccgaatccacagaacatcagcgccaggaatcctatcggatcgaagtgcgccagcgggttcagcgttacccttccctgcgctctcggtgtcggatcacccaggcggtcggacacaaatgcgtgaccgaactcatggaaagacaggccgatgacgattcccggcagagcaatcagcatattgaggaaataggtcttcggattggacagcccgttctgagcgatgtttaccatcagcaggatgaccagcagaatgcccagttgtttcatgcgatttttcatgcgtccaccttctctccgtccagactaaatgtcttcgtctccgtgatgcgaaccgaaaccatctgtccttccgttaacggttcttccgatgtgaaattcaccagcttaaaggtgtcggtccggccggaccatgcgccggcatcgttcttgctgggaccgtccaccatgacgtccacgattcgtcccaggtattcggaattctttttcgccgagcatcgattcacttcctccaccaatcggtcaaagcgctcgtgcttgacgttctccggaatctgattgtcatacttggccgccggcgtacctactctcggggagtagataaaagtaaaggcagagtcgtactccacttcccgcaccaggctcagcgtatccaagaaatcttcttccgtctctcccgggaatcccacgatgatgtccgtagagatggaaaggtccggacaggtcgcccgaagcttttccacgatttccatgtatcgctgccgattgtagtgtcgattcatgcgtcccagtacctcatcgctgccggactgaaccgggagatggatgttatgacacagcttcttgcagtctgcgaagcaggcaatcagctcgtcggaaaggtccttcggatgggacgtcatgaagcgaattcgttccagtccctccacttcatccaaagcacgaatcagtgccgcaaagttgtttccgtccgcatctcggaaggagttcacgttctgtcccagcagcatcacttctttcacgccgtcgttcaccaggttgatgatttcttgcttcaccgcccgaagggagcggctcttctcccgtccgcgagtgtacggaacgatgcagtaggtgcagaaattattgcatccataggtaatattcaccagcgccttgtgcttgaattcccgcttcgattccttttcttccggaatctcttcattgttggcgatgatggagaactgcttctttccggtgcgaattcgctccatcagcaggttcggaaattccgcaatggtctgggtaccgaacacgatatccacccagctgaagctcttccgaatttcctccacgatatgcggctgctgcggcatgcatccgcaaatgcaaataataaagtccgggttatttttcttctgcttcttgaattgtcccagcattccgaagaaacgcttgtccgcatgttcccgaacgctgcaggtgttcatcaccacaacatccgcttcttccggattcggggtatggctgtaatccagtgcttccagcattccggcgatattctccgaatcgtgctcgttcatctgacagccataggtaataatgtgataattcttgctcaaaagactcattcctcttctatcgttttaattctaaatgtctcatcccgcagcatttcttccacggtcttcagcgcatctttgtccttggaccgggcattcacggtcacatcctcattatgggtcaaggtattcacggtttcaggcatctccaggtatacgattcgatgggcccgcagttcttccggaagttcttccgctgcgtcgcccagcaccaggacaatggtctgctcggttttcgccatcagcttcacgcatttcttccatgccgcttcgtccgccggatccattacgatgcagctgcggttgtgaaccgccgttttcgcgtttgccgtaaaacgaagtcgtttgcacaacaggatgtccggcagtaaatccgaatgacgggtatccgtcaggtgatgcatttcttctttattccgaacgtagaacaccacgttgtgtgcctgatacagaaggcggttggccagggccagggccgaaggcgtttcgccgattaccgcaatccgcttccggtcgctttcccgcatcttcggaatcgtcacgtcactgaagtaatccatcggttcttccggagcttccaaagcctcgtcttccggattttcttcttccggattctcctccggaaccgcttccaactttccttcgcagctgttttcgaaaacaaccggctgcgggatcggttcctccgttttttcgaaagcacccgatgcctccgaagcttccgcttttgactcggttgtctccgcatcttcctttttgtttttaccgccgaagctgagagacggttcctcccggcgaatcaggcgctgaatattggagcggtgcattacgattaccgtgaccgccaataagatggccatcggaagcaccgacgagtaatagtattcaattaagaacggataggataccgccgcagtgatggaccccagggacatcttccggctcagtgcggttaccgcaatcgcaatcagaatcagtgcaaaggcgctgggccaatccagagccagtgccgcacccagggatgtggccaccccttttccgcccttgaacttatatagggccggaaaaatatgaccgtacactacgcagatgaatgcaatcatggcaccgatatctccgtaattcaaaccgatgcgcaccgcaacgtatcccttcaacacatcaatggcgagagtcgccactgccgctttcacccccagcacccgaagcacgttggtggttcccgcgtttccgctgccctctttccggatatcgattccgtgaagccggcccaccaagatggccggggagatatttcccagaaaatacgatactatcgcaacaataatgattttaaattgaaacggcatccttaattgtctccttttttctcgttatacacaaatttcaccgaagttccttcgaaatcataggcttctctcagtctgttttccagataacgcgcataggaaaaatgcatcaattctctggagttgatattgaaggagaacagtggcggcgcaaccccaatctgtgccgcataataaatcttcagtctctttcccttgtccgacggcggctgacgcatcatcaccgcatcttcaatcaggttgttcagcttgccggtggtgattcttctcatgcggatttcctgaatggcagccgcttttcgaagaatatcgtagattcggcgtccctgaagaaccgaggtgaacagaatcggtgcgtaggaagcgaacagcagttcggcacgaacctttcgctcgtagtcccgcatggtgttggtttccttctctaccagatcccatttattgatgacaatcatcatgccctttccggcctcgtgggcaatacctgcgatttttttgtcctgctccgtaatgccctccatggcatcgatcatcaggatgcagatatcgcagcgctcaatggccgcgatggcgcggatgacgctgaatttctcgatggagtcgtacaccttgcttcgtctccgaaggcccgccgtatcgatcagggtaaaatcatttccctcaaagctgaacggcgtgtcgatggaatcccgggtggtgccggcgattggagatacaatcacacggttttctttggtcagtgcgttcaccaaagatgatttgcccacgttcggttttccgatgatggccagcttgatgttctcctcgtctgcctcgtaatctttgtccgggaaaccggacacgatttcatccagcaggtcaccgatgttcagcatattcgccgaactgatcggaatcggctcgcccagacccagctcatagaaatcgtagatggtatccggcatcttggacggattgtcaatcttattcaccacgagaataactttctttccggtacggcgcaggattgcccctacctcgatgtctgccgtggtgaggccttcttttccgtccaccatgaacagaatcaggtccgccatatccatggcaaccactgcctggtctctcatctgggagagaatcggatcgtccgtactggcctcgataccgccggtatcgatgatggcgaactctcgtccgttccattccgtctccgcatagatccggtcccgggtaacgcccggcacgtcctccacaatagcctttcgttctccgataatacggttgaaaaatgtggattttcctacattcggccgtcctacgaccgctagaattggtttactcatcgaatatctcctccgcaaattgtgttggattgaattccaacagatcatcaataccttcgccaacgccaatatacttaatcggaatatcgaactgatccgtcaccgtaatggcaattccgccccgggccgttccatccagtttggtcaaaaccaacccggtaatctccgcaatttccgagaactcctgcgcctgactcaccgcgttcttaccggtggtggagtccagcaccagcagcgtctctcggtgcgcttccggatattcccggtcgatgattcggttcatcttctccaattccttcatcaggttctttttattctgaagacggcccgccgtatcgcagatcagcacgtccgttcccgctgcctttgcggcctgaatcgagtcgtagatgaccgccgatggatccgtgccctcttcgtgacgaataactctcacgccgattcgctcgccccactgctgcagctgttccgccgccgccgcacggaaggtatccgccgccgccagcatgacagaccggccggatttttggcacaggttggcaatttttccgatggatgtggtctttccgccgccgttgatgccaatcatcaggataatcagcgggttttccttgcacagctgatttcgttctcccttatccaccaaatccgcgataacgctttccagcgccttctgcacttcctccggtttcgtaatgtagcgggcattcacccgttcccggagctgttccatgattttctcggtggtatcaattccgatatccgaaatgatcagggattcttccagctcatccaaaaaatcctcatccagattcgggttgcccacgattacgttggtaatcttctctctaaatttcgcaaaggttgatttttctttaaaaatacccatttttgttcctcactgttccggttagtccagatccatttcccgcgcatcctccaatttgagagacagcatccgggaaataccctgttccggcatcgttacaccatatagcacatccgcatgttccatcgtcaccttttggtgggtgataattgcaaactgaatttcatggaaattctttaaataatccgagaagcgctcaatattcgcttcgtccaatgccgcttccacctcgtccagaatgcagaacggcgtcggtttcgtcttcagtaccgcgaacatcagtgcgatggcggtcatggttttctctccgccggacatcaggttgatgttctttaacgatttccccggcggctgcgcgatgatatcgattccggaatccaacggattctgttcatcctccaaactgagttccgcatgaccgccgccgaaaagctctcggaaggtgctctcaaagttcgtttcgattcgttcgaaattatccttgaaccgttcccgaatggttcggtccatgctccggataatgccctgcagttcatccatggccttggtcagatccgattcctgggtggtcataaattcatatcgacggctcacatttcggtactcttcgattgcagaaatgttgacgtcgcccagctccgccatgcgcagccgaatctcccgggcttctttgttgccggaagtgatggcaaaatcctcggaacgcagttccagagcctccgcgtaggacatctcaaattcatcccacagtttatccttctgagaagaaagcagtgtctcgttcttcgcattcttaatttccagcttatatttccgatcctgcatgtctgtgacatttcgggatatggatttctgattctcgattccgcgctcctgatccaaccgattccggtccagatctgcggtcagctgaacctctcggtcttccagcgctttcttttccgctttcagagcggtttccttttcgtcggactccgctccggaagtggtgagcagcagtcgctgtcggttctgctcttcgtactcttcttcggcggaattcagcgcatcttcctgttcggtaatgtcgtcgatgattcgctcaatggtctcgttcatggccagaatcttctgttcctgttcaccgagccgaaccttgtaggaaaccacctgttcctgacactcttcggaatccgaagagtaccgttccacatctgcactcagctgttccgactcatcttccatgcattgaatttctttctccgcttcatcgatctgattcttgtagcgaagaatcatgtcctccgcccgcttcaaatcgtcctttatattctccagctcctcggaatagcgggaggacgcggtatcgctttcttttaccaaggattcggcgtgatccttctcgctctttaatacgctgagctggacttccagttcctgaaggcgctgcgtcagtttctttcgctcttccttcgccgcatcccgggactgaacgcattcctcccggaaggcttttcccttcttctgagatgcgtggagagattcaatttcccggtccagtgcagcaatttccttctttcgctccagaagattggcggatttattccgatatcttccgccggtaatggcaccgctggaggaaataacttctccttccagggtcacgattcgaaaaccgcccggcgctcgctttgaaatcgccaccgcacagtccatgttgtcggcaaggattacccggcccagcaagtatccgtaaatatcccgatacgccggctcaaaatcaatcatctccgcggcaatgcccagatatccatccatgtgctccgtcgctcccggcgatatcggacggctatgaatcgacgcaattgggaggaacgtagctcttcccgcccgagcggacttcagccattccacggcctgttttgcggaacggtcgtcttcgcacacgatgttctgcatggcaccgcccaatgcggtttcaatcgccagctcatatccgtccggcaccgacatcagctcggacaccgtccctatcacgccccgaaggttcttctgcatcaccgctcgaaccgcgttgttgtatccttcgtagttgttttccatctcctcgatggtgttccgccgcgccgtccggcgattcacctgaagcagaatttcttccagcctcttggacgccgccgcgattttctcctcatagcggtgaatctcctccctatgggattccaccgtccggcgaagattttcctgctcctctactttttccgtaaaagcagtctccatttcttccaggcgtgcccggttctgctgaaggtgctcttcccgtccttcactctccgacgaaatctgctccatacggtctcgcaaggtcttctgataattctttaatgtgttgatttccgcctgcctggatacgttcttgtttcccatatccatcgcggattcccggttctgttcgatgcgttcccggagaattccggttttcttggttcgctcgttcaaacgcaccaccgcatcctgaagctcccggcgatattctctttcggtttgctccagctcgtcggcatccttttccatggactgccgctttttctttaaatcatccatcttcgccgtcgtgtcggaaataatttcctgaaggcgattcaaattggtttcaatattgttcagccgttcggagttaatctgtccccgattggtaatcaggttcaactcttccgtcttctcccgcagctgccgattgcactcctcgtactgccggctgagctctgcgtcccgaaggcggcactcttcaacctgacgatccagcgctgatttttgctccagcaattcattgtattcccgcgtcagttcctccagttcggtctttccgctttctacattgcgttccaggtttccgatgctgtgcaggatgatattcaccgccagcaccttataccgatctcggagacggatgtattcctgagccttctcggaatcctccttaaggccgtcgatgcggtcttcgatctccgaaatgatatcccggacacgttccagattgtccgatgcggacaccagcttccgctccgcatcctgcttacgggttttgtaggaaacgattcccgctgcctcttcgaaaatctcccgtcggttctccggtttggtgctgacaatctcctgaatcttgccttgaccgataatagaatatccgtcaactccgattccggtgtccataaacagctcccgcacatccttcagacggcagttgtttccgttaatcaggtattcgctctctccggagcggtacatccttcgcgttaccgccacctcgttatagtcaaccggcaacattccggaagagttgtccacaaccagagatacctccgccatccccttcggcttccggctggtggttccggcaaaaataacctcatccatcttgttgcctcgaagctgcttcgggctctgctcgcccagcacccatcgaagggcatcgctgatgttgctttttccgctgccgtttggaccgacaatacaggtgattccatcattcagttcaatacagaccgggtccgcaaaagatttgaaaccctgcatctcgattcgcttaaattgcaatgattaaacccctttcatcagcacttttctggctgcttcctgttccgctgctttcttgctgtgtccggaaccggtggccagaacggcatcgtctacttttacctgcaccgtaaaaacctttcgatgatccggcccgctttccgaaaccgattcatattggattcttacgttcttatatcgctcctgcagcttctcctgcagagcggtcttatagtcatgatatagttttccctgcagcgccagcaagatattctcttcgaacagcttcagcaccacccggtccgcgcagtcgtaaccgctctcccgaataatcgcaccgatgatggcctccaccgcatccgccagaatggaatccttctcccggccgccgtacatttcttccccgtttcccagaaaaagaaagtcgcccaacccgatattccgggcaatggtcgccagcgaacgttcacagacaatgttggcgcgggtcttggaaaggaccccttccggctgattcggcattacctcgtacagcttgtttccgatgatggcatccaaatacgcatctccgatgaactccagccgttcgttattttccgaatacgccaaatcatgctcggaagcataggaactatgcgttagagcatgagtcagcaattttttgtcttgaaaagaatatcccagattgcgttccaggactgagtaatccttcatctattcctctcccgaagatttttccgtaatcgcattctcaatcagtgcggtgacgtcctgttccacgtacggaaccgcctttaagattgcattgtatacggcattcgccttggagcttccgtgaatcttcagtaccgggcccttcaatcccaggatcggagcaccaccctcttcggagtagtcgaactctttcttgatttctttcagcttgttgtaggacaacagcgcgccggcttttgccacaaggccttccgtcatcttctgcttaatgcgcttcatcaccgcaagggccacgccctcggaacttttcaggaacacgtttccggagaaaccgtccgttaccacaacatcacagcatccgaacggcacatctcggccttcgcaatttcccttgaaattgatgtccgcatttcgaaggagttcgaaagattccttgtgaagaggatcccccttctcttcttccgcgcccacgttcagaagcatcacttccggattctcgatgcctttcaccttttctacaaaaatacttcccataatgccgtactgcagcaggtattccggacgggactccgcgttggcgccgcaatccagaatcagggatgtatcgttcatgccgatcttcggaaagaacgccgcgattgccggtcgcttgatgccgcgaattcttcccagaataagcaagcccgcagaaagcagtgcgccggtgcttccgccggaaatgaatgcatccacttccccttctttcagcatgcgcattcccttagagatggaagaatccttcttcttccgaaccgccatcgccggcgactcgttgttggaaatcacttccgttgcgtttacgacttcaatattatctccgttccagttcagggcctgcaggcactcgttgatgcgctcctcccggccgatgatggaaacggtaccggaaatctcctttgccgcctgaacggcaccctttacgatttcctccggtgcatggtctcctcccatgccgtcaatcataatattcatagttttctcctgtttttgttcaacaaaacctaatgtgatattatatcacacttctttggtctttgtctttcaataatctataaaagaacgttagcgcaggcgaagttgtccgcaagccgcatcgatatcggcacccaaagtccgtcgaaccgtcaccgcaacgtgattctcttccaggattctgcggaaacgctgcaccgactctctgttcggcgtatcgtaaccggtgccctctaccttattcagcggaatcaaattcacgtgggtctgccagcccttcagccgacccgccagttccagcgcattctccctcgagtcgttaaagccatcaattaaggcgtactcgaaggtaatccgccgtccggtaaccttcgcatattcccggcagacttccataagctcatcgtatccgtacttgcgggtcaccggcatggactgccggcgaatcgcctcattcggtgcatgaagggagatggccaggtttacctgaggaaaatcctccatgaactttcggattcccggaatcacgccgcaggtggacacggtaatgtttcgatagctgaggttgtatccgtcgggatgatgaatcagtttcaggaaaccggccatgttttcatagttatcgaagggctcgccgatgcccatcatcaccacgtggttgatgtcctctcccgtcaggtttcgcatggccaatacctgggccagcatttctcccgccgtcaaacttcggtccagcccctttcgtgtggatgcacagaaagtgcaccccatccggcagcctacctgggatgagatgcagatggaattcccatagctgtatttcataaataccgattccacccggcttccgtcccggaattcgaagaggcacttgcgcgtgccgtcggtgcgggactgctggtcgtatatcacccggggaatatcgatgcagtaatgctcttttagtttctctcgaaaggttttcgacaggttgctcatttcatcaaagtcacaaacccctttcgacagccaccggaaaagctgattcgcccggaactttttttcacccaactcagaaacgaccccgactaattcgtcgggatcgtttccaagtatattctttaattctgtatttgaattgttcattatactctttctactgcaatgccggtatcgtgaccgttaatatcgaatacctcgatgccttccttcgcaacgatctcgtttgccagcgtctcagacatgatatggtcctttgctccgttaacggcattctgaatctcttcgtccgcagacagatagatccggatgtggtccatcatctcaaagtcgtgctgctttctcagctgctgtaccttggaaatgatttcacgaacatatccttcatcgatcagctccggtgtcagagtggtttccagaatggtgaatacgttgttctccataccaaccacgaagccttcctttgcggaaatacgaacatccaggtaattttccggaatctcgtagtcttcgccgcccaggttcatggttacggatccgccctgaacttccgcaatcagcttcttggcatcgcattctgccagcttcttgccgaattccttgacgttcttgcccaatgcctttccggcttcacggaagtttggcttgatggagaagttcatgtatttatccagttccggttcaaacacaacgttctttacgttgagttcttcctgaatcagcggaatcaggtcgctgatgatggattcgtagcttccgtcgatgatgacttcctgaagcggctgacgaaccttcagcttttccttttcacgggttccacggcccaagttcaccagtgtttttaccaggcccattctctcctcaaccttctcgtcaatcagattctcatctgcttccggatagtatgcggtgtgaacggtttcttttccggtgagcttgatgtacatctcatcggaaatgaacggtgcaatcggtgcaatcagtttcgcaacacccaccagaatctcgtaggttgtagcgaatacactcttcttatcctcatccatctcttctgtgtagaatcttcttcttgcccggcggatgtaccagttggacagatcctctacgacgaaatcgttgatggttcgaaccattctcatatgctcataggaatccagcgcagcggtggcttcccggatgcacttgttgtatctggaaataatccagcggtccagctccggacgattctcgtacggaacctgaagggatgccacatccagatcctccaagttggagtacagcacgaagaagttgtagatgttcttcagggttccgaagaacttgctgactacttccttaacgccgtcctcatcgaaccgggttggggtccatgccggagaggtggataccaggtaccatctcaacgcatctgcgccgtatttgtccagcagttcaaacggagaaaccgtatttcctctggacttggacatcttctttccttctttgtccaggatcaggtcgttcaccagtacgttcttgtacggtgctcttcccatgatgaaagtggaaattgccatcagggagtagaaccaacctctggtctggtcgataccttcgcagataaagtctgccgggaacagttccttctcgaagcgttccttattctcaaatgggtagtgccactgagcatacggcatcgcaccggagtcgaaccagcagtccataacttccgggatacgggtcatggtcttaccgcattccggacaagtgagatgaatgtcatccacatacggacggtgcagatcgatggtctccggatcaacggcttcgatgcctttttccttcagttcttctctgctgccgatgcattccaggtgaccgcattcacagcgccagattggaatcggagttccccaatatctggatctggaaattgcccagtccttgacttctgccagccagttgccgaaacgcttctcgccgacgaaaggcgggtaccagttcacggtgttgttgttctctaccagctgatccttcagcttgctcatctcgatataccagcccggctttgcatagtaaaccagcggagtgccgcatctccagcagtgcggatagttgtggaccatcttctgcttggagtataccttgttctctcctgccagatacttgagaatctcaacatccaggccatcttccattacgaagcggccggcccatggagtctcggtaaatctgcccttctcgtctaccggttttgcaaacggaacgttgtagcgacgacatgtgttgtagtcgtcttcaccaaatgcataagcggtgtgaaccagaccggtaccgtcctcggtgctgacataatccgcgcatgcaacgaagaatgccttcttgtctccgtcttccatctttacgaaaggcatgagctgctcatattcctgatactccagatccttacccttcatggtttccagaacttcatacttgccttctcccagcaccttgtctgccaaagcctgagcgacgatcagcacgttgccttcttccggtccttccagcatcttcgcacggatgtaatccacttccgggccaacggtaatcagcacgttggacggcagggtccacggtgtggtggtccatgccaggaagtactcgttgtccatgcccttgcgcttgaacttgcaagttacggtcagtacggaaatctccttgtatccctgtgcaacctcgtgggaagccagacctgttccgcagcgagcgcagtacggctgtaccttatgaccttcgtaaatcagtccggcatcgaagaacttcttcagaatccaccagccggattcaatataatcgttcttgtatgtaatatacggatcatccaagtccgccatgtatgccatgcggtcggacatatccgtccacatgctggtgtacttgaatacggactcacggcacttctcgttgaattccttaatgccgtacttctcgatgtcctgctttccgttcattcccagctgcttctcaacctcaatctcaaccggcagtccgtgggtatcccatccggcctttctcttaacctggaatcccttcatcgtcttgtaccgattaatggagtccttcagagttctcgccataacgtggtgaatacccggcttgccgtttgctgtcggtggtccttcgaaaaagacgaagcttgggcaatcttctctttcctttacgcagcggtccagaaggtcaatgtctttccaatgattgacctgttcctcctgggtttctgcgacggatttttctgataaattctcaaacatgttccaattccttccgtcgatttattgaatgaataaaaagaaatgcgattattcggaggcttccggagaatcatacttcttttgacccaatctaaaattagtttctaactaatacaatatagtataaaatttattaaaagtcaacaattaaagcaaatgcagggaacaatttcctgcccctgcattcgcaatttaactactttaccttaaccttctttgttccggaccaagatccgtagtatgtcttaccgttaatcttcttatagcttcgaatcttcgtgtaataatacttcttcttagaaagtttcttaacggtcttggaagaacctgtacttgtatagtactttgccttctttgttcctttcttcaaaacataaatctgataagtctggcttccaccaccaagcttcttccattttacagtgagtttcttctttccgtctttaacagaaggagtcttcatctttgctggggtaataacgtatgttttctttattgttccttcataatcattaattccggtaacggttacggtatatgaacccaaattctttcttccggaagaatacgttaccttatactgatcggtcggaacttcatcatcatcttctccgtatacttctacacgaggagtatgaaccttgccgttgtatgtatacttcgatgcagaaagatatacatccgcaatctgagtcttcgtttccggttttggcggttcggatggctcagacggttccggtttggaaggttccggtttttccgtgtttccgcccccttcactcgggtcggtgtacttctttacaacattaaaggagaattccgcttcgccggtatatttggagccggttcctcttactgtaaaggaataagttcccggcttcgagatttcaccggtatctccttccagaacatagtcttcgccttcattcagtctggtagtagtcttaaagcatcgaattccttcgactctaagctgaacagtctgagtagctgacaatagactaagctccttatcgtaaatcggttccagtgctccatcagtagaaatatcgcatttcttaatagtagccgttcccagtgttccggatttgctattgtattcgctgtttccctgcacctcataaacgatggtgtatgttcccgggttgtatccggttaccttatccagttcatccggtgaatacatatagttttcgtccttcagaccgattgtcaatgtaccgcctgttgtttctgctttcttgcagagctgctgatcctttctgttgtattccaagttttctgccagtgtagcggtaactatcggatctttcttttcttccggctttggattttctgtagagccaccacctgttcccggatccggagtttcgcccggatttggctttggtttttctgtttcaccaccgcttggcttatccgtggactcttccttcggagcatatacggtataggttacagcctttccgccggtaaagtttccctttcccttcacggtaatggtatgatttcccggctctgttgttgtggtatctccttccaatgtgtaatctgttccttctttcaacggcttatcatcaagtgttatgttgagaatcggagtaatttcttcgcccttattggtctgatcgaatctataatttccacctttcagaccaatagacgctgttgtgattttaagcggctgaacagtgaaggtctttgtaatgatatcactgtctgaatacttgtcatttccgagagctttacacctcacctcataagtccctgcattttttgcttccggaatagtctccgtccattctcctccgtttacgctgtaaacaatcttgcagccatacgaactgctcttaccgacgaaaagattaactccatccggagaataagtacatgtctcttcttcactgaaggattcagaaatatttgcctttggcttcgctttttctcggattacaacggtatgttccttctccggaatatccgaatatccctcatttccttctaccttataggtaatcttgtatgttcccggtttcttcaccttcttataagaacttgaactccattctccatcattaatcttatacttaaaggttccgttttcgcaaacgaggagattgaaaatcgcaatagcatttccattatactcttggtcttctgcaaacttaatatcgaaggttggagctgcggccttaacgtgaatcgtctttgtcttttccggaatttccttaaaattcttcgagcttggaacccggtagcttaccgtataatcccctgctttagttgctttcgggcattccgttgtccattctccgttatttaccttatattcaatcttctgttcataatttattcctgccataagagccggagacttgtcgtttcccgtcttatgaacgagatatactttgttgtcataagcgatggtatcatctgcaaattctgcatcgcattttggttctgccttttcaatggagacggtatattcttctgattccatcggaagaacataaggcagctcttccgtcttatactgcaccttatgctcgcctgcatccattgcagttgcttctaacgtccatttcccatcatctactttatagtaaattgaatttccgtttcctgttgctttttctaccaagtcctggttatttccgttatacacaagccccttcttaagggatacagagactcttggctggcatttcttaatttcaacttcgtgagtttttgccggaacgtcgttatagttcttatccccgtctacgcgataggaaatagtgtatttgcccggcttgctttcagtcggaagtgcattagaccatttatcatccttcgagctggagaacatcagcgtacctcctgttgtctctgcctttgttaccagtttaatgtccttcccctgtgcatcgtaatccactaccaggtcttccggattcttgaattcaacatttaccaccggagttgctttcttaatagtaacagtcaattcttgttctgccttatcccggtaataatccgttccttctaccttatagtaaattttatactctcccgcatccgtcgcagttggaatcttttcgctccagtctgtctttcttgttttccactcgaattttttctcttcctcgttgtatacgtattctttcttatccatacaatacagcagcttaccgccggatgttttcgattcggacactaagttctgcgattccttattatatgttaagtttgccggggttacagttacttccggagtatatttcgcctctttccattctttctttgcttggttgaccttatctaaatatggcttttcgaaagcatttacttctgctagccattcgtctgcggtatagacttttctttctgatgaaaactcgatatctgcatctccaaaacgtgcagcaaaaacatttttatattgtccaaatccaactccggtcccagtagtcatgcaaagcttataatggccaactttatgggaattgtcaggcttcatatattccactttcccttcatggttaccgtaaccagcatcataatctggcttttcggaatcgtaccaaagttctattggattctgctcaatatcagagaaagcaagacattctccaaatcctgcattaggcattcctccctcataaaaaagcacatgaccttcgctaattccacaaccatttgtaactgtacttgacatcattgctgccgaaattaatgttggacaaagttttaatggagcatgtgcttctttttccgtagaaaaattagtatctttagatcttctatcatttaacgagtttaaccaatcggcttgcttttttaaatttttgaaagaaaacagctctttattcatatcatcttttgttttttcgtaagctgttcttattttttcgtttttagaattagaaagtgctttttttgatcctctattttccaattatctggcattaaatcatctagaaatttaataggagcttgctcatactcttttaaagcttgctcatacttttgctttgctttatcaacatttactattaactcgctgtcagaagcatagacgggagttaataacatagaaccagttaaagccattgttaaaaagaataaaaaatatttttttgcttttttaatcataaaccgcaccttcttaccttatatcaatattattcttacgcctctctcgttggcatagtttgaggctaatctaccaacatttaaagtgttgtagttgaaaaacatctatagtcattataacacttcagcaattaacatttttcttcgaataggaatatatgcaagaaaaatacatcttcctattcaaactccctctttaaatactacaaaacaaatgagcaagcattccgcctgctcatttggatgtgctcttctacagctcttccaccttatagatattatatccctcatagtaatagctgtgatcgattcctttcatatcaacaacctgctgtatttctttcttgaacatcaagtcgagccatatgcgcatgcttctgccattcccttctctgaacggatgggcaatgttcaccgttcgtatgcttcctgcaaaatcatatatttcaccaaaaagcactctatgaatctccgagagtgcttcgaaagaacccggcgttagttcatcaagtcttccactttcaaacagccaaacagccttcttcttgctaatctgttcttgaactctctcaagttccgcagagtcggttatttccaaaatattttcaagtgccatgatacttctcttgatttatacgcttaagtgcgtcttccaatccgttggaagattcatcgctttaagactaactacgccactgttattttgaatcaatttatcaaaagcgtctacaaatactacccactcttcatcggaggaacgcaaatatttcatcgccagcaagatttgatagagcccattatgtgccgatggtggtgcaatcttatctgaatctagaatttccggtgtcgtatgtattgtgcgattataaactctggaattatgggcacacatattgcgcagtaccgaaacagcctgcacccacgaagcaagcatcttctgcgccggaactaccgaatttccttttggggatttataccggtaattagctgccaagaaagaatatgaacttccattacctgtttttaaatttttaataatcttcgaaagcgtgccgaacgaaaggacttcaactgctgcccatacaggaacttccccttcataattgtcataattgtgtttgataaacacatcattagagcgagcaatttccgatgctactgcagccatattccgccaatataacttcttttctttaaaaatcgatgaatcttgcaagacaagtggctcgccgtgtataagcagtgcatctactaatcgtgcccgcaaagctacttcaattttggaaatcattgaaaaaaccaactccgatagttcttgatcaaatgtatatatccccaaaatatcttcaaattttgttcccggaacatatttcttagttgaattatcatataattggaatgaatatcctcgcaaacgataaaatcccactgcttttaatgccttctctacatcctcacgagaagcaatctccatccctgcatctacataagattgcacttgttgttctattgttaatatttgttttggataccgatacataaaacaccccacaaataaaaaaagtcccaccgggttgcgcatggaaaccagaggcgtggtgggttctgttattgtaattatacaattttcaaaacgaatgtcaagcttgctttcatgaaaaaatgaaaagaatccattaccccaaacgcagccgctctttcagttcctccagcagcgcctcatggtcgtggtgctccagcttcgggaacgcccgcatcaaccggccataaccgaaatgccgtctccggcgacaagtatcgcagaactcttcctttcgtcggtccagttccttccgtc

SEQ ID NO: 118 - DNA, 7572 bp, Unknown
  16S sequences of unknown bacteria
cagacctactttgtagatctgactttttcagtgcccttgaaatatcaagggttttcaggctttgtgctttatagttgcacaggtttggcgcgctgaagaagattcgaactcccgaccttctggtccgtagccagacgctctatccagctgagctatcagcgcatacagacaattttttgactgccatagtataatatcatatcttgagaataaaatcaagtgttattttttatttttttaatttttttaaagctgccgatcggtgcattgctatttacttttttgctttcgtattgtataatgcttctgaaggtgatgtttttgcagtacagagaagacgacaacaatatatattcaagctcgggcagacgcaatacgccgcagcgttatgaggatatttcttcggtttccaagcctcgcagatcaaaaggcaagcgccgtaaaaaaaggcgtgtgctgaagaatctgctgattgcagtgatctgcctgctgacagcggcatgcgcgggattttatctctatgcctacaggctgataaatacagtcaagcgcactccgcttgataagaacgacataggcataaactccgaagagccgcagttgtacgaaaatgtgcgcaacatagcgcttttgggacttgacacaaggcaggataacaatgtaggccgcagcgacgcgatagtaattctgacggtcgataaggcgcataacaagctgaagctgacctcaattgccagagacacctatgtcgcaatcgaggggcattcaaaggacaagcttacccacgcctatgcctacggcaaatcgcagctggcggtgaagacccttaatcagaatttcaatttggaaataagcgactatgtaaccatgaactttttcgggcttgcgcgggttatagattacataaacggcgttaccgttaatgtgacggaggcggaaaaaaacgagctgaaccgaaatattttcccggaaatgcgctcgcttaagatggagtgccccgacattgcctctgcaggagagcaaacactcaacggagcacaggcggtatgctatgcgagaatacggcatattgacagtgatgttcagcgcggcaaccgccaaaagacagtgcttatggcgatgttcaacaaggcaaagagcctgggcgctttaaagctgccgcagtttgcgcagatgtttttgaaggaatgcgaaacctcgctttcggccaacgatattatttcactgggctcgtgggggctgatttcgtcccccgagtttgaacagctgagcgttccgaacgaaagcataccatcttcggggaaaataatcaaaggcgtatggtactatgtatacgatcttgaaaccgcaaaaaacaatattaaggactttatattggaagaaaacagttattcgacgcagaaggcggacggcggcgctgccgaataacgggcttgaggtgattgcttgaaaagacatattgttatttccgatcccgacagacagaacgcgcggcttttaaaggcgctgctttcaaaggcgggctatgagctttcatactctgccaaccctgcaatttgccgtgctgaaatttcggcaaatccgccggatattcttatcaccgatccgctttatccctcttccgacggcagaagactcataaaagcagccctggatgccggctgcggtgcggtaatcgccgtatcggcagcggcgggtgaacgcgccgtgaccgatgttttggatgccggtgcggacgattttatccgcaagccgtttctgtcgggcgagcttttggctcgggtgcgagcctgcgttcgccggattgaggcgcttgaagaggcgcgcggcgagagcgtttctgcggtctatttaagcggcgggctgaaggtggagtttaacagccgccgagttacggtggacggcgcagatgtgcaccttacgaaaaacgaattcaaaattctcgcactgctgtgcagatattccggccgtgtggtgaccggcaagcatataataaaaaccgtatggggcgccggaatttccgacggcagcggaattttaagggtaaatatagccaatcttcgcaaaaagattgaacgcgattcatcaagcccgatttacttatttaccgaaagcggcgtcggctacagaatggcggaatccgaagcggagcttacttcataaaaatgtaatcaaagcagcggctctgcgccatggaaacatagtcgtctcccgctattataacatggtcgagcagctttgcattgatatttttaagggttctgtctatcagctcggttatttttatgtcctcctcgctcggcagcgccacgccgcccgggtgattgtgcgcaatggcaacgcataccgctcttcttttgagtacaacctccacgatatcacgcacggacaccgtcacctcggatacatttccgctcgagagaacatcataccccagcaccttgcccgaggcattgagtgaaagcattgagaatacctctttatcatatccgaaatatttgcccaaaagatactgcgatatgtcatcaatgtttttaagcaccttatctgccgagtttttctcgctcgaataaattcttgccacagggagaataagctttaaaagcgataccgaaaccttgcttattccctttacctgcataagctgctccgcaggtgcgtcgagtatgccggatatcgatccgaagcgttccaaaagcgcgtgcgcggtttcatttgtgtccttttgcggtatagagtgaaaaaggatatattcaaccaccttgtgcggcggtgtcgattcactgattcccttaaacaaaaactcatctctcaccctgtcgcggtgaccgctgtgaacactttttgccaattatgacactccttccggattatccgatattataacacattatacaatatattcttcaagattcaagaggctttcctatgaaaatttttaccgtaaccaaaaacgatgcgtcccagcggctggacaggttcataaccaaaaactgccctgagctgcctgctgccttaatgtttaaatacataaggatcaaaagaataaaggtcaacggaaaacgtgcgcagataaacaccaggctttccgagggcgataccgtcgaggcgtatataaacgatgaatttttaaaacaaaaagcgccgaagtacgactttatgtcagccccggcaagacttaacattgtttatgaggacgaaaacattctgctggcggataagccgcagggtctgctagtccacccggacaaaaacgaatacggagatactctcatagcgaggatacaacgctacctttacgaaaagggcgaataccgccccgatgatgaaaacagcttccgccccgcacttgcgaaccggattgacaggaacaccggcggaatagtaatagcggcaaaaaacgccgcggcgctccgcgtgctgtgcgataaaataaaatcccgcgaaatagaaaagcactatctcgcggtggttcacggtattcccgaaaaaaaagaagcgaccttggagggctttcttgaaaaaaatgccgagcaaaatcgcgtttaccttaaaaataaaaaaaccgattcctcgctcacaataaaaacacgctaccgcgttatagcgagcaaaaacggactgtccctaatagaaattgacctgctcacaggaagaacgcaccaaataagggcgcacatggcgtctatcggtcatccgcttttgggagacggcaaatacggcaagctcggcggcgataaaaaggcaggcttttcgcgccaggcgctttattcctaccgcctgaaattcgccttcacctccgacgcagagccgttaaattacctgaacggcaaggaattcaaggtgcatgaggtctggtttgccgaacagcttttcccggagcacacagccgggctgattcaaaagccgtgatttgcagggaaaacccttactccttacaaattaaaagcttgccttgcggacaccggaggtctttaccacgcgcagtctgcggcggcgaataaggcaggcaattcgcttttcgaaggcaacgagcctgtcctcatggaatattccccaaagaacggcggcaaacattgcaaactcaaaaactgttcttaaaatcatagcgggattcatatttttctcctttcgaacaaatgttcgatatctgtattataaactttgattcgacatttgtcaagctttttttctttattttacgaacattattttacaacagcatctgtccaataaacgggacagatgctgcgatttttttgcttgacattagaaatatatctgttataatataataaactgtctcatatgagacaaaaacattgaggtatcttatgtcggaatacaaaggtttgtttttgctcgccggcttatccgaggaggaaaaaaagaaaataatttcctgtctgcctagggctgtgaaattcaaaaagggtgaaacggtttattcgcccgaaagctttcgccgcgccgtcggttttgtgaaatcgggcttggtgactgcggttacgaacaattcgcagcaaagcattatgaagcgtattcccgcaggctcctgcttcggggcggcggcggttttcggtactgccgatgcatatgtcagcaccgtcacggcggaggaggacacggaaatatgctttataaccgaggaaatgttggcttcgctctttgaaaagcatccgcatgcggcaataaactatattgactttttatccgacagaataagatttctcaatgccagaatcagcgttatttcctgctccgacgcggagaacacggtgcttaaataccttactctttccgccgacgaaaacggatacgctgccattcccaaaagtatgaccgagcttgcaagcatgctcggactcggcagagcaagcctttaccgcagccttgagtcgcttgaaaagcacgggattattataagggaaaataacaggataaaggtgacagaaaaatgaaaaaaattatcagtttgcttatggctgcggctatggtgttctcgtttgccgcctgcggcacgaagaatgaaagcagcgagcctcagagctcggcttcttccgtaagctccacacccgaaaagcttgacactgcctgcaatgtatttgcgctcaacgggcctaccggcataggactggctccgcttatgaaaaaggcggaggataaaacaggcagactcaactacactatttcaaccgtaggcagcaatgatgagatcgttgccaagctcacaaacggcgaagcggacattgccgcaatagccacaaacctcgcctccaccctttacaaaaagaccgataaaggtataaaggtacttgcggctaatactttaggcgttctttgccttgtaacaaaaggtgaagaaataaccgacattaaatcgttaaagggcaagaccgtatatgctacgggtcagggtgcaaaccccgaatacataataaattatatatttgaaaagaacggcttgaaggttggaacagatgttactcttaactttgtttcacagccgaccgagcttgttaccgcctttgcgcagaatgaaaagataatcgcggttgctccccagccggttgccacaaccattaccattaaggcgcagggctcgaccatcgcgctcgatatgaacaaagagtgggataaggtaagcgatacaaagcttgttatgggatgcatagttgttcgcaaggaatatgccgagcaaaaccccgacgccgttaaaatatttatggaggaatatgaggaatcggttaaatcggtcaattcagaccccgataccgccgcctctctctgcgagaaatacggtatagtcgcagccgccgcaatagccaaaaaggcactgccctactgcaacatagtatttgaagacggaaaagagctcaaaaccgacctttcggcatatttgaagtttctcttcgacgccaacccaaagagcataggcggagcattgccggatgatgccttctattatgaagcaaagtagatttaaaaatattttaaggcgggctgccgtggcgcttttatggcttgcggtatggcagctcgccgctgccgccgtggacaaagaattgcttattccttacccgcgcgcggtttttttaacattggcggagcttggaaaaacagccgaattttggcgcgccgtcctgctcacaatgttaagaatcacgtcaggatatgtttcggggcttattgtcggctcggtatgcgcggtattgtcggcgcgatttcgcgttttcagggatattttcgcgcccattctgcaccttatacgcgcagttcccgtagcttcctttataattttagcgctcgtatggataaaaagtgagtatttgtccgttttcatatcgtttttaatggtcttacccatgatatggtcaaatattgaaaacggaatacgcaatctcgataacggctatgccgaaatgggcagagtcttcggactttccccgcttaaaattctttttaagatcaagctgccgctgataatgccttcctttacggccgcggcggtgaacgcgctgggctttgcgtggaaatcgggtgttgcggcggaggtcatctgccgacccgtaaattccataggcagactgctgcaggacgcaaagctgtatcttgaaacgccgcgcgttttcgcgcttacggcggtagtggcggcgctgtcattgcttattgagcttataattaaacggctggcacggaggtatttgaatgataaaaatacatgatctttcgtttgcctacggtgaaaagcagattttcggcggcttctctctcgaaattcccgacggcgcgcgaagctgcattttcggcggaagcgggtgcgggaaaacaacccttttgcggctgataacgggacttcaagagcctgcggacggcagcattgaaacgggcggcgtgcgcttttccgccgtttttcaggaggacaggctgctgccctttaaaaccgtgcttgaaaatataacccttatcggcgcggaaaaagaaaccgcgctttatatgctggcgcagctgggaatagcggaagctgcggataaatacccgtcggagctgtcaggcggaatgcgccgccgtgccgcaatagcccgcgcgctttcagccgaatacggctgccttatattggatgagccgttcgcggggcttgataaagaaaatatcgaaaaagccgcagccctcatatccgaaagcgtcggggaaagaacccttatagcggttactcattcagagcgcgaggcagagctgctcggcgcagaaataatcatgttataatcacggcgattatagccagagcctccggctgagccgaaggcttgagtcaccccggaggggcgcgttacatcccccctcaaggggtgctgaaactgtatcaatctgcttgccgaaggctttaatcaacccgctccgaatatggtttgggtatgcaattttgcctatgcccgacagacgcagccgtaaatccttgagcgagttatatcacagtcttttcacttacattaacgatttttacaattctgtcagactgttatggtacaatagataggtaacaaaaaaagaagaaaattcatctcaaatatg

SEQ ID NO: 119 - DNA, 32759 bp, Unknown
  16S sequences of unknown bacteria
acttcccagccgttgccgtggcgtccgtctgtaccagcagggccaattgttcccccgtggcgatttgatacggatccccttgggttccctggcctccggcatattcggcggctgtcccgcccgaccacacggcgctgtcatcgaagagcgggaatgccaacagctgcggcgtaccgccttccactgttcgccataccgtgtcgaagtcaaatcccgtcatgctggtcttggcagcatcaccaatcatatgccccggctccagttcggtcacactgtactgcccctgcgttgcatagacattctccagtaccatctttgcgctgacgtttcccaaggccgaatcgcggttttcaccgtatacgtagcatcgacgaataacggtgttattcgtatccgccaaaccccacagagaaccgaccaggccgcctttcttccctgtcgctgtcagcgaaccggtaaagaagctgtcttccatacacaccggccgcggcgtagctcccacgagcccgccgacgtctgctccctgtatctttacactggaagcagcaaaacagttgctgattcgaggaggcgtcccgtccatatgctctatataagccgcgatactaccaacaaactttgctttcagatcagcctttacaattccgacgtttttcacgacggcgcccggcccaatgaagcagaacaatcccgcgcgggtcgtggtcgtgacgtccgcgtcgataaacagtccctctaccacatgcccctgcccgtccaattggccacgaaaactcacgtcggactggacccagggggtcgccgactgtttccaatcctcggcagaggtatcattgagacggatatcctccgtcaggacgtaatacttcccagccgttgccgtggcgtccgtctgtaccagcagggccaattgttcccctgtggcgatttgatacggatcctcttgggttccctggcccccggcatattcggcggctgtcccgcccgaccatacagtgctcgcggcggcaacgagttgtccctgataccccgctgtaaacggcaggcacatggcggcgaccagcgtcagggacagaacagctttcccgatgcgctttcttttcatagagagccctcctttttgcaaaaattatgtatatgtatttgaattatgaccggagaattccggtcaactacattgttttctatatttcatgcctgcagcgacagcgagggcaccgctgcccgccaaaagtaaaaacgccgctgctaccggcagccggcctcctgtcggtacattgggttccggctcctggcggatgaatcggaaagtggctcttagatttccggatttatagacatgggataagagcagacaaccatttttatccaccaaattggtcacatcctgctcgtctatgaatacgctttcgatttcatagcccttgtccggcacaatccgaacggttatatcacgcatgtgtgcgacgctgaactgattgtcgattttagtgccatcagacaaatagaaagaaccgccggtatgataggccacggataccgtatgcgtttgcggtacgacagctttcagaataacctgcccctcctcggcggaagccgccagacaggagcctcccagtaaaacaagcaaacagatgcaggctttaataaaacttttcatgcctctccgtcctttccaagcgatatatccagcagcttccacctggagggggatgagcccgctgacacgactgctgcgccatgtcagcggactctccctattttccgacaaacagccgtctgttctcaaatgcgaccttcgctgagtctgcgagcttctcaagacaccattcaggcgattgcctcataggtggccgtgaaggtcagcgtatccgtgtatgtgcccgccagaatcgcactgtcacgatcggtaatcgtcagattaatagtttccaggggatctgtcttcgccgtgaacttccacacttccttgctcagggtatacgtggcgctggatgtgtcgtttttcagtttgtggccgttggcggaagtcaccgccaccttgacttccttgccgttctcgatggcgcacgcggacaagccgatatcgccgattttctgagccccatccttggctatatccacgtttacagtaccgctgggaatcgatagcgtgtaagcgacgcctttcgacgcgttcactgtcaatttggtcgagcccggctcgctgatctcctcggccgagacagcgaaagagaacagagccgtaatcatggtgagagccgccagtatagccacctttttcatggtaatcttcctttcgtttgtatctgaaatttttcaggaaacaaatgtcgtaaagtatgagaacggctgtgtttgtcaggaaaaataatcttatgccacgataagttcaacctgaatgtccgccccgttgaggggcgccagtgattccagatggaagcactcgtattttatcgtggcggcgtaggtgcctttggggagaattttttctaaaccggcttcgtagatggctttgcccggcgccagcatcttggaggcatacagctcccggtcgtccaccagaatgtggatgacaaaatagcagggattaccctcgggattcatcagggcgacgctcagctttcccgttttggcatccgccgtaatactcttgtagccgggaatctgggtggaggcggcgttcggatttcctttattgtcgggcttctcccccacatagtcctccgcgtccttatccaaatctgcggaggcgatcgaaacggagcttgccggcgcggcagaaaaactctccaggacggtacgcagagcggaccaggaaaaacagatcccaagcactgccgcgcaaaggaccgccgtaaaggcaagacgcgtgggccacactcttcgtatgagtgccacatatactccctgcccacaccgccaataccctttttccgcgtatagcagccgtttatgacggcgatacggctgtatccgctcatcaggaagccggatttctcccagaattttatagctgccctgggggtgaaaggctttgagctgtgccctggtgaagcagcggatggttttccctcccacgcgaagttttccggcatggttttccgcacttgtttcaagggatacgcgtatgtccatcatgcgctcctttatgttaatccggagtcatagctgacggtaaacgtaacggtatcgctgtagacacccgccagcgaggcgttgtcccaatcccgctgcgtaatggaaatgaagagcggctgcgtcttgttctggtcgccgacaacaaaatcgacggaggtgaacggctgccggttatcacccaacaacgcgtatgggatcgtatcccttccgttgccgtgtgtcagggccgccttatgggtcgccgaaacggtcaggataccggttttctccagttgcagccgcatacagacaataggggccagcggcttctcccccggctgggtaatcgtctctagagaggacgggatggaaacgatgtaatccacgagtatttccggcgtgtcgtcaaagagcgggaatgccagcagctgcggcgtaccgccttccaccgtcctccataccgtgtcgaagtcaaatcccgtcatgctggtcttcgccgtgtcgcctatcatatgccccggttccagctcggtcacaccggtctgcccccgcgttgcatagacattctccagcaccatctttgtgctgacgtttcccaaggccgaatcgcggttttcaccgtatacgtagcatctgcgaataacggtgttattcgcatccgccgctccccacagagaaccgaccaggccgcctttcttccctgtcgctgtcagcgaaccggtaaagaagctgtcttccatacacaccggccgcggcgtagctcccacgagcccgccgacgtctgctccctgtatctttacactggaagcagcaaaacagttgctgattcgaggaggcgtcccgtccatatgctctatataagccgcgatactaccaacaaactttgctttcagatcagcctttacaattccgacgtttttcacgacggcgcccggcccaatgaagcagaacaatcccgcgcgggtcgtggtcgtgacgtccgcgtcgataaacagtccctctaccacatgcccctgcccgtccaattggccacgaaaactcacgtcggactggacccagggggtcgccgactgtttccaatcctcggcagaggtatcattgagacggatatcctccgtcaggacgtaatacttcccagccgttgccgtggcgtccgtctgtaccagcagggccaattgttcccctgtggcgatttgatacggatcctcttgggttccctggcccccggcatattcggcggctgtcccgccagaccacacggcgctgtcgtcaaagagcgggaatacccgcagctgcggcgtaccgccttccaccgtccgccataccgtgtcgaagtcaaatcccgtcatgctggtcttcgccgcgtcgcctatcatatgccccggttccagctcggtcacaccggtctgcccttgcgttgcatagacattctccagcaccatctttgcgctgacgtttcccaaggcggaatcgcgattttcaccgtatacgtagcatctgcgaataacggtgttattcgcatccgccgctccccacagagaaccgaccaggccgcctttcttccctgtcgctgtcagcgaaccggtaaagaagctgtcttccatacacaccggccgcggcgtagctcccacgagcccgccgacgtctgctccctgtatctttacactggaagcagcaaaacagttgctgattcgaggaggcgtcccgtccatatgctctatataagccgcgatactaccaacaaactttgctttcagatcagcctttacaattccgacgtttttcacgacggcgcccggcccaatgaagcagaacaatcccgcgcgggtcgtggtcgtgacgtccgcgtcgataaacagtccctctaccacatgcccctgcccgtccaattggccacgaaaactcacgtcggactggacccagggggtcgccgactgtttccaatcctcggcagaggtatcattgagacggatatcctccgtcaggacgtaatacttcccagccgttgccgtggcgtccgtctgtaccagcagggccaattgttcccctgtggcgatttgatacggatcctcttgggttccctggcccccggcatattcggcggctgtcccgcccgaccatacagtgctcgcggcggcaacgagttgtccctgataccccgctgtaaacggcaggcacatggcggcgaccagcgtcagggacagaacagctttcccgatgcgctttcttttcatagagagctctccttttttgcaaaaaagcacgggttatttatataacttctcctgtttctccaaaaagctgttgatagtctttacgtcgttagccaccacatttttcaacgaatcaatctgctgtgccacctgcgcgggatcggctttcacaatgtcggtaaacttcgcttctgtggatcccgtaatcttaaccagtccccgcaggagatagtactccttttgcgccgcatttttggaagtcagcttgaaaaagaagttggatgcctctttattgataaacgcctcatcagtgttgtaattgttgacgtctaggtaataccgcagaaagataccggcggccacaggatttttagcgcccttaatgataccccagccacggaacagactggccggcttcgcttttgtgttggcatcaaagtcgggcaaataggtaaagccgatataatcgggattcatttccgcccaatatcccgtcttttttaatccaaacgcgtttgtaacgcaaagaccggttttaccgttcatgaaagcatcgcggtccgtggttaatccctctttgttacatttggcggcaaactggtacacctttgtcagcatgggattctggatatcgctgaccatccttccgttactgagcttgaaaaatcccgttccaaacatggcgggaagaatccgaggatccatatatccgcctttgtattggcttcccagttcggagacctgcttcataaccgtgtacatcgcatcaaacgtccagactcccgcctcgtaatactcggcaggagtacggatattgttatcctccaacagctttttgttaaagaataccatgtccgtttccgaccagatgttgcctacagtattgcacaagtacggcttgcctcctaggctggaagcagcaaaggtgctggcgtcccaaataggatcgctcatatcgatttgggatacttccaacggctgcagcacggagaacgatgcgggaaactcgttgttgtcgaagcagatgtccggcgcatcttttgccgcaatcatgctggtaagtgtctgaatatagttagtctgcgccaccatgtccacctggaccttaataccgtatttcttctcaaacgccgtcacgaccggaccgtcctcgttcgcctgtgggtctttccaagtagcaaagcgcaccgtggtcccgcgatatttttcaggatccaccttcccggcaggggtactgctgttcccacgtgttgtagaactcgtcttttcaccacttaccgtggttttcacggcggagtccgcgccggaagtggtctctccgctgacatctgaagacacgctggcgccagatataccgctggttgtaccgccgatcgtgacgctctctcccgtgctctgcgaaccggattggccgggcccattcaactgtttgccgctgcatccggcgagaatcgacaacgttaaggacaccgtcgatgccagagtaatgatgcgatactttgctttcattaaaaactcctccttgtctatttgcgtatatgtttctatcctgtaatacccacacggtctatgctttcgataaaccagcgctgaacaaccataaacaccaacagcaccgggataataaacatcaaacagccggccatcagataggccatgccttccggattatcggccgtcaaccatatgccacgggtagtcagcatctcgttcaggttggaaagagcgacagccagcggataatctcgtctcatatacatagatgccagaaaatagtcgttccaatgccaaatcagggagaaaatcgtcacggtcaggataacgacacccgaggacggaactgctatagagacaaacgtgcgaatcggaccggcaccgtcaatccatgccgcctcctccagctcagatggaagtcccttaaaaaactgaatataaatgtaaatcaatatgccggaacgcagaccgacagcaaatagcgacggcaaataaaacgtcagctcggttcccagtaggttcggtcgcaaatcgatgccggagacgtcttgaaacagaccaagtattcccagtacatccatcttcgaaaagttaatcaccagtggaattataatcatgggagcaggaaccataatcgtcacaaacagcaacgccatcagaagcttgcgaatcttaaagcgaaaacgggcaaaaccataagcgacaaccgcacaggtaacaacttcgattagtgcgctgaccacctcaagccggagcgtcgccagcagggcgtttccgtaatccatcacctcgtatgtaaaccggaagttctccagcgtcaccgagctaggcagccaaatccgccccggatctaggaaagcgtctcgtgtactgatggaggacacgatcatataaaacaatggataaagaatgatatagccaattgccagcaggataagtagcctagccacgctgtaaaggccgtgcttgagccgggatacccggcgcaccgtccggttcagactgtccgagcggtttgtcgggctgaggatttcctccagacttctcaaacgattcccctcctttcaatcccaacgttttaccaggaagcagtgataagcccataccaatatgcccattatgaaaccgacaatcataaaatacatccaaagcatcgccgaggtttcatcatagtttccaccctgcatctgcgtgtaggcccggctgaccagcgtattgttcgcatcagtaaacagctcaatcatcgtaaagataccgaccaaaagagtcactctcgacagcatgggaaatgtaataaaccagaactcctcccatttggaagcgccctcaaccgtactggcttcatacagggatttcggaatggactgcagtcccgcgatgaacagtacaatctgtatcccgctcttccaaatcaggtcaaagatgctgttgataatatttttggcaaactcggcgatctgcggcggcagattcagccagcccatcacgtcttccacgctgaacatattgtcggttatggactcagacatggcagttgtcgtcatatcccggctggtcgtcataaacagcaaattcatcacaacgcccgtcgtgatgatcaccggcaaaaaatacagcacgcggaaaaacagccgcccgcgaaacctctgattcaaaatcagtgccagaatcaggctaaccaccaagatgagaggcagggaatatactaaggtagcgaccgaagaaagcagactgtcggtatacgtgggatcctccatcaccagcttgaagtaatgtcgaaagccggttagcgaggattccatgcctttatcggtcaaaacaaccgtggagaacgaataaaccacggattgaaacaacggaatagcgaagaacaggacgaagcctattatccatggagaaacaaacagcagtccataccgacttttcagggattcaataccccgtatttttcgttgctttacacggtctgtcatgccgctgcctcccctatccggtattgtcccgcttccacacgtcccagcggtgtgtcctgcgccgtttgaccgcgattgacaacaaccgccacgccgttttcataaaccgtcatacggactctgtcccccagtagcgtatgagacattatcgccacgccatcgatagactcgtaatagggcttgagcatgcgagccgtgtcgacgatggccgttctccaatccgcataaaccccactgcatagcgtcggggaaaccgcatccagcgccgcagcatcgtaggtatcaaataacgagtaagcggggctgcatccgccttcaacagcagccagcagcatatcgtcaggagacgatgctagattgacggcggcggaggacatcggtatatagcccttaaacacaatttgataaaaaggaatatcgtcatcaaatatctcgtgctgcgtggatcgcatcggcgcgcggaaaatgtgatcggcgcgcgaagcagcataggcgttagcctcggatacggcaagcttccgtccgctgctatgtatagtatccatgaaaaccgctatatctgaggacatcccccccctggaatgggttctccggctaccgtaatcggaataggcgaggctggacatcgttccaaggccgaatccctccacctcccatttcttcgtcttgctaatcagcttttgcgcgctgccggccaactgctcgcgcgccagcagcacataacgggtatctgccgccttgtttcgcagcgccacatggtacatggtcgggtacaccgtctgaccattggcccccttggctgtgtcaaaggttttcgaccaaccgtcgccggacgaggaaaaccgtaccgtgtcaaaatcaaagaatagaggaatcgtgttctcccggcagtaactggccagttcgttcatgatcttgactgaccccagcttgttatgcacggtatagccgccggcaatttttccgatattcaagccgctctcaccgaaaccgtccagcgacaccgcgggtgcggcgccggtttcctcatacagctcccggataatcgtttccgcctgcgccagcgtcgtcagaggtatcaacgtctcatagggaacgccgagaaacgacttcttcgccagtatgccgccgtttatgtacagactgaaagcgctgctcccgcgttccctgcgcgtcagcccatccgtccgaatcaggtactcacggtaggtcttggctatccccgtatagttggcatcgccgtcgtacaatggataaaatccaacggtcagtttgtcttcgacacgttcctccatatacttgacggactgcttgatcctattggtatacagctttgtttgcagattggcatagcctctcacgcgaaaggacgcataaaccgttgagtaccggagcgaggacgcgcctgctctcgcctcgatatacgctgtatcggcgccgctttcgataatcgcgcacatagcctggtttcccgctttcgcgccgtataccggcaaccgaacctcctcttgtgtcgcgggaagatcgtttctctcgacgatcggatcgtcgccgtacatttcctgggaatacgacagtcccgacgaagaaatcgttttgggatataccagcgccccggagccggacggcacaaataaatacccgtccttgccagtgttggcgaccgcgcagaaaaacggtgcgaccgccactttgaacactttattcctgccctcctggatttctgtcggatcgatcgttatttccatgccgctttcgcgcaggcgatattccaccggaacggcaaattcctcctggtcgaaaaaatacgtcactttcagtccgtcggataatggagaacaggacacacggccgttgcgcacagcaccattataggagttggacgtcaccagattttgggtgtcggcctcaatataatccactaaaatagcggattcgaccatgggatggttcttcaccggcaaaccgaactcatccagcaattgttccgaagagccggtcggcgttggactccaccggacattacggacaatatccaccaaggttatctgcttgttcttattgtcccattccaaacggaacctgctgttttccactaccgggccgttttcctgttctgtctcgtctatctgggtgccaaaggccggatagctcaccgtcgctctttgcgcacatccgctcaggaggcctagcaacaccaccatggtaaggacggctatccgacttatacgattatgttttctcattgattttctccactgtgttatcgatttctccctacatggtcatttccaaaaacagggtaacgaggaatccgaaaaattgctgcatcaggatgccaatcataatgactaaaaatacaatcaccgcaatgctaaacaccgtcagcgcgctggtgccaagaaaccgccccatgctgtagtcgtgaattttgatagttccaatcgtcagcaacagcaaggtatacaggaacatgaccgtttgcagtatgccgaggaactccgcttcggacggcagaaggatattggatagaactaagaatagaacacggcctagtatgacgggaatcaggctgtaacacgttacgattgcgatatcccgcaagcgacccttgccctccatcaatgtgcagaccgctttattgctcacgatccacaatacaatcagccctacgctacgagctagcacccacagggaattgaagtttgacggatcgtgaaaggtaaagagaaatcctccgcacagttcctgcaaaacggataatatataatacaggagaactagtacgccgcataaaagcagcgaaccctcctttttttcttttatttcgttgaaagactgaaccggccgaatcgccgtgttgagcattaagcgcaactgcttattttttatcggtgccagctttttacgcatggataacaccagcacggtcaacaatccaccaattaaaaccaagccgcaaggcaagagtatccagaaatactgggtcaaaaacgcgtttcgctgtttatcgaaagccagggcataggtgtccctgtcacatccttgccgggcgagggtcatcgcccgcgtatattctccttcggccagataggcgcgggcgagaccgctatacgccagctggcagttacgatcctgtcgcaggatttcctcccagtccgccttggcctcctgatattttcccgatagggtcaatgcgcgggtgtctcgcaggagggcgccgtagggcgtgctctggaacaccgtcaccgtgttttgaatgccgtcacagaccaatacctccgaaccgcggagcgcgatggcattcgccgccttaaaggtgccggcctgttctcctgttcccatgcctccgccgaaagtcgtcagtagccggcactcttgatcatacagaaacacccgtccataggttgtgtctaggcagtacatgaagccttcattgtccacggcaacgccaccgatatcctgtttgagcatttgaccggggtcaaaggtggtattgactccttcatcgacaaaattcacatcgtcggaattcagcacgttggagcccccgccggggttaagttttttaatctgtcccgtcatctggcttatatccgtaaacccggttgccgtataaacaaaattttccgcatcaatgcaaatatcgacgaaacaatacggcagcgccctgacgctggcctctttctttttattgttaacaaataaccgactccacaagcttgacagcgcgtctgtcagggtcccctttactttgtttgctccataaaacccggaaaacgtattatccgccgtatacagcaaagcaccataatacgaaccgtcactcagcacataggtgtaaccataggaatctaccgccaccttgatcggcagaaaacggaaatcatccggaatcagattggaatcgggcaacgtaagaatatccgttaccgtccccttagcgtcagccagcagtacccgctggttatcagtgtcacaaatataaatggtgccgtccgtatgcacataaacgctacgcgcgccctcaaagttcagctgttcgccgttatagttcagggatttcagttcccctacaagggtgtgattactatctgcaataatcaggcgggagttgccgccgtccagaagatagagattgccgctgctgtcggtgcatatgtcagacagctgtttaaattctttcacgccaagggaagcggcactgacgactgttttcaccgtatacgaaggctttgcgtaaaccgccttccggctgccggcggcactggtgtcctcccaataggtgtagctctcatacggaacctcttcaccggacacccaaaacgatgcgcatagtccaaacaacagtgtcagcacggttgccgccattatgattttcctcgtcatattcaaaggagtcctccatcctctgcttgcagcccgctgctattccttaatgcccgcgctgctcatggcctcgaccacattgctctgcgaaatcaagtacacaataaccggcggaatcatcataatcaccgagaccgccatcgcactgccggagcgcacaatacctcccgcggttacctgagccataatcataggcagcgttttcaactgctcgctgaatatggttccctgcggcactaacgcccatatatcccgaaacgcaaacaatgtcagcgtcagcagagcgggctttacaataggcaaaacgatacggaagaagctacgaaaatatcccgccccgtctatgtttgccgcctccagaagggtgtcgggcacatacccttctatatactgcttcatcaagaacacgcccagcgtcgtcgccatttgcggcatgatataaaccagataggtgtcaataatatgcagcttggataaaataaggtattggggcacggataaggtataggcgttgaacagcagcgcaaactgcacaatcatgaacagaacattccggaagcgaagcttggatttggacagcgcaaacgccgccattgcggaaatcaggatatacaaccccgtcgtaataacactgacgaatacactgttaaacaggtaccgggtcagcggcacgaattgatcagacagcagactgggcagggcgacgtaattttcaatggtcggccgccggacaaagaattgcggcggaaatagcaacaattcgtcaagcggcttaaaagaggtgacaaccgcataaatcaagggcagcatggtgaacagccctgcagaaaaaatgaggacaaagtacatgatgtttgccgcgcgagagcgggtaaagcggcgagtctgtatccgccgctttacccatgatccaaagaagcgccggccggggttagcctttgccacagaagcttgtttcattgtgttacccctactttccaaccatttgcaaaatcttgcccagaataatacgcgtcgcggccataaggataaacagcaccacggcgatcgctgacgcgtagcccatctcatagcgcaccacgcctacatctgtcaaatgcgacacgatggtatcggcagcaaatcccgtgctgggaaaccccgccagctcaatcgcgatagtgctgacggaaaagctgctttgaatctgcataacgacgctgaacaggatcatgtgctgcatggaggggagagtaatataccacaattcctgccaccggtttcgcacgccgtcgatcgtccccgcctcatacagttccctgttaatattttgcaggccggcaatattggccagaaaagaaatgcccatgctctgccacaactgcaccaaaataataatcggcaggataaagtcagggtttttcagccacaccaccggctcggtaatcagtcccatggacagcaagaagctattcagataaccgtagctgtcaccgctgaataaaaccttccatataaaatacgcgttccccaccagtgacggactgtaaaacataaaggataacaacgtgcgtaccttaggggggaattcgttgacgaaccaagccagcagaaacgcaagcaggaagccaagcggacccgttatgagggcaaacagcaatgtattctttagaacaataggaaacacattgtcgctggtgaacatcctcaggaagttgtcgatgccgacaaaacgcacagggttcagcatatcataggaggtgaagctcagtacaagggatgagatgatgggcacaacggtgagaagggtaaacaggagaaaaaaaggcagaagcatgacaaccataggccactgaccatgcagcgaccttgccgcgccccggcgcttattagttaatgaattcatatctcgtccccccttactgcacatattccttaattttacggcttatttccgcgtcggcaacttcgctccatttcaagatggcgtctttcccattggattcgccgttgacaaccgcccaaaatgcttggtcaatagcccgcgtcagatagtagctaccggggatttcaggcaattcctcaacgttctcccattgcgccatcaaattgttccgaacttccggctcccatgccaagtcggcgaacgcttcgaccgtagccgtgggatgccgtccgaccaaacccaacacggattcgagattgcgggaatatcgcgcctgcgtctgagcggatgtccaccatttcaggaactcccatgcttcgtcaacgtgggacgatttggccacgatagcacagccggttcccgctccggtaattgctttattctcactggtgaacgatggcaccggttccacagaccaccgtccctgaatcccggatgcggcctgtgacaacgttaaataaagcgtatacggcgcgatacccagcggcatggtaccgacgctgaatcggttataaaaatctgcttccttgaggaatttataatccgtatacagacgagtccactgttcgaaaacagaaatggcctccggcgtgttgatggccgtcgccgtccgactgtcattatagataggcagcccgctctgggccatcatcgtcgcatacaggttcaggttgccaaggcctgtgtccaccgacgtggtcgtggatatcgttgtgtagggaatatacacctgcatattgttgcgctgaatgaccgtcgctgcgtgtatgaaatcctcccatgtctcgggaaccgtcaaaccaagttcctcaaacacatcgctgcggtagaacatactgaaaaaggtctgtgtatccggcagcgcgtagcatgcatcactataccggtagggttcctccgcccccggctggaaacgctccagaacgctgttaaaatcgtcaaactgtgtcaaatcgtacagtgcatggcgcatccccaggttcaccggctccgcgcgggccatctggagagcgcagtcaggtgaatttcccgacagaatacccttgaccagcgtggcgttgacaatttccagctgcacgccgattccggtctctggaacgaacgagtcttgaatcaatgagtttagaatcatcgcctgatcccggccccagttcacccacagacggatggttttctgcgtatcctgcaccgcagaaatggagcggtagtcacgcgtaaacgagttgcagaaccgctggaagccaaacgacagcttctcaaaaaagcccgctttatctccattaaattccgtgtcatgaggaacgatttgtatctcgtcgatagccagcggcatggacgccatttcatacagccatgagctgacggtacagtaattggtatagtaatccttaatatactggtgggcggtataggggcgatccagcatcaagcgcagcacacgcgccatattctccaacgaggcgatatactggctgcttctctttcccgtcatcgcgcgcatatcctgcgccaagctcgtcagcgcatccagatttctttgcagcgttttttcaaaatctggaacctgccgaaacagctcatagtcacggttcatatccggcgattcgccggtaatcatgaccattttcatatactcgtcacccaggctgctcaccagttcggacagtctccggtaaaggggcgccatatcgcccagcgtaccttccagagacagttgatgatcgccggccttcagccagataagatacggtgtcccatccgtatccgacatggcgctgaactgccactgcggcttataggaaaacttcaggttctgcgcttcggcaaagggcgtttttccgtcgattttcaaccagcgataagattcgccgttgataacctgatcctgcttgaagtgaaaaccaaccttgtaatacccgtctgtttccacggtaaagttccacaccagcgtttctcccggcagcttccacgagctgccgcctatatagttcagtttagaaaggcgcgggctggccggtgtcaggctggccgtaccgttgtccgattttggaaccaacgaacgcgtcgattttatcgcggcgttttcgccttggatgaccactggtttcacttgtcccccggtcggcgccggatcgtagcccgctgctttatcgatatacgcctccggtttttccggtgcacgcaactcgattttctccaaagcaaaaggcacgccgccagccacaagagtcaactcatgcattcccgcggtcaaatacagcgtatacggccgtgcgatcacaccgcttgcatccctcgcgggccagctgacaaatgcgtcgtattcctcctgctccggggtcagttcgttgcccatgccgtccctgcgccattcgccgtcctcgttcctccacatacgaggcaactccagcttctccataccctcaaacgggtattcgccattcacacgaagtcccagccgaatgtcgacgtcactgccttccagcggcaggtaagtcagccaaacggtatacaacgcatccacaggaacctccgtcaaataggtgacggtaccctcgccattgctccaaaggagcacattttttccatccgcatattgctccttcgtctgtacgtcggcggaatcttcccttatgtaatccgcgcccgcgacacggatttcctcctttgcggcgggaatcccggtcaggccagcgagatagctctcatatcctcccgcgtccgttttggtcgtgtcttgctcaaccgcggctgttaccggttctgactgtgccgccgctgtctggggcagcgtaacacacagcaagccgcctatcgtcacgataaccagacagaaaccggagagccctttcaaacgcagcatagctcgaatatcctttctcaaaacggtactcgctgaccggcagcggagaccaaattaaccaacaacatacaaatcgccgagtccgggcttctgataaaggcggatccaatcgatccagtaatccatcggaaacgccgaggtatcgtcgacaagggcgttttctcccggagaccaccggctgtatggcgtaaataggtgattattgagaaggataaataacgggtcatggaaaccgtccatatctccacccgcatcaaaatctctggatagatcaaatgtcatatacggctcgctatccacatacatcgtcatggcgtccggtgtccattcaaaaccatagagatggtattcctcatttaagctggtactgtcccgaaaggaataccggattctctccgcgtaagggaattgcgtgtgcgcaccgtcagcataccacttatgaatattggaagccagcgtggttttgcttgcgaaaacctcaaacacatccacttccaccatgtatgccatggtggccctcggcgcaagcttgcctgtggcggacttcatccagaacgacggccaggcacctttcttgaagggcacctttgcccgcatttcgagaaaaccatatcgaaaatgcatccgatcgaacgtggtgatcgaataacaagtcgtataatgcgggccgccgtcgtccacgttcttatcacggatggcgctcagcttcagctggctgtcctcaacacgcataaccgcggggttcgactcgtccgccaaaccggtatcctcgcttccccgcatactctccagaagctgccacctggcaggatccagcacgctcccgtcaaattcatcatgccataccagtgtgtagccgcccggcttcgagatatccatatgtaatcccccattcccttccatcgcttttttcacccgtttcacatcgaatcctatccctgcttggtgtgcagctcaccaacgcctggctcctggtacaggcgaacccaatccacacaatactcgatggggaattttgtatagtcgttggcgatggcctccggattcggaatatacgcgccatgttccgtaaacaagtgattgctcatcatgaagtacatgcaatcgtggaagccgtccatgttcccgccttcatcaaaatcgtaggacaggtcaaatgtcatatagtcaacaccgtcaatgctcatggtcattttctccggcgtccattcaaaaccgtagagatgatactcctcgttgagattgtaatagttctcgaaccgataactttccttttttcccccgggatactgcgtatgagttccattggcataccatttatgcaggttcggagaaagtgtgtgaacacttgagaacacctccaggatatccacctccgcgaaatagtcggtggttttcctcggtgccagctttccagtcgacttcatccaaaaagacggccatgcgccctgcttgtagggcagtttcgcgcgcataaccagatacccgtacttataattcatcgtttcttgggtgctgacggtttgagccgtggcgtaccggaccatgggctcgaccgggctgaaataccggcgcgcactcatctggaggtagccatccgctaccttgacgtaatccggattttcatcgttcatcagcacgagatcagggcgcggtcccatgtcggtgccaaagtgccatttcaagtcgtccagcgagtcgctgtcgaactcatcgccccatacatacacatatttttccagcatctttgttccaaaatcaaaggttttctgatagggcatgatattgcccgtagccgtactattcgcaataaattgagttatcgccctatgcgccgcgacatagtgtcctaggtcaaacaccagtttcttccccttaactgataccgcatagacattatcatccaggctcttgttactttggctacggttggttttacctatcaggatttccttgtcggtttccttctggctatccttgactatcggcaggtccacttgatatttctgcgcataaaatgctttgaggcgttccgccgcctggagtacctcgcgttcggccgcggccgggaccacgatggtatatccagccggaccgtcccatttgacggaggctaccgtcgtcgtcgtggtgcgagaggttgtggtggagcgctcggcggacaacaccgtcgtctgcgtgccgtctgtctgcggcgcgccggtggagccggtcgtctccgccgtcgccgacgcagtggtggttctctcaatcgttttggaaccgcttcccgtggacatcgtggaggacgtctccttgctagaggtcggctgatttgtgcacgatgaaaggctgaggccgagtaccacggctagaataaaggctgcttttctcatctgaacttacctccctgttctgcgtcccacatcgtacgcacgatcatcaagttgactcaaaaatcacaggtatatttttcaattatatagtttcggtccaaaatatgcaaaggaatttttatacatttccatcttaattccatggttttcttgaattctaagcatccgccctatgccagaagcgactctagcgaagcccccatggccgggcacacttcaaacgtttcctgttcataatccaccgttatcgccgtgccatcggtatacgttattgcgtatcggccgggtgcgatatgttcatgagattccataaactccgtttgcaggtgtcgaacctgcttataaaggtcatacgcctcttttattttagaaacgctgtatttgatttcctccggactccggatggtcaaatcctcttttcccatccatacattgttgttatagaagtcggaatggatatagatgaccggccggccgccatactcgatcaacttcaacatctgttttttatcttttattgggaaattgacggtgtcggtagacgggttatataaaataatcccatgatacaccagcgcgaaaaacggtatgctctcggaaaaaaaagcagcatcgggcatggacgattcaaactcatcgtataagccccagtccagataccgggatgcgaagtcgtaacagccctcggaactgaatccgccgaacaattcatgcgagaactccataatcttctcgtgataccgaagggcctgcccgggcgttaccggatgacggctgtcaaagcagtccctcagtggtatgatagacagcacgtcgacatagtgtaaaccccggaatcccaactccgcgacccggggaagggtcttctgtgcgagctcccaggccttttgaggacataaatgatacatggtcccaccactccatggcacgggatccgtcaccttttctccgtttctatcccggcgaattaagtcctcgtcccaattatcggcaattgtataggcatccgtactgttggtatgacaggtgatctggtacccgttcgcctgggcgtatgcgataagctcacataaggcttcctcaccacccagccgttcttcaaccggaaagacctggggccagcgaccgtcatgtccgctcttattccagcccaccagacacagctgggccttgtcaaccccctgcgctttcagctcgtcgatgattttcataacctgtgcgaaggtacacgcaactttcatatccggttcattttctgccgtctgttccaatacctcgggaggcgccggcttccagcccatccggatacgtatctcaatagagtcccgcgcgtattccaattcctgtctggtctttaccctttccgccaaaggaacgcaccgtttatttctcagttgataatctcgataggccttcgccatctccggataacccgccccatccgccagacgatggatttctaagccaatggcctcgtccggctttctgccgtacaggtggattctcggatatatatagtagcagccgtctttcacgcccatcaccatcgaaacgtcgtaccacatcccggtaacaatggctatggcgcaacgggtgttcttaacgccgaaaacacgcatggcgctttgataggtgtgttcttgattttcggtttgatcgaaacggcatagccagctcccgccattgcggaccccggcggccagataatatccgtgtgtgccgacctctgtgttaaaggctggaaggagaatgtcgatatactccgcgccgcaaatttgttcaggttggatttgtatacgttcgacaccgtttgttttctgaatatccacaggatattcgttacccaagtcgtcaaccgcttttgcatcctttaaaaacatctgtgtctagcctccacttttcccgcttgcgaaagggggttttaaattgacggctcagcacgcccatttcctccagatggatataacacgccacgtcgcaggcgcgtccgcaaatggagcacggataactgtgcatagccgggggataaaaatagatatgatccaaaatacggcgggccgtgtccggcgtcacgcgagcctctccggcaatgatcgccaatctgtcctccatatcttgaaaagcgtccggaggcatgaaagggtttgtcgccccgttcgccccattataatagactgcgcactgccagggatcgaccgtaccataccggtcaattgcaccgccgggacaggccgccgcgcactggccgcagcggtcacaaagatgcggctcatacatcgccgatggttccaactccacgtcggtcaggacgaaacaataccgtagcatggggccgaatgcatccgtcagcagggctccgtgaaagcccctttctcccaacccgcacttcaccgccgccgacagaaaatccaactgattctcccgtgtctttccccgataaattgccgaatgcgatacttccggattcatgccgtccggttcagccatcaccgtctggtgccgccgctggggaagcgccgtgcagccatgatccgtcagtatggcgcaaacgcccatcatggccgtcggcatgatgacctcctcgaggctttccacggccatggtggtatattgatagtaggtgctcccttcctcgatgccgcgataagtcccccgcaacacccggaagcccagcccaatgacggttttcacgtccggcataatttgaaaaagcacatcgtcgctgtcgaaacgactagcgggagcgaatccgaccaggtcggcgttcaggtcagccgcagctttcaaaattaaatccctcacaggcgccccatctccttccagtgctggtagcatgccacgtcacaccgccgaccgcacaagcagggcgcatagccgttttgggttacgggcagaaaatccatctccccgtacagcgccctggccgactcactgtcgaagcgcttttcaccgcggagaatgcgttcccgttccggatgtccctgtaaaaacgcatttgtcatgaacgggttggactcgtgcgctcccttgtaatataccgcgcattgccaggtgtccaatccatcttcgccaatcgcgccgccgggacaggcattcgcacaagcaccgcagcggtcgcatagccctccttcagatgggctgtcaacttccagcggggcatcggtgatgatgaagcagtagcgtatgtatgggccgtaccggtcgttcaaaatatgcccactcatgccgacctcgccaataccgcacgcggctgcacactgtcctaagtcgagaatgacgtcaggcggcggcttttcccgcgagaccgcttcggcataaaccaactcataggtgtcaatcacctccgggttcgtcgccttgctgccctgtacctgcagatttggaacgctgcgctgaaggcatgcgtcgtaaccaaagtcttcgatatacgcccccattttgagcaaaaacatctccgcctgtacctcatcgataaacttaacgcccagcgtcgtatagccgtacatctgacgcccctcgtccatagcccggtacaggccagtcggcacagcgaatccaatgccaatcacacaggtggcaccaggcagaattgacagaggattatgctgtgcatccactccgtgaaaccgctcaatatcgccaataccgcacacgctcgctccaagctgctttgcccgctctttcagcatggcagccgtcaagcgggtgccatgatcctttttccccatcaccgttccagcctccatcgcttccgggtgcgtagaggctgccggaatcgcccctctaaacacccgccctttttctccagcatgcttacacacgcgcggatgcagccgccgcatttcaccatgttatatcctacccagctggggaagtacttctgcaaagctgtgtagaccttgagaatctcctcttcattggcaacgctggttttaccttccagcaaattcagcgacccgttctcgttttcgtcaaacacctctttggggacgaacggattgtagtaacgtcccgcgtgcgtgtaaaacgcatagcagcgccacatatccacatcgccccactcgcatacctttccgtcaatctcaacggtgaccgtccgaccggaatcaatcgccgggatacaaccgccgggacattcccgcacgcatgctccgcatttccggcacagcggcggaccgctgtacatctcgtcatactccagcaccgcgtcggtgaaaatgaacatcacccgctgcatcggcccaaaatccggggtcagcagcattttgctccaacctatttcacccaatccgcaggccaccgccgctaagcggaaatgaaactgcaaatccggagcgaccgcaccgggtcgggccgggcgggtaaactgaacgctccgatgatgggcggtcgcttttccggcatgctcgtagatgtcaatttgctcctccggagacagcgtgtttcctggagaaccgtccatatcggaaacaacgccacgcgctccggtattgcggtatacaaacgcctcgtagccctcgtcctcgatcattttcccaacctgatacaaaaccgccgggccaaaaatctcgttcagaccgccataggccagggaaggatactggtaaaactgcgtcccttcctcaatgccccgttgtacgccgcgcggaatgcgaaacacaagtccgatgatacttttcgcttcgggatacaggaactgcgggttcatctcatccggcgccccgtcaaaccgagacatgggaccgattccacaggcgtctgcgcccgcgtccagagccgcttgcttgattttttccgctgtaagcatttatgccatctccaattctatgagagcttgttccataaccgcccggcaataatcgctttcccgcgaccgcagcaggaaatccggcggtatgttgccgttagcaagaatatggggatacagcagctcgctgtaatccggttccaacaggcttaatagattgccgccaaagcggccctccagataggcgttcagcaatcttgtcgggttgggattgacccgcgtagccagtttgacggcctcaaacataccctcataggagcgaatatcctccggacggacaaagctcgtatcccgcaggagggaaacccagttgtctgttttagccaaatagtctttgcaaacgccccgaaactggtaggcgttgtcgtacctctccgcctcatgttcatgggcgacgagattgtcatgaaacgcatgggcgctgcaatcattcaggcaaccgctgttggccagcatgaacagtctcttatcatggccggtgcaccagttcaaaagccgccgtatagccttcatatcccggttgcactcgcgttttatgtaaaagctgtcgaagcagtccgccacatactctaacccctgcacactgccaatccccatatttaccgacgcgcgcacgtcaatgcccgccatattttcatgaacgaaccgggcaatcagcggtgatgccgttgtaatcgccgacaaaccgaaacggtcatgcacatattcgattacatccccgatgcgatagaaaaactgacgggactggctttccggcccatagcaggcggcattcagcaacaaattgagtcgtatccctacccccgccagtttttccagtgtgcgaatcagctccgtctgtgtttcccagggatatagtccgtttgaagaatgagcgacgccccgaccggttggaatatcgctccatgcaaagtacacttcatatatgtgttcccggcattgtataagccgttctataaagccgtcatacggcgtgaccggcaggccgaccatatatttcatatccgattccctcctgaaacaatcctggcgattggtttttcgacacggcgataaccggtgttcgaacggccttcctgtcaacccagctgtattaaacgtacaaaacaatctgtgatgagacggtgtataatagaaataaattacatattgattttacaatgagaaccgtatacaattcaatgtgtacaacaaaccataaatgttctgtatcaaacttttagcgaggtgtcgtttgtgattttagatgatattaaccctttcattcgttttgccgaaatcattaccctgattaaatatcctcggcaatacgtactggcccaggattgccgcctgtttttatgtctgacggacacgggttccgtgtttatacgcgacgaggaaatccttttacgaagaaacaccataatttacataccgtccggaacgccgtatatgctggttacgtgcggcgacctgcccactaagatgcttgccatcaatttcgactttacgcgggaacggcttaccatacaggagcctcttcccatcgtaaacgagcaggacgttccagcatggcaaattcccgcgccgccggatgtcgaaggctttctcaaggcactggtccgcaaagggtatcaggatgtcgatgagctccttatacgaatcggcaccgaattccagacccggctgccgggataccacgcgctggtttccgcttctctcaaagcggtactggtcacgcttgcccgcgaagcatcctctcacggaagaccggctctcgtgaatacggtaatcgagtatatcagcgccaattacatgaacgacctgacggtggagactctcagcagcgagctgaattatcatccaaactatctcaaccggatttttaaacagtacattggaataagcatccatcaatatatcatggaccgacgcacccacgctgcgaagagtcttctggacacaaccggcctgcccattgaaaaggtagcgagcctgtgcgggtttaaaaccgcatcccatttttctcaatcttttaaaagattcaccgggcaacggcccggtgaatataaaaaaggccgcaagccctacatcgtgtagggcttgcggcaaaggagttccgttatatctatatgtttgctttttatatttccatagagatttttctgtattcacgcgggttttccaagtgacttttttgaaaacacaaaagattacggcgaatgagatccattctattcattctgtatagtaaattttaagctgatttattccccttgtccggccaccaagaccatatccaccggccaacccatagccgcactacctccttggcggccccatccactcatttcctcatcgtaaacagcagcgagcctttggcgccgctttgccggtaccgctgctcggtcccgagatagccggcctgcttcaggtcggctattcctctttgtaccgtccgcaccgacagcttcaaatcccgggccacggtgtgcagggagggccagcactgcccctccttgttggcccgccctcgcagataaagatacaccgccaccgcccggtggggcagttcactcttataaatccgatccaatcggttcaaacggctcctcccttttggcggccgaggagtcctctccgccggctgctttccttagtgtccagatgataccgcagaaacacgctgtcgagaatctcacttttcccggcataggctacccgccggttctcctgctcctccatctgaaacggttccgcgtcaaactggataccccattcaaaaaacagcttcagccgcgtccgcatggggtgacagcccgtcttcatcaccacaaactgccctttgggcatgctcttcagctcgtccggcgtcagcagcggcctctccatcatctgcagcgactggctggggtcatggctgctccggctgacactgccggaaagcaccgtccggctgcccagcgccttggacatcgcctcggccgtcccgctgttgggcgcgaaaccgccaaacagggtcacctgggtattgtcgatgatgatctccgaaccctctttgccgtagttcttctccagctgcgcaatggactggataatcggcaccatggtcagccgccgggaacgtccggcactgaacatcatctccgccgattcaatcttgggcagcgtcccgaattcgtccatgaagaacaccacccggttgggcagcttcccgtcatattcatccgccaccgacaggatttcccggtagaactgctggatgaacagcgaaaccagaaagaaggtcgtcgggttttcctccgggagtatcagaaacaacgcgctcttttctttacaaaactgctctgcatccagcaccgggtcgaagcagagaatctgctccatcgacgaatctaggaacgcgttcagccgggacaatgccgtggacagcaccgacgccaccgcctgctcactggtattcagcgccgcgccggcaaaccagcgggccttgtggtccggcggcaactgctccatcagctgctggaactggttcttccctttctcctggccgggcgcctgcagctcctggatgattttgaacaccgacacgatatgccgtttctcaggcaaacaaaactccaccaccagcaggatggccgcggtcagcagtccctccgccgcgtcgtagaaatacgcgttggtgccgaatgaggacgcgtccgctccggacaggatgatggtcttagcgatgattttggcgtacttctccgcttttgccctggctgtcaggttgtccggttcctgtttccagatgtcggtgtacttgttcacaagaaacagcaggttgttcccatagctacggctgggattgcggagatccagcaccgccagccggtagccatagcaatcccgggcgatgcgcccatagctgcgcaggacgtctcccttggtgtccaccgacaaatacgacatgccgctggccatggcgtactcgatacagggatacagccaatacgccgttttccccacgccggccgccccaatcatcagcacatgcacgtcgccggtgtccaccagcgcataggtttgtcccctgcgcgattcgcagcccaccacaatgccctgttctatgggatggtccttccctcttctccattggtcaggtatgaatgggacacggacatacgtcccgcgaatctccgccttggtggcccagcgggcggttccgtgctgcccatctcccacggttcgagatttgattccgttcagactgtaaacgtgtcccagcaaggtgatgaggccgaacacggtgaacatcactgcggtgactacgaacaatataatcaagcgcttcccccactctccacaaacgccgccagacgcaggcagtccatacacagctcctgtattcgttcgatttgttccagcatttccgtccgggtgtttggccgctcatcgggatatacgcttcgcagcacatccagccggtgcccgatctcctccatatggctacgcagcccgccgccgtcccgatggggccggtacgtatggaataccagaatcgccagtgcctcatcggataccgatatttccagcgaacaataccgcgccttggcgtacaaaaaggcaatccccgccatctgcagggattgctctcgtaggctccgttttctgtccggttgcagttgcttcagctgtgtatatcgttcactcagttcccgcattggccagcgtgagactctttcaccccggcaccggttcggcaaggccgcgcacagacggcgtatacagtccacacccggatggcgcttagcaggaagagagttctccccgttttccgctttcagacattcgttccagtctttttggtgcgggctatcctcccgaaccgtatagttccctactttgctgatactctctcgcagtctcgagccgccctctataccggccttgtccgcgtccaggcaaagcaccacggtgcgcaggtgagggtattgccgaagcagccagattgccgcctgctccgaggtgccgcataaggccacatagctatgcgccggccagttctccgggtgcagggtgatatacgacagcacgtccaccggcgcttcaaacacatacagtttgtctcctgtccccacccaatgaaagctgtaggatggccaactgccggacacattgcccttgtagccgccaacggttccccgcttgtgggcgtgtcggggcacaccgttttcgtccatgccgacaaatacggcgttgtggtataccgcatcctcatacagcagctgtcgatgagcgaagaagtggatcacttcccggtcaatataccgtcccagcagatacgcgtacacccgccgcatatccgtatgccggggaggcaggaggaacggtttaggcgatggccgcgccgtttcggatagcagtattccctcctgccccaacagcacctgcacagcctccgcaaacgtcttgccgccaaaccaccggacaaaagaaatcgcgtccccgccctgccggtcgtactgatggaaccatagatttccccggatggtcacttttgctccctcatgccgccattcccattctgagccagagcgccgcagggtttctccctgccgccgcagatactccgccagatccgtgcgacgggcccgttcgatgtcggcagaatctataggcaaaggtatccctccctgtcaactctcatgaagattccaaacggacttgcaaaccgttctcgccagagttaccatgccaaccaaaccggacgaagggaggcgggaacatgctgggagggaagctgcgggccctgcgccaaaagaacggctggacacagaagcagatagccgaaatgctgcatatcaaccgctcgacctacgcgtactatgaaaccggcgccacacaacccgacctcgacatgttccgccgcctggccattctgtttgaagtatcgacagacgacctgctggggctgtcgacacctatgctggatatggaggaccagctcttcctgtacgtcgcctccctgccgctgatcaaacgacgcagcctcctgtaccgccttcagtcttttctccagcacaagtaaatcactcccggatccccagcgcccgtttctgttcctgtatccgctgccggagcttatgctctaccagctgtcccggccggtcgagctgcagcttgttttcaaacaaccgccccaccgaacgcagcaggcgcagggcgcccaaagaggccgccgcgtttcgatgctgccggatgcttcccagcagctgccgggcatacacgtttcccagctctgtggctcggccaagatacgtcagcgcgcgcttctcattcttttgaacgccatcgccgaagtagtacagtgagcccagcgcataccatgcatacgcgttgtcctgcccggccgcctgttccagccaatggatggctttccccacgtcatacagcgccggttcttttagaaacagctttcccaaccgatattgggcgaagttgttttcttttttcgccgcccgggtcagcagctccacggcctttggaagattcttcagcagacgctctcccgtcgcatattccctccccagtacatactctgccggctcgaatcccctgtccgctgattgttgcagcagcgtttccgcctgaaacaaatccagaggaagatcgacgccattcagataagccctccccaggatatacgccgcgtaggcgctcttcttctgtatggcatactggagatattccaaggccttttctgtatccttgggtaatcttgtccctttcagatgttcctttccaagcagagccagcgcggacggatcatcctgcccggccgcggcttccaaccaccggactccatagaagatatccggaggaacatccctcccctctaaaaacaacttacccagctgatattgcgccggagcatacttctcgcgggctgcagcggtcaggttctccagcgcagcctggatattcccctctttcaaattcagcttccccaggttgtagaacgcccggacattttttagcttcgccgctttctcgaaatattgtcgggccatcttcagattgaccggcgttcccgtcccggtcaggtgcatgtcccccagccttacctgcagatggtcatctcctccctccgcctccatgaaagtgaattttttgaatgcctgcccaaaccactgcttggacttcgctgcatccatatcggttccccggccctcccagcacatccggcccaattcatacatggcgtaagcgttggggtggcggtcgtcctccgccgccatttggtacagggcgaaggccttttcctcgttctggggaacgccctgtccacgccggtatagcccggccagcgaaaaggcggcaaacggatttccctcctccaccgctttctcaaaccattccgccgccttttcgtagctctgttccacaccgaatccataggagaatagcttgccgattcggtattgcagatagtcctttttcttttcctgctgttccgccgcgaggaaagcccggtaggccttggagaaccaagcctgtgcgccgtcctcgtctttgtcccgtcctaagccgttccacaggattttccccgcatcgtgcatggcgaaaccgtttcc

SEQ ID NO: 120 - DNA, 13196 bp, Unknown
  16S sequences of unknown bacteria
gccttgtcgaagtcgagggcggccgttccgtccgcattgcgcccgatgagctcgtgaccgagctgttgcgagccgatgatgaggtagttggccatggcgtcgcgcccgaacagcgccttgccgtcgtcgggagcgggggtgaggccatcggtccactcgtagtacttcttggccgtctgcgtgacgccctcgatggttgccaggtcgtcggtcgtggcaccggtggcctcggcgaacttgtcccagtcggtgcggttgagcaccatgatctccgttgccttggcaatcgggaagatcttgagcccgcccgtgccgtcgaggtcgccttcggcgaggtagccgtccacgtagtcggccctttcggcgtctgtcaggtaaccgctcacgtcctgcaagatgccccgctcgttcatgctgagcgcgatgtcggcgtaggcgggaaacatcgtgggcacctcgcccgcgcccaccttcttgtcggctgctgcgacgacggcgttttcgaggtcgtcgagcgagccctggctcgtggactgcacctcgatgccgagctccttgccgcgcgtgcggttgaactcgtcgacgagctcgttgaagctgtcgagctgggtgccagtgtagtagttccacaccgtgacggtgacaggatcgtttgggctgagcttgctctgccgcgaggcagcgggcgcgccggcgcagccaaccagtggggacgtgagtgcgagcacgagcgctgcggcaagcgcgagtggtgcgagcgtcttggcgacgtgcgtgtgcgtggtcatgcgtgggcccttcggttgaatgcggcaaggagcgtggtaagaagcgcgctgaggagcgtggtaaaagaagcaacggggcccaccttcttggcgggccccgtgtggcgtgtggctttgctcggcgctagatctcgtttttcacgacatcgaggttgtcgatgcggcacgggtagagcaggtgcggcaagaacgcgtgctcgccgtagagcacgtccttgtttgcctcgacgtagtccaggatcgggcgcagcttgtcctcgtggtccttgcggtaggcgatgccgatctcgcggcgcgcgacgtcggcgtcgatcgggatctcctgacggtcggcgcctgcgctcgtgaacatctgcatgaccgacgagctgaagttgctgcgcggcgtgtcgtccatgtggaggagatactcgtcggaatcggagcgctggacgcgcgacatgtcgccgccgcattcggcgtagatgtcctcgtaccactgcgtgacgccgtagatgtcgttgacaagggatagcggctcggacgcgaggtcgtcgagcgtgatcttgtccttggtgacgagcttggagttgaagggaacggacaggtaggcctgctcgacctcgacgccgaggaactcgagcggctcgcccttaacggcccagtgcgggatgatggcaaagtcgatgcgacccttcttgaggtcgttgacgacctcgcgcgagacgcacagcgagacgacgaagttctttttggggaactgggtcgcgatctgcggcatcatgacgaagcagtgcgtcgcggcaaagacgcctgcacggatggtggtctcctggcgcgccatctcctttttgatggagtcttcgaggcgcgagaagtcgacgatgatgtgcgtgctcgcgtcgacgaggatcttgccgtagctcgtcagctcgaggccgtcatggtcgtggttcatcagcgggacgccgagctccgcctcgaggcccatcaagatcttgctcgattccgccctggggagtccgagcttctcctcgacttcctgcatagacttgcattcggccatcgccgcgaactgtccgagctgctgtttttccattcgggggtccttcctctcgtaactcgtccaatagtaccgcacatcttggcacgaggggccgtgggtatcggttcactttggcacgagggaccgtgggtatcgtgtcattttagtgatgggttcagataatgtttctcgcggggcttgaccctgacgttacgtcaccctgtattgtggcagcagcatcgagaaagggggcacgcgtgaagacggttgggcaggtgagcgagcttgcgggcgtgagcatccgcacgctgcgctactacgacaagatcgggctgctctccccctcgtcgaggagcgacgcgggctatcggctctacagcgacgacgatctgcggcgactccagcagatcctcctgttcagggagctggagttttcgctcgaggacattcggcgcgtcctcgactcgcccggattcgacagagaacgcgcgctcgatcagcaggtcgagctgctgaggatgcggcgccagcatctcgatgaccttattgggttggcagaatcgctgcgcggaaaggaggacggcacggtgagtttcgaggcattcgacacgggaaagatcgatgagtacacgcgtcgcgcgaagcaggagtggggtaacacgcaagtctggggagagttcgaggaaaagcacgctgggcgcacgcatgaacaggaggtagatctgggttcgaggctgatgcagctgttcgtgccgtttggctcgatggcgaaaagcggtgccgacgccgcctgcgcgcaagcccagcagcaggcggcaaagatccaggcattcatcacggataattactacacgtgcacggacgagatcttcgcgcagctcggcgcggcgtacggcgccggcggggagttcacgagcaacatcaacgccgtcgcgggggacggcgccgccgaattcgcggcgtcggcgatagcgcacaggttctcggacgccgcgtccgagtgatgggagcgggccttccgcttgcttacctgcccagcgtgtcgcgcagctttgcggagaagaggccgtctttgttgcagcagaaatagagcgcctgcaccccgcgcggattgaagcgcgcctcggcggggccttccgggtagagccggacgaactgcatgcggtctgcggacccggcggccatgaacaggagatggtgctgcttgctcatcgggtggtccacctgcacgtgcagctcgtcgtcgagcatctgcacgcggagcacgtgctcggcatccggggcctcggcctgcagtgggggcaggttgatgccgtggcagctcacgcacgcctcgcccgtcgcgtggatcacgttgttgcagaccgggcacacgtagaacttcgacctgagtatgttcgcgcccgtgttcttgttctctgcggaaaacccggtgagcagctcggtcaccgaaacacggagcgtgcgcgcgattggctcgagcagcgtgatatccggcagccccgcgcccgtctcccatttcgaaacggccttgtcgctcacgttcaggcgctcggcgagctgcgcctgcgtgagcccgttgcgctcgcgcagattgcgaatcgtcgaccctgtaagatacttgtccatcgtcacttccgttcttcgtcgcttgtcgatgctgcgactatacgatgaggcgcgctcgcctgctacctacgctccgtggagtttgcggaatacaggtgatgacacgaggggccgtgggtatcgtgccattctggaccgaagggacaccccgccctgtcccttcgtgccacaacttcccgcacctgctcgcttccgattaacgccgcagcatcttgcgcgggcgcaggatcagaaacgccgcgcaagaaacgacgatcgcgacaagcaatgcgacgtttgcgtccagcttgaacgcggggattccgatgagcatgccgcacacgtacgggacgagccagaccagtcagacgcccatgctcaggcggtgaaaccttgtgcgcgcgctgtggctgcccttcacgacgacgaccgtcgcccacacggcgtgcgcgagcatcagcaccagcgcgagcgcgccggtaacggcgtgtgcggtgctcacgccgctttgggcgagcagcgacatgaagctcgtgcccgtcgcgtcgcaggcaagtcccaggtagaagaacgcgaggtgacgcgggcggagcgtgccggcgcggcgctccgcgaagacgccgatcgtgtagaagacgagcgcgagggttatggtccccgcggcaattgcaagcgtgctgttcatgacggtgccgtccaatctgctttccggggcttgccccgggtcgatttctttgacggctctcatcctatggtccatgccgtgaacaacaacggccacttgttcacgcccccccgctcgcagtcggcggagcctcagtacagcccgcgctcgagcagcgcgagcagcaccgcgcagccgttctcgccggcttggatcgagccgacgatggccttgagggtgaacgcggcgatcgattccgcgtcgacgtcgggcggcagggcatcccatgcgatcgcggggtcgcgactcagtatcgtgataaggccccgctgcgcgtgctcgagggtcgcgctcatgcgcagccgcgccgcgaccaggtcggcgtgcggcaggtcctccacgtccttgagccagtcggagcggaaggtggcaagcgcgtcctcggcgcagctgcaaaaatcgcggcagaactcgaggtaggagacggacgagtccacgcggcacagcgtgtcgtagaaggcgtgctcgaaataccgcgtcgccgccgcgacgacgatgtcgcttttcgaggggaactgcttgtacaggtagccgacagagacgcctgccttgcgtgcgacgccgcgcgcggagatggccacaagaccctgctggctgcccagctcgactgccgcctcgatgattgcctctcgcttgtcttccatccgggcctccctcgcttttgctccgacaatgacacgatacccacggcccctcgtgccaaagtgaaccgatacccacggcccctcgtgccacatgataggggtattatcacaacactagcgctgcgcgcagcggcacacgagagtgagacgagacatgcagattgcccgaatccacaagttgattatgttcttggcaggtgtgatcttgctggcaacgactgcgtccatctccgatttcgtctaccaagaggacatctccgcgcagcgcgagcgcgcatccaacatcacccaggcgtactccgaagagctccagcacgacttcgagtacggcatcttgaagacggcgcagctcggcgagctggtcgagaaaaacggcggcgccatcccgcagttcgacaaagtcgcccagctcgtgcagcgcgactacatcgcgcgcgtcatgctcgtccacgatgacatgatcgtgcaggcgtatccgcccatcgacggctctgtcgacgaggggcagtccacggccgcctccgacgaggaacagtccgcgcccgtcatgcgctacgccgccgagcacggaacgcaggtcatgcaggggccggtcgagctcgatggcctgggcaggtgcctcatcatcagcagcccggtctttctgagctcggacactggagagaagtccctgtggggcttttcatgcatcgtcatccaggtgccggccgtctacgaccacacgcttgcctcgttgcagtcgtttggctacgactactgcctcgacacgacgacgtcgccgctctcggacagcttccagcgcatcgagttctcgagctccgagggcaaagacaccctcaccaagcccgagggctacaccttcgaggcgggcgagtgccgctggtctctcaacgtcgtgccgcagggtgggtggaggtctgcccgtgcggtgcccatgatggtcgcgggcctcgccgtctccggtgccgtactcgttttgctctacctgctcttcagactctacgcgcagcgaaaacgcctgcacgaactcgtcgacagggactcgctcacgggcgtgctcagcagggccggtctgatcgagcgcctcaatgagcagctgcatggccgtccctccgagcagctcaccgtcgtctttctcgacctcgacgacttcaagctcattaacgacctctacggccacccaatcggagacgctgcgctcacggacttcgcgcaccatctggaaaaggcgtttcccagaaactcgctcatcggcaggacgggcggcgacgagttctgcgtcgtcatcgtcggcaagggccccgacgaagcgcgtggcctcgtgaagcacgccatcgcggagacgcgcagcttcagcgccggcggcaaggtgtacgtgtacacgatttcggccggctttgcggactaccccgagcaggcgggcgaccgcatgcacatcatgcggctcgccgacgaggccctctacgcggccaagctcgcgggaaagcacacctgccgccactatgagccctcgatgtcgagcatcaagcgcacacggctcggatttagcgtgagaaacatcgtcacgggcattcccggagcgtttctggtgtatcgggcgcacggcgacgaggagatactctttgccaacgacgatctgatccggctgttcgactgcgagggcctcgatgagttcctcgggctcgtgcactcgagcttcaagcacttcgtccacccggacgacatcgcgcgcgtggaatccgagatttggagccagatccgcgcacagcagtccgcaggcgacagcgcggaatacttcgacgactacgtcgagtaccgcatcgtcaccaaaaccggtgcggtcaagcacgtcttcgacctggggaggctcgtcgacaacgacacctacggcgaggtgttctacgtgttcctgcgcgagcgccgcgacatcggcggcccgcctgcgggaccgcaaacatttgtccgaggacggcctgattgtggtggtggcgaccatcaacgcccgcacccgcaagcgaccacgaataagaaggcaggaccttggaagctatttcatctggatgctacgtcatcgacgccgactacaacgtcgtcagcgtgaacgacaccgcccacgagctctacccgcacctcgcagtaggcgagaaatgttaccgctgcctgatgggggagcagtccccgtgcaagctctgcccggtctacaacgacgtgaagggtccgcgtacctacaccgaccccatccgcggcatcgtcgaatcggtcgacgcggttgaggttccgctcgaggggcacgggctgtgccattcgctcgtcttctccacggtcgggagggaagaactgtacgccaaaacgctccccacgacgaacgacgagttgcgcaacctcgccctgatcggcgccctcaccgtcgactaccagcacgtcatctccatcgacacggcgacccgccgtggcactatctaccgcaagttcggcaggcagtccatcccgcaggaaagccccgatttcgactacgaggaacagctcgaccagtggatcgacgcctacgtgcacaaagacgaccgggaaagcgtgcgcgggcaggcacagctcgacaacgcaaagcgcatgctctcccgcaacgaggcgatggtcatacactaccgcgtcgtcatagacggaagcctccactaccactacgccaagttcgtgcgcgtcgggcctgctgacgcaccccagggtatcgtcatcggcatcggtggcgaggacgagagcgtgcgcatcgcacagcagaaggcacagctcgagcgcaacctctcgctcgtggagaccgaccttctgaccgggctgtacaccaaggaagcgttcttcatctacggcgagcagatgaggcgcgacaacccagaccgcgacttcgacttctgctttctcaggctcgacaacatcgagcagctcaaccgtcagtacggccgccccgcggtcgacgacctgctcgtgcagatcgcccggctgctcgagacgtacaaaaacgacttcacctgtctgatgtatctgggatcgggcgtgttcggctgcttccgcgagacgatggagacggaggcgcgcaaggcggggtgcatggcgttcacacgcgatttgaaggatcgcaccggcatcaaaggcgcctcgctcaagtggtcggtgtacgtggcaccgcgccataacatgagcgtcgaggaaatcaccgagaagactcggtacgcgctctcgacgatacgcgcgaaagacgacgtcgactacgtcgagttcgaccaggcgattatcgaccgcatggagtgggaaaagctcatcgagaacagcttcgaagacgcgctggcggccggcgaggtgcagatctggttccagcccaagttctggacgtcgagccgagaggtctcgggtgccgaggcgctcgcgcgctgggtgcgccccgacggtaccatgctcatgcccaacgagttcataccggtcctcgaacgctgcggaaagatcgcccagctcgacgagtttgcgtttcgcaaggcctgcgagttcgcgggcaagctgcgggcacgcggcatcgaactttcggtctcggtcaatctgtcgcgcgccgacgtcgtcgacgaggggctgctggcgcgcctgcgcgaatacgcccgcacctatgacgtgcccgtctcgctcgtcccgatagagatcacggagagcgcgtcggtcgacgaggccgaggtcaagcagctcgcagagctgctcgcggcatcggggttcgtcttgcacatggacgacttcggctcgggcttctcgtcgctcgccgcgctcgggacctttccgttcgagtgcgtgaagctcgacaagtcgctcgtcgaccttatcggcaacggagcaagcgagcggctgtgatcgcctacgcgcgcgagacgggaaaggccgtcgtcgccgagggcgtcgagacctcggagcagctcgcgtttctggacaaggcaggctgcgacatggtgcaggggttcttgttctccaaggcgcgcgacgaggcgggattcatagagctcttggacgcgcgtgactagaggtgcggccgccatggagaaatcgcattctctcgtggcggaaatgatgccttgccaattttggcactattgggtacgcgaaaacgcgtagaggcgttatactcgggcggatgcggtgggcatcgccttgagaagggggcacaggttggacaatcgagcaaaggacaggggggagcagccgcttggcatgcagtgggacgtccccgtcgcctttgccgtgttcaagccccagctcaacaagttgggtgatggcatcgagtccgccgagttcgtctacgtgaacgagttcttctgccggggcgtcggcttcacgccggagcagcttgttggaaggaagttcgccgatgtgtttcccgacgaaacccccgaatggtcagacgtgcttttcgaggcggcgaccaggggcaagcgcgtgcgggggagcatctacgcgacgtggtccgggcactggctgcgctttttcgccgcgccagatacggcgtcgggctatgtctcctttgcgctctccaacgtcgaccacgagatggaagaatccctcagcacccgcagcaccgcgctcaccaacgactgcatcttgcgcatctcgaaggtcctcaacaacggcgaggactacgaggcgtgcatgaaccacgccctggaagagctgagcgccatcatccaccccgaccgcctgtacgtgctcgagaccgacggcaagaccgtgagcaacaccttcgagtggtgcgctgcgggcatatcgtccgagatcgactcgctgcagaacctcagctacgacgagtacatcgggggctgggagaagttcctcgagcacgacacgagcgtgctgatacccgacatcgagatgctgaaagacgacgaccccgtcgattaccgcaacctcaagcggcagggcatcgagcgcatcctcaacgcgccgtttttctgcaaaggcgagcttgccggttatctgggggcggacaactacgaactgagcgacgtcatcaacacgcgggccgtgctcgagtcctgctcgtacttcatcggtgccaagatcatcaaccaacggctggtggaacggctcgagtatctgggcaaccacgatgtgctcactggcgtgaagaacagaaacgcgctgctttcggtcgtggacgagctgacaggcggcaccgagagcgtgggcatcgtgttcgccgacgtcaacggcctcaaaaagatcaacgacacccaaggccatcccgctggcgacgaggtcctgcgcctcgtggcgagccggctgtccgacgagttcggcacggataatgtgtttcgcgagggcggagacgagttcgtcgtcatgctgcgcggcatcggctacgacgagttcgcgaagtggcaggaagaccttctcgcgcgccttgcaaaagagcggcgccaggtcgtctcgatgggcttcgagtggtgcgcgcacccgcatggcgtggcagaggccatccgaagcgcggacatgcgcatgtaccgcgccaaggcggcgcactactgccagcttggcctccgctagcctgacgcgcacccgcatcgggtgttccctctgaagtgcagttttcgcgccgttaacgacattggcataagaccgtcttcgggccgttgcgtagaatctccttgtgagccccgcatccgggtgccgctccttgggcgggacgccattcggggcattgacgtcagaactcgagcggaaggaaagacatggatatcaagaatgttgtcgtcgccggcggcggcgtgctgggaagccagatcgcgttccagtctgcctacaagggcttcaacgtcaaggtctggctgcgttccgaaggttctatcgagcgcgcgaagcccaagttcgagcgctggaagaacgtctacctccagacgctcgaggccatgaagaccaatcctgccgcatacgcgcgcggtcttgcggacagccccgagctttccgacgagcagatcgaggcgctcaaggcgcaggtcgagaaggcggccgagagcatcgtcctcaccacgtcctacgacgaggcgtttggcgacgccgacctggtcatcgaggcgattgccgaagagcccaagcagaagatcgagctctacaccgagatgcagaagcacctgcccgagcacaccatcgtctgcacgaactcctccacgatgctgccgagccagttcgccgagtacacgggccgtcccgaaaagtacctcgcgctgcactttgccaacgagatctggaagaacaacacggccgaggtcatgggacatccgggcacggaccctgccgcctacgagcaggttgccgagttcgccggcaagatcggcatgattcccctgcgcctgaagaaggagcagcccggctacatcctgaacagcatgctcgtcccgttcctgaccgctgccgagtcgctgctcgccaacggcgtggccgaccccgagacgatcgacaagacctggatgctcgcgaccggcgccccggtgggcccgttccgcatcctcgacatcgtcggcctggtgacggcgtacaacatcgtcgtcatgaacccgcaggcatccgaccccgagaccacgccgggcaagatcgcggccaccctcaagaagtacatcgacgagggcaagaccggcgtcaacgcgggcgagggcttctacaagtacaagtaggagcgcgcttgagctgatgcaggtgggcgctcgctctcgtgtgggcgggcgcctcccgttcaaggcgcgaaaaaggcggggtgcagttcaacggaagactgcgccccgccttgcttcttagccgcgcgcccagccgtgcacctggcagcgcgcttgcccgcttgcgcgtctgcctacgcgcacacctctgcgatgacctcgacctcgacgagggcgcccttggggagcttctcgacggccacggcgctgcgcgcgggacgcgtgtcgccaaaggacttcgcgtactcctcgttgaacgggacgaagtcgtccatgtcgtcgaggaagcaggtcgtcttgaccacgtggtcgaagtcgcttcccgccgcctcgagcagtgccgcgatgttcttcatcacctgcgccgtctgctcttggatcgtcgtgcccacaagctcgccggtcttggggtccaaggcgatctgccccgaggcgaacaacaatccgttcacgatagttccctgcacgtaggggccgattgccgcgggtgcactggtggtggcgatggtcttcatgtctgacctcttcctcttggttttttgcagtctgtaaacgaaaacgcggctatattcacacgcccagtaacatgcactggaaaattgctatgattccgttacacgagcaaaggagctcaaccgtgctgacgcttgacacgttcgaagaagccgccgagaaagtgcgggaggtcacgctcgagaccaagctcatcagaagcccgtatttcagccacctcacgggcaaccaggtctacttcaagccggaaaacctgcagcgtaccggcgcctacaaagtacgcggcgcctactacaagatctcgacgctctccgacgaggagcgctcgaggggccttatcacggcaagcgcgggcaaccacgcgcagggcgtcgcgtttgcggcgtcgcgctacggcgtgaaggccgtcatcgtcatgcccgagacgacgccctacatcaaggtcgagcgcacccgcgagctgggggcggaggtcgtgctctcgggcgacgtctacgacgacgcctacgagcgtgcgctcgagctggctgaggagaacggctacacgttcatccacccgttcaacgacctcggcgtggcgaccggccagggcaccatcgccatggagatcttcaaggagctgccgctcgtcgagtacatcctcgcgccgattggcggaggcggccttgtcacgggcgtcgccacgctcgcgaagctgctcaaccccaacatcaaggtaatcggcgtcgagcctgccggtgcggcctgcatgaaggcgtcgctcgaggcgggtcacgtggtcaagctcccggtcgcctcgacgattgccgacggcacggctgtgctcgagccgggcgatgcggtctttccgtacgtccagaaaaacgtcgacggcatcatcaccgtcgaagacgacgagctcgtcgcggcttttctcgacatggtcgaaaaccacaagctcgtcgtggagaactcggggctgctcacggtcgcggcgctcaagcacctcgacgtgacgggcaaaaaggtcgtgagcatactttccggcggcaacatggacgtcatcacgatggcaaacgaggtgcaaaacggcctcattcagcgcgaccgcgtcttcacggtgtcggtctttctgcccgaccgccccggcgagctcgtgcgcgtcgcgcagacgatcgcggccaacaacgg

SEQ ID NO: 121 - DNA, 6175 bp, Unknown
  16S sequences of unknown bacteria
atagcaccggttgaagctgaccccgcggctctcgcacccccacgacgaaacctcgatctcgtcgccggcgtaaagcggattatacagactcatatttatccggctgagcagaaacgccctgccctcgtcccggagctgctcattcgtcggaccaagattcttcatctgcaaattcgccgtctcctgcatatatctcagcacaagagaagccctcacgaaccccgccgggtcgcagtcatgagtattgatacggtatttttccgtccatttcatagttttgaatctatcctttccccggattcaaccgcggcgccggaagaaagacctcccggcgccgcgcgtctgtttttttatgttaattaaagagtgttctgcgaaccaagaacagtggtgatcttgtggtaaaccatcttcttaacctcatcgcgggcgacggagaggtaagtacggggatcgaacacctcgggctggttgtgcatgacgcggcggataccggcggtcatagcgagacggatatcggagtcgatattgatcttgcagactgccatcttcgctgcctgacggagctcctcctccggaataccgatagcgtccggaagcttgccgccgatggagttgatctccttgacatactcctgcggaacgctcgaagcgccgtgaagaacgatcgggaagcccggaagtctcttagcgacctcttcaagaatatcaaaacgaagcggaggcggaacgagaacgccgtcagcgttccttgtgcactgctccggcttgaacttataagcgccgtgggaagtaccgatagcgatagcgagcgagtcaacgccggtcttggtaacgaactcctcgacctcttccggacgggtgtaagacgaatcagccgcggaaaccttgacgtcatcctcaacgccggcgagtcttccgagctcaccctcaacgacgacgccatgcgcgtgagcgtactcaacaaccttcttggtaacagcgatgttatcctcgaaggaatgatgcgaaccatcgatcatgacagaagtgaatccgccgtcgatgcaagccttgcagatctcaaaatcagcgccgtggtcaaggtgaagagcaagatcaatgcccgaatccttgatagcagcctgagcaagcgccatcagatactcctgcttagcgtactttctcgcgccggcggaaacctgaagaataaccggagacttagcctctccggcagcctcagcgatcgcctgaacgatctccatattattgatgttgaaagcgccgatagcatatccgccagcgtaagccttcttgaacatctcagtagtagttacaagtgccattgtaaatgaccattcctttcataatatccacagcgcccggcaaaacccccgcgcgccgcttttcatatcattactataatattgtactccattcccaccccattttcaacccctttcctcaaaaaaaatgttaatttttatagtcagagttcgtgagtgcgccgccattcgtccgcggctcatcagacatcctgcgtcgcagagttttatagtcaaggttagcttgtacgccgccattcgtccgcggctcatcaaacatcctgcgtcgcagagttttatagtcaaggttagcttgtacgccgccgtttgtccgcggctcatcagacatcctgcgtcgcagagttttatagtcaaggttagcttgtacgccgccattcgtccgcggctcatcaaacatcctgcgtcgcagagttttatagtcaaggttagcttgtacgccgccgtttgtccgcggctcatcagacatcctgcgtcgcagagttgtttttttcagaaatttatcattgagaacaacgacgcgaggacaaccgtcagaagaccgcagaccgctatcgacagaccgctcatcgcctcctgcacctctccgagctcagacgccttcgacgtacccatagcgtgcgcgcctgtcccgcaggcgagcccctgcgccaccgggtcttttatcctgaacagacgaaaaatgaactccgcagccacatttccgaatataccggtaagtatgatcaccgccaccgtcaccggcgccagaccgccaagctcctccgacagccccatccctatcgccgtggttatagacttcggcagcatcgtcacatactgctcatgcgtcagaccgaaagcaacagacaagccgagcacacttccaagacaagccacagttcccgaaagtatcccgccgaacaccgccagcggatacttcttgagatatgacagcttctcgtaaagcggtatagcgagacagaccgtcgtcggcgtcagcatattctggaagaacgccgcccccgtcccgtcataggtcccatccgccttcagcccgccgtacatgaaaacattcgtgtcaatccccgtcgcgagcaatatcgcgatcaccgcgagacaggtgacaagcagcgggttgagtatcgcaagccgcgtcttcttctggagccacagcgcgaaaacgtataccgccgccgtcaggaaaaccccgaagaacgacattccggcaacagcctcatttatcattgtgacgtctctcctttctctttctctcctcgacgcgcatgagtccctccgcggtcttgccggtgacgaccatagtcagcggcgtcgtcacgagcacgatcactattatcggtataatgaacccgcggtagctgtcgaacccggagatcagccccgccgtcggcgcgacgaacattataggcatcagcgtgatcagccagtcgccgaccgccttcacctcatgtatcttcacgacgccggtcataagcagcgccagcatcagaagaagtccgtaaatgctccccggcaccggcagcggtatcaacgagtgcaacgcctcccccgcaaaggagaccgcgagaattatcgctatctgtttcagatgtttcatgatatcctttcacaaccggcggagatcatctccgccattcaagcctcagatttttccacagaatattgtatcatttttggcgccccgtgtcaatacccctataagacacaagtatacaaaaaagccgccgcggttttatttacatcgacgaatctttcgcaagatattttctcatcttgacaaacgacactaaatatggtatcatataagggcatcctacactacgggtagtgtaggcgtcgatatatgagcttttatgaccgccgcacgacatggctgacgccgtgcggttttacatactcaaaagcggacccgttaagggacaaagacacactttcggaaaggaccagaactataatgaagatcatcaaacgcaacggctcggaagccgaattcgataagaacaagataataagagcgatcagcaaggcgaacatcacggtcgacgagtcgatacgcctgaccggcaagcagatcgaccgcatcgccgagagcgtggtgctgtcctgtgagcgcctcggccgctcccccggcgtcgaggaagtacaggacatggtcgaacaccagataatggcgcacggagccttcgaggtcgcgaagaactatatcacctaccgctacacgcacgaccttatccgccgctcgaacaccaccgacgagaagatactctcgctcatcgagtgcaacaacgaggaggcaaagcaggagaactcgaacaagaacccggtcatcaactcgacccagcgcgactatatggcgggcgaggtctcgcgcgacctgaccgaccgcattcttctcccgcaggatatcgtcaaggcgcatgaggaaggcatcatacatttccatgacaccgactatttcgcgcagcatatgcacaactgcgacctcgtcaatctcgaggatatgctccagaacggcacggtcgtcaccgggacgatgcttgagagaccgcattccttctcgaccgcctgcaatatcgcgacgcagatcatcgctcaggtggcgtcaaaccagtacggcggacagtcaatctcgctcgcgcatctcgcgccgttcgtgcaggtgagccgcgaaaagatccgccgcagcgtcattgccgagtcgaaagacttcgaaatcccgctgaacgaagagcagatcacgaacatagtcgagagacgcctgcgcgaggagataagccgcggcgtccagactatacagtatcaggtgctgaccctcctgacgactaacggtcaggctccgttcgtcaccgtcttcatgtacctcggcgaggcgaagaacgagcgggagaagaaggacctcgcgatgataatcgaggagaccctagaacagcgctacaagggtgtcaagaacgagaccggagtatgggtgacccccgcattcccgaagctcatatacgtcctcgaggaggacaacatcaccgaggactccgagtactggtacctgacgaagctcgccgcgaagtgcaccgcgaagcgtctcgtcccggactacatctcagagaagaagatgaaggagctcaaggagggaaactgcttccctgtcatgggctgccgcagcgcgctctccccgtggaaggacgagaacgggaactacaagttctacggtcggttcaatcagggcgtcgtcacgctgaatctcgtcgacatcgcctgctcgtccggcggaaactacgataagttctggaagatattcgacgagcgccttgacctgtgctacagggcgctgatgtgccgccacaaccgccttatgggcacgctgtccgacgctgccccgattctctggcagtacggtgcctgcgcgagactgaagaagggcgagccgattgacaagctgcttgtcggcggatattcgacgatatcgctcggatacgccggtctctgcgagtgcgtcagatatatgaccggaaagtcgcataccgacccgtccgcgacgccgttcgcgctcgaggttatgagacatatgaacgacgcgtgcgagaagtggaagaaggagacgacaataggcttcggcctttacggcaccccgctcgagtcgacgacctacaagttcgcgaagtgtctccagaagcgcttcggcataattccgggcgtcaccgacaaggggtatatcacgaacagctatcatgtccacgtgaccgagcatatcgacgcgttcgagaagctgaagttcgagtcgcagttccaggcgctctcgaccggcggcgcgataagctacgtcgaggtgccgaatatgcagcagaatctcgacgcggtgctcgagataatcaagttcatctacgacaacatcatgtacgccgagctgaacacgaagagcgactactgccaggtctgcggctatgacggagagattgagataaaggaacgggacggaaagctcgtctgggtctgcccgaactgcggcaacgacgaccagaacaagatgaacgtagctcgccgcacctgcggatatatcggcacgcagttctggaatcagggacgcacacaggagatcaaggaaagggtgctgcatctttaatgaatttcgcggcgataaagccgtccgacatagcggacggtccgggagttcgtgtctctctgtttgtctcaggctgcacgaatcactgtgagaactgctttcagccggagacgtgggacttcggttacggtgagcccttcacgtctgagaccgaggagcatatcctgagcctgcttgaccggagctatataaagggtctgacgatactcggcggcgagccgttcgagccgtcaaaccagcgcgcgctcctgccgtttgtcagacgtgtgcgtgagagatacccggacaagacgatctggatgtattccggcttcacctacgaagagatgacgcgtgatggcgcgcatccgcactgtgaggcgaccctgccgctgcttgaccttatcgacgtgctagttgacggtcggtttgtcgagaagctgaagaacctgtccctgcgcttccgcggttcatcgaaccagcggctcatcgacatgaaaaagacactcgcagacggagagatcgttctctgggagaaccagtaaagcagcagaatataaagcgatatccggattcgtctccgggtgtcgctttttttgttgacatccgcgggaagatatgatataatgagtgcaatgaaatatatcacggaggatctgacatgaaaaagctgaacgtttcttttgacggcaccgccgaccctacaggatatctcttctcgctcgtgaaatgtctctccgcggcgctcaggtgcggcggg

SEQ ID NO: 122 - DNA, 4657 bp, Unknown
  16S sequences of unknown bacteria
cggccgcggtaagcgcccgcctggaaagcgccgcggccgatgcgggcagcgactttaatgcccggctgtatgagctggtacaggattttgagtacagggaccgcatagagctgatggcgctggatgccgaggggcaggtgttccttacctccagcgggtttttgccgcaggataccgccatgcccgacctggccgactcgagaacaaacggcggtatcggctcctttaccgggcgatgggacggccagaaaattatggctgtgaccgtgctttcctctctttcgggagaggacctgctggggctgcggtatgtggtctcgatgcaggccatcgaccggcagctgaccctcattacggtgttcgcttcgctggtggcgctggccatcctactgtttgtgctgtataccagcagctacttcatgaattccatcatcgcgccggtgggcgaggtaagccggaccgcccggcagatcgcccagggcgactttgatgtgcggctggatacccacaatgacgatgagatcggccagctgtgcgcctccatcaacaatatggcggaggagctgagtaacgccgagcaggtgaaaaatgacttcatctcttcggtttcccacgagctgcgcaccccgctgactgccataaggggctggggcgaaacgctgctgagcgacgacgacctggaccccgaaacgaggcggaagggcatgcaggtcatcatgggggagacggagcggctttcccagatggtggaggagcttttggacttttcccgcatccagggcgggcggatggtgcttacccgcgagaatgtggacctggcggcggagctgagcgatgtggtgctgatgtacactgagcgggcccgacgggaaaacaagaccctgctgtacgaggagccggagggcgtcatcatcgtttatgcagaccgcaaccggctgcggcaggtgtttatcaatattctggataacgccatcaagtactccgacggcggggacaccgtggcggtgacgctgaccaccataagcggcagcgccgttatctcggtggcggataccggcatcggcatcgcgccggaggagctgccgagggtgaaggaccgtttttacaaaggaaaatcctcccgccgcggttccggcatagggctggcggtggcggatgagatcatcaatatgcacggcggcagcctgaagcttacttcccgcaagggagagggcaccaccgtgaccattaccctgccgctggcaaggggctgagaaaggaaataaacatacccatatggcaaacgaaaagaagaaaacttccataggcggacaggccctgattgagggcattatgatgcggggaccgttcctgacgagtatggccacccggctgccggacggcagcatagatgtggagacctggaacacccacaagggggggcaaaaggcgcactggacccgccgggtgccctttctgcggggcatcttcaacatggtggattcgatggtggtgggctacggctgcctgatgaagagcgccgaaaaggccggcgtggaggaggagcccaccaaatttgacaagtggctggaggaaaagctgggcgataacctgatgaaggtactgggcggtgtggccgtggtgctgggggtggccctggcggcggtgctgtttatctttatccccaccgggctttcttccctgctgaagccgctgctgggcgccggcattgggctttcgctctttgagggcctcatcaaggtcatcatcctggtgggatacatgtggctgagcagccgcatgaaggagatccaccgggtctttgagtaccacggggcggagcataagtccatcgcctgctacgaggccggactgcccctgacggtggaaaatatccggccgcagcggcggttccaccccagatgcggcaccagctttttgttcctggtggtgtttatctccatcattgtgggctcctttatcagttgggataacccggccatccggatgctgctgaagctggcgcttatcccggtggtggtgggcatcagctatgagctcatcaagctggcgggccgctccgacgggattctgacccgcatcatctcggcacccggcatgtggctgcagcgcattaccacctgcgaaccggacgacagccagatagagtgcgccattgccgccctggaggcggtgataccggaggacgaaaatgccgaccgctggtaaaggcacctatcgggagctgctgcggcaaggggagcatctgctgcggcggcgggtgcacccagccccctgcgacgatgccgcgacggacgcattcctgctgctggaaaaggtgagcgggctgaaccgcaccaactaccccctgaaaaaggatgagcgctatccgcaggccgaacgggaggaataccttgcgctgctgcggcggcgggccgccggggagccggtacagtatatcctgggggaatgggactttatggggcgggactttacggtaggccccggagtgctgatcccccggccggagaccgagcagctggcggaggcggccatagactacctgcgaaaacggccagaatgccgcgtgctggagctctgcggcggcagcgggtgtattgccattacggtggcgaaaacgctgcctgcggccaatgtgacggtgctggagctatccccggaggcgatggagtacctgcgggccaatatggcccggcataagacggacaatgtgaccgccgtgcagggcgacgccctctgccctcccccaacgatccaagggccgtatgacgctatcctgagcaacccgccctatattgccagcggcgagctgcccaccctgcaaagggaggtgcggcgggagccggctatggcgctggacggcgggaccgacgggctggacttctaccgggggtttaatgacatttacccgcggatgctgacccccggcgggctgctgctgtatgagataggcgaggagcagggcgaggcagtggccgcgctgctgcgaaacgccggactggagcgggtggctatcctgcgggatgtgtacggccagccccggaatgtgctgggctatgcccccgatgaaaactgaaaaagggtaaaaaataatccccctatatgcagccatttccctgcatttgggggtttgccgtttttatatccatttacgcccggggttacgaggcgagatccagcatcttctcctttacatcggtataattgacatggctgtaaacatccagggtgacgccggccgaggcgtggcccatgaggtactgcacgcttttgacatccagcccgcggcggaccaggccggtgcagaaggtgtggcgcaggatgtgcggggtgagggcggcgatggggataccgccgctttgggcgtagcgccgatggacattgcggaagatgcggtcgaaatcgacgccatgcaaggggcgggagccattgaggcagggaaataaaaaatgccgccgctgaccgatgacctgacaccggccgaactgacgggccacgaggatgcgccgctggagcgcttctgccgcgggagcggtgagggggatcttgcggcagcttttttcggtttttgggggcgcccacaccatacctccctgctccggggagtagtagacctggtgatcgacctggagataaccgctgtgcaggtggatatcctcgaccgtaagcccggcgcactcccctgccctgagaccggtatgcaggaggatcaaaaacaggtcgcggtagcggcggcagtaggtatcctgctccatgaattccaagagggcggcctgctgctgcggggtgagggcctcacgctctttttttggctcccgctggaggaagcccagccggaaggagaaggggttccagccggcggtgccttcttccacggcatttttgaacaccgaggagaggaaagaatggtcgttgcggatggattcgtaggaaaggccgccctgctgcagacgggtgaaatagagcttgcaatctcccaccgtgacatccttggccttgcggctccagagggtatccggctgcaggtgggcgatggtattgcggtagctgcggcgggtacgctcccgcaggttggggcgcagcaacatgtggcgttccaccagctggcccacggtggcgctgcccccggtggaaaggtggcccagcagccgctggcgggcgatctcgtcctccttttgccggagggcctccaatgtgggggcatagcgggtgcggcgctcgccgccctcactccagcggaactggtagctgccatcggggcgctggctttctccggtgcgcagcacgcggccgcgggtgtccttgcgtttttcggttttttgtacttcttgcatacacattaactcctttctcggcgacaaaattcgccggtattccccattctacactattgggacacatttttggaagagtttttgcgcttacaccaccggatggtgtaattttttctgcgatttatgtaaattagtgtaaatattacaatttggtagcaccagcatttaccatattatataatagttggacagatttgagcaatactgggtgaaaaatagagtaaaaacattgtgatttgtggttttcatgggtggtgagatggacttatcccaagccaaaagaccaccccatttacaccactttttacacacaaatttggggg

SEQ ID NO: 123 - DNA, 9506 bp, Unknown
  16S sequences of unknown bacteria
tcatacggggatcggatgcagtgttggccctcaggcatcaactgtcagaattttgtccttgacaaagggaccatttcaaattaaactgatttcagtatcttttgtgttttctgtgttttccgatttttttcaacaaagtcaacagcggctttcgcatggggaacagacacatccacagacggaagatcatcttccattgccatgccgagcaatcgatcgtcttgtcttttctgatcagggaaacgacacgggcccgcaggcaggcatcaggaaaccatccatcccgaaagcagttgccatctccggtcgtttcgaacatccctgtctttctgcctgttacacgatgcagcagataatttcccagaggagtctgcaataatacgatatcgcctttttttaagtcagcggcagcgcatgccgtgatgatcaccttatcccgcccatgacacagaaatggccacatgctcatcccggtgatcgtgaaagaagcctgatggcggttctgtaattcttcttcgatcgctgcgaacagcaccgaagaggaaatcagacgtttttcactcatgcaggacctcggctagtgcatcatgcagcacatctacagactctgcatccggacggcagctgagcagaaagatcggaacatcacgcagaaaggattccagcagatccatcatcttttcagtgagtgctttatcccaggaaggataaagcacatgggcaaagacctggtgaaacgcctctaaggcagagatgcggtgcacctcgttcgtctcgccgcggcgcaggacgaccagagcccggatcgctacgctgcggttgatctgttcaccgcttgttcctgaccaaggcagaccataacctgtccatccttccgctgttttcgcacagaccgcgcgatcgccgttgatgatgagcgcacgtctcagatcacgccataaacgtgcatgcgtcgtttttccggtgccggaagccgcagagatgatgatgccgtttccttcatattccatcaggacgccgtggaaggtcagcaggccatgcgcaagcatacaggcagtgagcagatgagcgagatattcaaacgccatctgtccgcagcttgatgaatggtcctttagcaaagtgatccgtttccagtccgcagaaacatgataagagagcaatacgttcagattcttttttcgaagatactgccagagcgttccgccctcttttgtacggctgattctccgcagaaaaaagccatcctgttgttcatagagagctgtttcttcgtcaatggcaacatcggcattttcggtatatagatctactggctgatgtctgtcataaacagaatatggatcaagcttccattcccagctgtcgcagaatgagcttgatccatactgtctgaattgacaaagcatccctgccagcgaagccaggcaagaggtgctcatagattatgaccagtctccgggatgatcaggaatgatggttgatccttctcctttataggggtttccagattcgccgccagcagacttaagaatagccattagttcattgtgttgatctgaagtgtacttagatggattcccatttccatcgtaatatacgatattaatggcattcagtgtgcaacttcctgatgcaatttggaaagaaaagtagccctctcctggaatatcgcaatagagcaaagtatctgtaccatgatatccccagcatgtattcgcaatcttattctcgttttgtacgttgacaaattccatttttggtttttcataaacagtatttaacatgatcatttcctcctgttcaataattctgttatcacttttgtatcgcggcagacatactctggacatccgcccagatcgcctgtttctgcgtatcttgaagcgcagcatgtattacagatgtctttgctgtcgcaagaaagacatttctggttgaccggcggaagcttcacttgtttggggaaatccttccaggcttgcaaaaatccttttttaatggcattttccgcaaagtttcccatcatctgacaccctaacagttgcccatcccaagaaatagtgtaatcactcattcctgcattacagccaaatagcgtcaatctgggttttatcgtactgtcagttgagtgatcgatctgttcaaagaccaaattcttttcatcatagctgtcgccgacgaaatctttgatgatcttcagtcctcggtgaaaggagagacggacattttcttctggatcaagtcggcattgattgacatcagcgcatgcgcctctcacggattgtgtaacgattcgggtctgaataagcttatggtgactgccaaattccttatggatcagctcacacatgtcatcgagatcagagagattgtctttgatgatggtcgtgcggaaatccatctttgagggaagttcctgaagcttgtgcatgcctgccagtgctttttggaaagcgtctgcagatccacagactctttcataagtttcaggccgagcgccgtatatggttacgccgatcttatgcggcggaaattttctgagcgtctctataatctggtcagtgaccagggtggcgttcgtgtaaagtgtaatcagaaagccctgtttatagatgccttcccagatctcgcaaaaatctggtctgagcatgggttctccgcctgtgatgagcaaggtaagcgttcctgcttctgccgcctgcctggccatatcgatccattgcgctgcactcagctcattctgcaggatctcttcgttttcactgtcatcgtgccggaagagacacatcttacaatgcagattgcatcggacggtcagctcaaaggtcccgttgaccggaatgcgtttcggcatttccttcaacattttcgtgtcagtcatcggcatcgtcctcctgttgaatgatgaccatgtcatgacgttggagcagcttcagaaagtcaaggatatcttctttggcttgttggtgagaaatgtcatagtttgattccaggacttgttccagatccgatgcggtgcttggttcctgcaaggtttcccacaacaatgccgccgtagcgttcatctcgatgtagccgttaaaatccgcgatgttctgtccaatggagatcaggacgtcgctgtctccgatcttgcgatggatgtagcagtccttggcttggaaagtattgtggaagcgatgaccacattcttccagacgcatcatcagctcggcatcgctcagtgaagctgcatcacacagcgatgcagtgtcacatgaaatgaaatgctcagcagctttcttatactttctgtgcttgataaatcatcacctacttccagaatttatcgtgaagttgtccgtattcggtgtatttcttaaagtattctactttaagacagattttgaaaggcatagccgctgttttgtcaatgaacggcggtatttttttttgcttttcatgcttgaatatgccggatatgagatcagattgccattgagtgtagtatgccgatgtggatgctgggtgagcagcatctgaagagccgttcacatttcttccatgtcctgccatgcccgcgtatgcccttcaaagtgaggaaaaggggacgctcagattgtaaacaggcgggaaataaagtaaaatagactgagaaagagagcgagtgtgaaaaaatgaaagtattggtcatcggcaagggaggacgtgagcatgcgatcgcgcatgcggtgtccaaaagcaaaaaggtcacagcggtctatgccgcaccgggcaatccgggcatgaagcagatcgcgacgaatgtgaacatcagcgacagtgacgtggaagggctcgtcgccttcgcaaaagagaatcagatcgatctgacgatcgtcggaccagagcatacgctgtctctgggcgtagtagacgcgtttcagaaagaggggctgaagatcttcggcccgacgaaggcggccgcgcaggtggagtccagcaaggattttgccaagcagatcatgatgcgtcatggcattccgacagcggcatatgcgacatttgacgacaaggatgctgcggtatgctatgtaaaggaaaaaggcgcgccgatcgtcatcaaggaagacggcttgaaagccggtaagggcgttacggtggctcatacgctggaagaggcgctggaggcgctggatatcgcgtttgctcaggaaggcaacaaggtcgtcatcgaggagtgcctggtcggctttgaattctccctgatctgctttgtctgcggagatgtcgtcatcccgatggagatcgcacaggatcacaagtgcgcgtatgacggagataccggaccgaacaccggaggaatgggcgtgtactcaccggtgcgccgcatcacgccgcagatcatcgaagagacgatgaacacgatcatgaagccgatggcgaaggccatggtcgacgagggcgtgccgtttaccggcttcctgtatggcgggttgatgctgacggaagacggcgtgaagacgatcgagttcaacgcgcgtttcggcgaccctgaagcagaggtcatcctgccccggctcaagagcgactttgtcgagatcatcgaaaaggtgatggatcatgaggaatgcacaccggagtggagcgatgaggtgacgctgggcgtcgtgctcgcttctgccggatatccggcatccagcaccaagggcgcagcgatcgagggcctcgatcaggtagatgcgctcgtctatcatatgggcactgcggaaacggacggccagctggtgacggcaggcggacgcgtgctgatcatcgtggcgcaggcgccgacgctggaggacgcatacgcaaaggcgtatgcggaagtggacaaggtcagctgcgcatgcctgttccaccgcaatgacatcggcaagaaagatatgcagtaaatgatcatacacggatgacgagggaggatgatgcgcgatgtgtaaaactgatctggagatcgcacaggaatgtgtgatggatccgatcctcagcgtagctgaaaagatcggactgaacgaagacgatctggaatattatggaaagtacaaagccaagctgagcctggatgtgctcaaccgcaacaaagacaagaaagacggcaagctgatcctggtcacggcgatcaacccgaccaaggccggagaaggaaagtcgacgacgacggtcggcctgggagacgcgctgcaccgcatcggcaagaaggcgatggtggcgctgcgtgagccaagcctcggaccggtattcgggctgaagggcggcgctgccggcggcggttatgcgcaggtagtgccgatggaagacatcaacctgcactttaccggcgatatgcatgccatcacgacggccaataacctgatctctgcctgtctggataatcacatccaccagggcaatgagctggatatcgacatcgagcgggtaacctggaaacgctgcctggatatgaatgaccgttcgctgcgtcaggtcgagatcggcctggggccgaaagccaacggcgtagagcgtaaggacggcttcaacatcaccgttgcctcagaggtcatggccgtgctgtgcctggctacttctttggaagatctcaaggcgcgttttgcgaacatgctcatcgcatacaacacgaagggcgaaccggtctatgtgcgtgatctgcacatcgaaggggcgctggccatgatcatgaaggacgccatcaagccgaacctgatccagacgctggagcataatccggtcatcatgcatggcggaccgtttgccaatatcgcgcatggctgcaactctgtgctggcgacgaagacgtgtctgaagctggcagattacacggtgacggaagccggattcggcgcagatctgggtgcggagaagttcctggacatcaaatgccgctttgcggatcttcatcccaatgcggtcgtcatcgttgcgaccatccgtgcgctgaagcagcatggcggcgtggaattcgaacacctgaaagaggaaaatgtacaggcgatgctggatggctgtgccaacctggctaagcacatcgaaacggtgcgcgccttcggccttccttatgtgatcgccatcaacgaatttgtcagcgatacgcaggcagaagtcgaagcgctggagaactggtgcaaggaaaacggacatccgatggccttgtctcaggtatgggcaaaaggcggagccggcggcgaagcgctcgcccgcatcgtcgtggatctgtgcgaacaggaaaacagctatcatccgctgtatgaggtcaatgacactatcgagtccaagatcgaaacgatcgccaagacatgctatggcgcagacggcgtggattacaccgaggaagcaagggcgcagctggatgagatcgtgaagaacggatgggacaagatgccggtgtgcatggccaagacaccgacctctttgagcgaccaggacaagctgtatggcgcgccgaagggcttccgcatcaccgtgcgtgaattccgtccgtcactgggcgccgggttcatcgttgcgctgaccggaaaagtgctgaccatgcctggcctgccgaaaagaccggctgcgctcaacatggatattgacgaaaacggacagatcagcggactgttctgatccatcggccatttggcagattcgcgtctttacgatataatgtaagacagatggatgagcgattggagatgatttgcgaatggagaaacagaatacggaatattccgcccgtcagcggagaaaggcatatttcaagaagaaaactgccatttatcagcagcagggatatcgtcaggcgaaacggctgacgcgggataagtcagattattccgcccattgctatgcctatatgatcgatgtgagccttgccctttgcccgtcgctgctctggctgctcgttttcctcgcgatcctctgcggattcttcccagtgttcttgttgacgccgatgtactggatcacgctcgtattgctgttctttaccagcatgctcatgaccgggctgatctcggtcaagacgcatgggcagagcctgggccgcggttatcatgatctgaaggtggtccgcaaggacaatcgtgaagccaatccgtttatcctgttcctgcgcgagttcatcggcatcggccttccggtggcggtcctcggatatttcttcaattttttcggcctggctgctttctgggccttgaatatcctggtggtgctggtctctccagatcagcgctctatcgcggactggatcttggggacgcatctggtgttcgagccgcagaacaacatccggtttgaagaggatgtgcgtaaggagctgcagatctcaccgatcgatctgcacattcattccaatttcagcgatgatggatattatgatgtggaagacttgttcgcgcaggcgcagaaggccggcatccgcaccatctccatcaccgatcataactgtgcccgggccaataccatcgcccgccgcatgagcgcgctgtacgatatctgctatattcctggcatagaaatcgactgcatgtatcaggaacggcgggtacgggtgctcggttactatatcgatgagaagaatgagctgttcaactccgtggaaagcgagtcattgaagcgggagaagagagcgagcctggagcgtgcccgcaagctgaaggagcatacgggcatggtggtcgatatggaaaagctgcttgaaaacaatcgcttccagatggtcaccggccaagagattgcccgggtcatcttctctaatgaggtctatcgccagttcccgatcgtccagaagtatctgaaggatgaggacgaggagaaggcgatcagccggtttgcagaagatctgtttggccagggcggcccatgtcatgtggaaatgcgctatccggcattggaggacatcctggagatcgtccatctggccgaaggcatcgccgtgctgtccagctggaactgcgatcatttcggagaagcgttcatctcttcgctcatcgcccgcggattcgacggcatcgaggtgttctccccgctggtcagccgggagacgatggccagactgctgaagatcgccaaggcggaaaagctgttcatcagcgctggaagcgacttccacggaccgtcgcgtccggatcgttatctcggcgtgagcggctgtccgccgcaggcgctcaagctggtcgagatcttgacgcaggcaagcgaaggcagcaagacagacttgcatacacaggtgtgaactgatagggcatccgagcggatgccttttcctatgcgaaagaagaaacagggggatcggcttgcttgctattgcattcgatgatgcgctgccgatcagaaagaagggggatatcttgcagatacaagtcatgaagaaggtattgaaatgtgcctttccgtatacgatcccgatctttgcgggattttggtttctcggtctgacttatggaatctatatgaatgtcaatgggttcagcttcatctatccgatgctcatgagcctgaccatctttgccggttccattgagttcatcgccgtcaacatgctcatgggcgcgtttgatccgctgcaggcactggccatgacgctgatgatcaatgcccgtcatctgttttacggcattgcgatgctggataaatttcgagggctgggatggaagaagatctatctgatcttcggcatgtgcgacgagagcttttcgatcaattacaccgcggatatcccggaggatgtggaccgcggatggttcatgttcttcgtgacgctgctgaaccacttttattggttttcaggcgccacattgggcgggatattcggttccttcctgcagttcagcacggaggggctggacttcgtcatgacggcgatgttcgtcgtcatcttcctggagcagtggctcaaggagaaagatcacgtcagctcgctctgcggccttgccgtatctttgctttgtctgatcctgtttggggcggatcagttcatggttccggcgatgctggccattctcggcgtgctgacgctgctgagaagaccgttggagaagggagaggatgagaaatgacgctgacacagcagctgatcacgatcgcgatgatcgtcttgggcaccgccatcacacgctatctgccgtttttgttgtttccatcaggcagacagacgccgaaatatgtacggtatctgggcaaggtgctgcctgccgcggtattcggcctgttggtcatttactgtctgcgcaatgtcagcgtgctcagcgcaccatatggcatcccgaaattactgtctatcgccctggtcgtctttttgcacctatggaaacggcagatgttattatcgattgctggagggacgatattttacatgattcttgtgcaaactttgttttaatggatgaaaatatgttactattcacagcaggaaatgaaagggcacggaaaaaacacgatgttagaatcagtcttctgattctgcatcgtgttttttcatttctgcaattgtgatatatctttctcctaacgccctttttatcaattcg

SEQ ID NO: 124 - DNA, 1557 bp, Unknown
  16S sequences of unknown bacteria
ccccgcggcgagcaggctcttgcccgctcccgacatcgtgccctgcaccatgatcgccttggccgtcatcggtgctcctccccttgcatagttcccacaacatgcgagagcgcctgcgcgaagcgctcgttttcctcgtgcgtgcgcacggcgatgcggtaccacctgcccgaaagcccctggtagttgtcgcagcgcctgatcatgatgccctgctcgagcagcggcgcgtacagctcgacgggcgacgagaagagcaggtagttggccgtgccctccaccacgcgcatgcccgcgtcctcgagggcacacatgaggaagcggcgctcgtctgccacgtagcgccgggtgcgctccagaaaaccggcgtcttgcagcgcggcgacgcccgccacctgggccggcgtcgagactgcccagggctgccctgccgcacgcaggcgcccgacgaagcgctcgtcggcgcagattccgtagccgagccgcagccccgccatcgcgtaggtcttcgtgaacgcgcgcatgacgacaagctccgggaagcgtggcagcaggtcgagtgcgcttttcccgtacgtgaaatcgaggaagcactcgtcgagcaccacgcgcgcgcccgccgcacgtgccgcctccagcaacgcgccgagcacctcgcggtccacgagcaggccggtcgggttgttgggcgaggcgatgaagacgaggtcgacgcccggtacgacatccgccgcgacagagccggtcagcgcgaagccgtcctcctcgcgcagcatgtgtcgcacgatgcacgcgcctgcctgctcgagcgcctgctcgtaccccgaatagcacggagcgcataccagcgccttctccgggcgcacgaccgcgcacacccgggcgatcaggtcgcttgcccccgccgtgcagacgagctgcccggacgcgacgccctccgctgcgcacagcgcgtcggtcagcgcacggcacgaagggtcgggataggccgagaactccggcaccgactcgcgcagcgcacggacggctaccggcggcatcccgagcgggttgacgtttgccgagaagtcgagcaccccttcgtgggcgtagatgtcacccccgtgctcgaagcgccccataccgctcacagcactacctcgcagacgtagatgccccagctcagggcaaggcacagcacgagcgcaagcgacgccgtcgcgtacagcaggcggttggcgcgcacgatgtcagccggctcgacggggcggagcgcgtctccgatcgtcggcttttccacgagcttgccgaagtaccaggcatcccccgcgagcgcgacgtcgagcgcccccgcgcaggccgcctcggtatgagccgagttgggagaggcatgcttgcgtctgtcacgcaaaaagatgcgccacgcgcctttcgcgtcgagccgcgcgagcgaggcggcgcagaccatgagcacgccggcaaggcgcgccgggacgaagttgagcacgtcgtcgaagcgcgcggccgccgtgccgaagtagcggtacttctcgttcttgtagccgaccatggagtcca

SEQ ID NO: 125 - DNA, 11228 bp, Unknown
  16S sequences of unknown bacteria
cttcttggtcaaagaaattgttataattatataaaagtatgttgccgttttttccgagaacattgccattggcatcgcgggaaaggttggctaccccagggaaattagcgttgtttgaaaattcggtatcgacgattttctgcatgctggtattcattgtggtataaatctggagaccgccggtataaaccttatcgcgtgcttcggaataatcaatattgttttccgcagcatagtcctgtattacctgttcgatggcatagtctgagaaatacgatgaaatttccgtgagactgctgatattcgggttgatgtggtcgagaagattttcggcgagcgccgcgtcgcgctcttcttcagtaatcattccctgttcacacatatttttaagcgtcagatttcttctgctttcggaagcatctccgttatagacgtaggtgtagtcgctgccttcatatattatgatatctttttcagggtcgacatcctcaggattgtatttctttatgagcgcgaactttgtcggtgcttttggaagagatgcgagagcagcgcattcaatgagatcaagctcgcctacatcttttgagaaatatgactgtgcagctgcctgtacgccatatgagtcaaaaccaaggttgatggtattgaggtaggcttcgataatcagctccttggaaagggcgttttctatgagcaccgagtagtatgcttcggctatctttctttcgagggagcggacttcgcgtgattctgttagataaacatttctggcgagctgctgggtaattgtgcttgtaccgcttatttgaccgccggaaactatggcgtctcgtatagcaccaaatattcttatgatattaaagccgttgtgatcccagaatgtcttatcctcgatggcgatgaacgcattgacaaggttatccgggagatcctcgaattcgatgttggtgcgcgtttcaccgctgccgacggtggcgatgatattgccttcgtcatcgtagagcactgaactttcggaaagcatcgagtagatgttatccgggtttatttccggtgctttaatgatgacaaccgcggcgtatgcgccgactatgagcaccataacgagaaatatacatgcgaagagacgcacgagcttctttacattgatcttgtatttcttttttcttcttttttttccggtcattggacttcctactgctgagttttccgcactttcggagttgtcttcatctacgagaaactcttcttttgcctttctggaaattttggagaagagaacttcacatttttccgagatgctcgaggcgataccggaaaatctgttgcgctgtttgcgcagctctttttcctcggcgagcctttcgctccttgtctttcttttttgagagtcagtactgtttaaaaattctgcgatagcttcttcctttaatatatcggcgtcggcagcgtttttcaaggaattattttctgaaagcgcgtcagtgtgtttattaccgctgccggcagtgtcgtctttgttaagtccttcggcaatttcgtcaaactgagcgaaaaagtcgtcgatttcattcgactcggagaaaaacttgtcattattttcacctgatttgtcgtttctgtaatcgtcactcaaaattatcacctgccttgaaaattgtagtaaatgcctaatgatatacaaactatattataccatatatagtattgaaaaaaaatagaaattctctttcataattattaacgaattcttacttttttagaccgctgcgaataagaaggaaaagtcgccggcatctttatcagcatcgtccatctttaatattgtgctaaaaggcttttttatagagggcgataacggcaaaagaattctttaatatatttgacgaatttgttgttgaaaagttcctttatgtggaatataatagaaaaaaagggataaattagaacaaaggggctggagagagaatggaatgaggcgacctatagtacctatatgcggcggttttgtttcgggggctgccatcgcatattttttgatagctaaatacgataatgaagtggtaaagtgcatttatgccgtgctgataacgggaataacattagcgggagccgcaggcgcgttaaaatttcgcattgctttgtgcaggagaaaaggcgcgcgcaagtgcggctcctggaaagaatttgacggtcatgcgcctgtttggtggacattttgctttaatgcaggaatatccgcgcgtatgcggagcgcaatgctttacttaaaaacgacggcgcgtgcgccgattattctgtttgctgcggcatttatattgtcggcggcacttatgtgcgcggaaaacgggagacagggaagccttgaaaaaaatgtcggaagcgtatgcgatataagaggtgtagtgctccgcgcagaggaaaaagaaatgggtgaaaggtacaagctgctcgttcgcacggatgagggtgagaaaacattgattactgttagcggcgggcagtttgcgggggattctaagaattgtgaggataaattgcagggaattaagcataatgcagaagatgcatcagtcctgcctgaaacaaggcccttgctgtgcgaactcgttggctgccgcataagtctgcgcgcttatgtagaatttccgcagggaaggcgcaatcccaaatgttttgattacaggctgtatcttaagagccgcggcgtgaagacagtagtaagtgcgaaggcagcgcagataaaattagaggagactccgaaaacgcttggtgccaaatatctgcataacatatcggaattcaaaggcggattcagcgaaaagcttatgcaaaatatagataaaaaaagtgcggctctgcttctcggtatgcttttcggagaaaaagaattgatagaagatgatacatatacgatttaccgccaaaacggtacagcgcatgtgcttgcggtaagcggtctgcatgtaggtgcactttacgcctgcgtatcaaagctcgtgcggaaaagagggagcatagcggtaaacgcgctgatggcggtagtgctcttaacatatgcggcgctggcaggattttcaccttcggttacaagagccgccgcaatgatattcatacatattattgcagatatgctgcatcgccgttatgatatgctgtcggctgcttgcctgtgtataataataaatatggtaaaaaatccatttgttttgtttgatacgggttttcagctttcatatacggcggtaatagctatagccattttaggctctgcggcaaagcttatgccttatgggggcgcgctgtcatttctttcggtgcagctcggtactgtgccgctgacggcatatatatttaactatttttcgctggggagctttattgtaaatatacctgtaatactcatcgcaggtgtgacggtaccatgcggcatgcttgcgtttgccgtgcataatgtcagcaatacgctctttttacttgcggcacagatggcttctatcctctgtgattttatgacttatataaatgagcttgcatatatggacggacacttgactttcgatactgtgagcccaggcattgctttgatgataatttattatggcatagtgctcggtggattttccgaaatggctcttgtatggtatgctaggcgcagcacgagaaagattgcggcagcaacggtacttatcgtgctcatcgggtttgccgccggcgcatttgcggacgacggcttttcaaagaccggtatcgtattcgtcgatgttgggcagggcgactgcctgcatataaagagcggcagcaggcattatcttattgacggcggcggatctttatcgtatgatgtcggagaaaacacgctgaaaccatatcttctgaaaaacggtgtgcgcaaagtggaggcagctttcgtgagccatcttcacactgatcattacagaggaatagcatctctatgcaggcgcggtatggtcggatatttatgtacatatgaaggaaacagaagcagagaaaaagagatacttgctgaaacgggacttacgcctgaacggataatttatataaaggcaggcgatcggatatcgcttgcgggaggcggcagcattacggtgctgagtcccgaaacctgggaaaataccacgggatatcaagaaaataatgacgatgaaaataaaaactcgctgataatgcgcgtagaatgcgaaggcatttcagtgcttatgaacggtgatatatcggcggaagcggaaatggagcttgtcagaaaattcacaagcaaggacggtgcgttcgcaggcttacttgaatgcgatatattaaaagctgcccatcacggcagcaagtacagcagctgcgacgaatttgtagaagcagtgcagcctgaaataatgatgtttcaggttggcagtaataattacgggcatccggataaaagtttaattgaaaaatgccttaaaaaaggtataatggtatatagaaatgacactgacggtgctgtaggcttttaccgcgaaaggaaaacaaacagcataaaagcgcttgcggtacgaaaggattaagactttatatggcatatcaaaaatcaagatcgagcaagaaagagcatgcttttaagagaattgcgagagatgtaaaagcaggcgaaataccgcctgttgttttgctgtgcggaaaagaacagtatcttgcagcctggggagcggagcttatagaaaacagatttgtaaatccggctgcaaaagcgcttgacttcgtgcgttttgcggacgatacagtgacggtaacaggcattatagaggcgtgcgaaaccctgagtatgttttccgaacgaagagttatcgtagtttctgactttgcgccgcttgaaggtgcgcggctcaagggcttttcggacgatgacgaagcgcatcttgcagaatatataaaggacttacccgaaagcgccgtgctcatatttacatgcgttatccctgatagaaggagaaagctttataaagcatgcagcgagattggagctgtgtacgagtttgatacgctgtcagaaagcgatcttattaaatttataatgaagaggataaaacttgcggggaagacctgccaagcaaatgttatagaagaattcatagaaaacagcggatattataataaggaaacagattacacgctgtataatctggaaaatgacctcaagaaaataatagcgtatgcggcggacgatgaaataattatgcaggatgtgctgtctgttatatcaggaagccttgaaacatatatatttgcactaatagacagcatcagcacggggaaaaaaggtgaggcctataaactgctctataatatattgagcggcggtgagagcatatacagagtgctctcgatgatagtatcgcagtatgaacttattctcgaggttaaagagcttaaagaagcagggttcggaaaggatgagatagttaaaactctcggtgtgcatgaattcagggtcaaaaaagcgataggctttgccgataaatattcgtcggctgcactgcgcagcattctcatttcggcatatgatactgataaaaatatcaagagcggacttattactcaggatcttgcactggaaatgctcattgcttcaatataaagctcttataaaaaatgtaaatcgaaaaaaaggacgataattgttgaatttttgtcaataatgctatatgatagaatatagaccaataaagcataaggtgaaacctgtgcaaataagcatattccaggaggaaaagaatgtttaaaattttgaaggcagagcagctctctgcaaatgtatatttgaaggttgtctacgctccgagagtagcaaagacttgcgagccgggacagtttatcatcgtaagactcgatgaagtatcagaacgaatcccgctcactatctgtgactacgaccgtgagaatggtacggttactatcgtattccagcctgtaggtgcatctactcagaagatggttgacttgaaggaaggagattatttcgcagatttcgtcggtcctctcggttgcccgtcagagcttgttacggacgatcttgaagaagtaaagaaaaagaagatccttttcgttgccggcggtgtgggcacagcgcctgtatatccgcaggttaagtggcttcatgagcacggtatagatgctgatgttatcgtaggtgcaaagactaaagatttgcttatatttgaagaagatatgagaaaggttgctggtaacctctacatatgtacagatgacggaagctacggcttcagcggtatggttacaggaatgatagaaaagctcgtagaagagggtaagcagtacgatctctgcgtggctatcggacctatgattatgatgaagttcgcatgcctcacgacaaagaagctcaatattcctactatcgtaagcatgaatcctattatggtagacggaacaggaatgtgcggagcctgccgtgttatcgtaggcgacgaggttaagtttgcatgcgtagatggtcctgaatttgacggacacaaggttgatttcgaccaggctatgaagcgccagacgatgtataagtctgaggaaggaagagcggccctgaagcttcaggagggcgatacgcaccatggcggctgcggaaattgcggaggtgacaaataatggcagatgcattgaagaaagtacctgtaagagaacaggatcctaaagttcgtgctacgaactttgaagaggtatgtcttggatataataaagatgaagcggtagaagaagctcagcgctgtctgggctgcaagaatgcaaagtgcgtagagggctgtcctgtaagcatcagcattccagattttatcgccaatgtgaaagaaggcaaatttgaggaagcttataaagtaatcagcgaatcctcgtcgcttcctgcagtatgcggtcgtgtctgcccgcaggaaagccagtgcgaaggaaagtgcatacgcggtattaagggcgagcctgtttctatcggtaagcttgagcgttttgtagctgattgggcaagagaaaacaacatcaagcctgagcctccgaaagagaagctggggaagaaggttgctgtaatcggctcaggccctgcgggacttacttgtgctggagacctcgctaagctcggatatgatgtaactatttttgaagcgctgcataaagcaggcggagtacttgtatacggtattcctgaattccgtcttcctaaggacggcgtagtgcttcctgaggttgaaaatgtaaagtctctcggtgtaaaggtggagacagatgtcatcatcggcaaatcggttactattgatgagcttatggaagaagagggcttcgatgctgtatttatcggctcgggcgcaggccttcctaaatttatgaatattccgggcgagactgcctgcggagtattttcagctaatgaatttctcacgagaaacaatcttatgaaggcgtttgacgataattacgatacacctatttcaagaggcaagaaagtcgttgttgtaggcggcggaaacgtagcaatggacgctgctcgtacggctcttcgcctcggcgcagaggtacacgtagtgtacagaagatcggaagaggagcttcctgctcgtgttgaagaggtacatcacgctaaggaagagggcatcatttttgatctcctcacaaatcctgtggaaatcttagtaggagaagacggatgggtaagcggtatccgctgtattaagatggagcttggtgagcctgatgcttcgggaagaagaagccctgttgaaattccggggtcggaattcgatatcgactgcgatacagtaattatgtcgcttggcacatcgcctaaccctcttatttcatcgactacaaagggtcttgaaattgacagaaggaagtgcatcgtagcttcagaagatgtcggtgctacttcaaaggaaggcgtatttgccggcggggatgctgtgacaggagcggcaactgtaatcctcgcaatgggagcaggcaaggatgctgcgcgcggtattcatgaatatttaagcaaaaaataagatttatgcgttaaattgtgtgcaaacataagtaaatatgcaggaagcggtgcagggcgccgcaataaagcttatacgtgaacgcagaatcgcagagattctgcgttcatttttattataaaaaatatttaaaaaaactttaaaaaaggggttgcatattgtcgcgaaatggtgtatatttattatcaacgttgttaaattgttatacaatactacttataaaaattcaaacaagaaaaggagaacagaaaaatgaataagttattgaaaaaagtattggttttaacgcttatgattgctatggtattttcgattgcagcctgcggcggagatgaaagtacggatgacgaaaacggtggtggtacggaggcagttacttataaagctgttacggaagctacattcccgccttttgatactgttgacgaagacggcaacatcatcggattcgatatggatcttatgaatgctatcgcagaagatcagggctttaaagtagaatatgtcgatatggaattcgattcacttattcctgctgttgaaaacggtgacgccgatattattacagctggaatgaacgctatggatcccgctcgtcaggcaaaagttgatttctctacaacatattatgattcaaagctcgtagttgttgttagtgcagagaataacgacataaacggcgttgacgatcttactgcggatatgaaagttacagctcagataggcactacaggtgctgacgaagctgaagctcttgcaagcgacggcaagatcggcgaagctgttatcttaaatgaatacagttcttgcatacttcaggtaatcaacggcgatgctgctgcatgtatcgtagataagcctgtagcggaagcgtacatcaagagccaggatggcaaggttaaaattgtcggcgatgagatgggtgccgagtcatatggatttgccgttcagaagggcaatacggaacttctcgaaaagattaacacaggtcttcagaatatgatagataacggcacttacgacgagctcgttgctaagtggtttaattagtacaaggcaagattggatttagactaaaatggaaacattaaaactttatttaaaaggaatagaggtagcattgcaaggcgtccccatgaccgtgggggtcagccttgttgctgtgttagtgggtgttatgctcggacttgtgatagccttgatgcggatgtcaaagcacagggtgctttctgtaccggcgatgatctatatagaagtggtgagaggtacgcctatgcttgtgcaagcccttgtgctggcttacggtctgccgcagcttcttcgtactataggcataaagtttacatggccatatcttctcataccggctgttatcgtctgcggcctcaacagcgccgcatatgtagcggaaataataaggagcggacttcaggctgtcgataaaggccaaatggaagcggcaagatcgctggggatgccgcatggtatggctatgaggctcataataataccacaggcgtttaaaatagtactgcctgcgttcggcaacgaatttgtgacgctcatcaaggaaacatgtgtgctttcatatgtgggtgtgcgtgaaattctgagacgcggtgcactttggaatgcggcaacatttaacacatttcaggcatatattggcgtagcgatagtgtatatgatgctcacaattccgctttcaaaacttatcggccttctcgaaaagaagatgtcgacagaaaatacgacatcaaaaaagcgcaggaagagtgcttcggaaagatcgttaagcggatctttgccactcagcgtgcctgaagctgatgcggaaggggcggtgcagacagtatgatagaagtaaagggtctgaaaaagagttttaatggtctcgaggtgcttaaaggaattacggagacgataaatgacggcgaggttgtatgcgttataggaccgtctggctcaggcaagagtacatttctgaggtgtctcaatatgctggaagagcatacagcaggtgaagttataatagacggcgaggtactttcagaattaaatgtaaatcaagtgagaaaagagatgggaatggtgttccagagttttaatctctttccgcatatgacagtgctcaaaaatataacggtggcgccgataaaggtaggaggactttcggaaaaggaagctgagaaaaaggcgcttgagcttctcgaacgtgttgggctctcagaaaaggcagaagcgtatccgcgggagctttcgggagggcagcagcagagagtcgccatagcgagagctctggcgatgaatccgcgctatatgctgtttgacgagccgacatcggcgctcgatcctgaaatggtgggtgaagtgcttgaagtaatgaaagggcttgcgcacagcggcatgacgctcatagtcgtaacgcacgaaatgggctttgcaagcgaagtcgccgacagagtgatgtttatggacggcggttatattgtagagcagggcacgcctgacgaaattttcgcaaatccgaaagaagaaaggacaagatcgtttttaagcaaggtgctttagaggttttgtgcagtgtattcaggtcttctgaaagaacgcatttgctgcctgattgaacaatcaaataaagaaaataaggcacggatggaaacacccgtgcttttttattgaagatattttgcaaaaaatttatttaagcgcagtgtaaagtaatacggaaaaatagggcaaaaagtattgtcttgattgacgcgtgaattatgatataattttaataatagttaaaatttagatatcaaggtgatgataatgaaaaagtgtgcgattataacaacatatattgaaggcaatttagcagagctgctgccggatccggaagagtattttgtgatctgcgcagacggaggctatgctcaggccgtggaggcggggataaagcccgatcttataataggcgatctcgattcctataaaggtgacattccaaaagacgtgccgatagaaaagctgccggtggaaaaggacgatacggatacaggacattctctcacatacgcggtaaataagggctataaggaaatcgtcattataggcggcataggcggccgcttcgatcacaccgtttccaatatgcagaatgtggcgggtgtcgagcttggcggcgcgttaaaa

SEQ ID NO: 126 - DNA, 14179 bp, Unknown
  16S sequences of unknown bacteria
ggccctgcgggcctcctctccccaccagggttcctcccctcccaccaaaaagcggcccctcccggagccgcttttcttttattctctgttaaactccgtcagccgcagaccctcgttgcgctccagcgcccactggatgttccactcactcgcgaagagcagcagattgttgcccttcagatcctgcacccacttggtgtcactggtcagcgtcatggtcttggggtcggcgtcgcggcttgcgatccaccggatatacccatagggcaggtcgctgcggcggatcgccacaccgtattcgttcttcagccggtactccagcacctcaaactgcaaaacgcctaccacgcccacgatcacacgctccataccgccgcccggctcggtgaaaatctgtatggcgccctcctgcgcaatctgagtcatgcccttaacaaattgcttgcgcttcagggtatccacctgctctatcgccgcaaagtgctccggcgcaaaggtggggattccctcgaactgcaccttcatcttggggtcgcacaccgtatccccgatggagaaaatgccggggtcgaacaccccgatgatatcgccggcatacgcctcctctatgatctcgcggttttccgccatcatctgctgcggctgcgccagcttgatgcgcttgccctcctgcacatgcaggtactcggtgtccttctggaactttccggagcagatccgcataaaggcaatgcggtcgcggtggttcttgttcatattcgcctggatcttgaacacaaaggcagaaaagccctcgtcaaagggatccaccacaccatcggcggttttgcggggcagtgggggcgtcgtcatcttcaggaagttttcgaggaaggtttccacgccaaagttggtcagcgccgagccgaagaacaccgggctgagtttgccgtgccgcaccttctccaggtcaaattcatagctcgcgccgtccaaaagctcgatgtcatctaccagcgcctgccgctggtacggccccagcagctcatccagccgcgcagtatcggtaatgtcgcactcgatggtcgccagcttattctgtccgttgtggaattcattaaaggccagaatttcccgccggtcgcggtcaaatacgcccttaaaatctacgccgcagccaatgggccagttcaccgggtaggtgccaatgccaaattccttctccagctcctccagcaggtcaaagggattgcgcgcctcacgatccagcttattgataaaggtaaagatgggaatatcccgcatggcgcacaccttaaaaagctttcgggtctgcggctcgatgcccttcgcggcgtcgatcaccatcacggcgctgtccgccgccatcagggtgcggtaggtatcttcactaaagtcctggtgtcccggggtatccagaatattgatgcaatacccctggtactcaaactgcattaccgagctggtgaccgaaataccgcgctgcttttcgatctccatccagtcggaaaccgcatggcgcgcggttttcttcccctttaccgaacccgccagctgaatcgccccgccgtacagcaggaatttctcggtcagtgtggtcttaccggcatccgggtgggagataatggcgaaggtcctccgccggctgatttcctctttcaaacttgccacagtgtttcgtccttcctttggcacttattttctgccgcttttccaccgcggcgcaaatcacaagcatatattttaccacatttcctgccctattacaaggcagaagcccgtttattccgtactttttcggtacatccagctgggggtgtcctctccctcgcccatggcatcacacaggtattcccacccataccgctcataaaaacagatatggtcggtcagcaggtacagcatttttgtcccccgctcctccatgctctcccggtacgcctccagcgggattccccacttttggtggaaccacgccgccgctttttccagccactcggcccgctcatctatgtagatcagttcatatcccatttttctcggtcttctttccgcctgccgcaggcccaccggctccgccgcacacccgccttcgcgggcgtaccccggcgccccaacgggacgccgggaggccgggctttgcccggcagcggctccgccgcctgcccctgcacctacctttattttacggtatgcccagtttgccgaccgccatttttacacaaagtaaaaattcacatcccacgctggcaggcaggggtaatgccgcacatataccttatattccggctgaatagccagcacctccagcggtagccgccacagatcctcgctgcggtggtaccccgcgattaggagcttcggccggtgccgccgcagcgtcttggccatgcccgctatcgcctctgcctccatcccctccacatccatgttgatgagactcaccgtctgcccgcacaggatgttatccacactgtccagctcggtcatggcgccgcccgccgccaggtgggagccacgcccagccccacccgcgaagggcagccgcgcgtaccggctgtacgcccccagccggtacagaatgcaatcatgcagccctgccgtattcttctccagcttcgcaaaggtcacaggatccggctccagcgccgtgatgcgccgccactcccccgcataccctataaattccgctatggtatccccggtgtaggcccccaggtccatgtagtgctcctcttttcccggccgcaggatgttctcccacgcctcccttggctcactttcgcacccacgcagcagtttaatatcaccggtcaatttatattccaccacatcccgcagcactttccgggagtgatcatccgccagcaattcgtatacccgctccagctcctcccggtgggctttcgcgtattcccgggtaaagatctcctcccccgccaccggcacatccggggcatacagctcctgctccccggccagcttctctatctgcgctataatctccggccggtgggtgccaaagcacaccagcaccaccatctcgccgtaccgttccctggccgtccggtagtcggtcaccgggcagcccataaattcctgcccccgggtaaagccctcgctcgcaaacacccccgctatggggatctcccgcttcttcagctcggcggctatcttctccgccccgtcccccatcccatacagcaggatgggcttccccgtcgccttcagtttttcccacattgtccttccccactccctgcaaaatccagatttgggggtcgcgcgcgcgttacacgcgcgtacgcgctcgctgcgctcgcgcgccttccgcgccctgcgggcgcgggcgcggccccctcccccaccggaattcttcccccattttaccacattccccggccggccgcaaaccgccgttcacaaaaaatttgcaatttaatttatataaatcgcttgacaattttcacattttgctttacaataagcttgcaagccgaaaaaggaggtgaaccggcggcatgaaaaagaatgtctattccctcgtcctctcggaggatgtggtgcatgagatcgataagctggcctaccagcgcggcaccaaccgcagcaatatggtcaaccagatcttggccgaatacgccagtcttatcaccccggaaaagcgcatgagtcacctccttgcggaggtccgccgccatttcgaatccgccgcgggcttccagctgccggaggccgcctccgccgggatgatgaatctccggacggccctgcgctataagtacaatcccaccgtccgttacagcctggagctttcccgggataatcaatccatcggcaccctccgggtctcgctgcggacgcagaatacccagctcatcatggccatggtcaatttttacggcctgtgggataccgtggaaacggttttcctgggccggcagcaaagcctggtggatggcgaacgctatctccgggttttgatgctgcaaagccccaccccccaaagcctgctgctgggcagcgaagctctcggcgagctcatcgccgattatatttccaccttcgatgcagccctcaagctgtatttttcggaaccggagccggattcccgcgaaacaaaagcgaagatcgaacggctgtaccgggaatactttgagcggcggaatgtcgccgtataaaacaagcaaatttaccatgtgaggaggatgttttatgaacctcaaccaattcacccaaaaaagtgtagaagctgtgcaggccgcccagcagatggcctccgcccggcagaatcagcagatcgagcaggagcacctgctgcttgccctgctggagcagaaagaggggctcatcccccagctgatgcagaaggccggtgtggaacccgccgccctgcggcagaagcttaccgccgcggtggagcgtctgccccaggtttccggcagcggcgccgggcagatgtacctctcccgcgacctggagcaggccctgaacgaggccgaaaagatcgcccgtgagatgcacgatgagtacacctccgtggagcacctgatgctcggcctctttgagaaaaccgatgacaccctgcgcgccctgttccgggaagcggggctcaccaaggaaaaatttatggcggcgctgcggcaggtgcggggcaaccgtaccgtcaccagcgataccccggaagaaacctacgatgtgctgaaaaaatacggccgcgacctgaccgaggctgcacgcgcccagaagctcgatcccgtcatcgggcgggatgaggagatccgcaatgtcatccgcatcctttcccgcaagagcaagaacaacccctgtctcatcggcgagcccggcgtaggtaaaaccgccattgccgaagggctggccctgcggatcgtggccggggatgtaccggaaaacctgaaggataagaccctgttctcgctggatatgggctccctggtggccggcgccaaattccgcggcgagtttgaggaacggctgaaggccgtgctgaacgaggtgcagcagagcgagggcaagatcatcctcttcatcgatgagctgcataccatcgtcggtgccggcaagaccgacggcgccatggatgccggcaacctgttaaagcccatgctggcccgcggcgagctgcactgcatcggcgccaccaccctgaacgagtatcgcaagtacattgagaaggatgccgccctggaacgccgtttccagcccgttatggtagccgagcccaccgtggaggataccattgccattctgcgtggcttgaaggagcggtatgaggtgtaccacggcgttaaaattcaggacgccgccctcatcgccgccgccaccctttccaaccgctacatcaccgaccgtttcctgccggataaggccattgacctggtggatgaggcctgcgctctcatcaagaccgaaatgaattcgatgcccaccgaaatggatgagctgcggcaccgcatcatgcagctggaaattgaggaagccgccatgaagaaggagaccgacaagctgacccaggcgcacctggcagaggtacagaaagagctggccgagctgcgggagcagtttaacggcatgaaggcccgctgggagaacgagaagcagtccatcggcaaggtgcagaacctgcggcaggagatcgagaagatcaatgccgagatagagatggcgcagaaccgctacgacctgaacaaggccgccgagctgaaatacggcaaactgccccagctgcaaaaggagctggaggaggccgaaaagacaagcgagaccgaggagaaggaggacaccctgctgcgtgacaaggtcaccgaggaggagatctcccgcatcgtggcccgctggaccggtatcccggtggccaagctgatggagggtgagcgtgaaaagctcctgcacctggaggatatcctgcaccgccgtgttattggccaggatgaagccgtgaccaaggtttccgatgccatcctgcgcagccgggccggcatccgggaccccaagcgtcccatcggctcgttcctgttcctggggcccaccggcgtcggcaagaccgagctggccaaggccctggccgaggcgctctttgacgatgagcacaacattgtccggatcgatatgagtgagtacatggagaagtactcggtcagccgcctgatcggcgcgcctcccggatatgttggctacgaggagggcggtcagctgaccgaagcggttcgccgccgtccctactctgttgtactgtttgatgaggtggaaaaggcccaccccgatgtgttcaatgtgctgcttcaggtactggatgacggccggatcaccgacagtcagggccgcaccgtggactttaagaacaccatcatcatcctgacctccaacctgggctccgacctcattctggagggcatcggcgaaaacggcgagatcagcgaggaggcccgcgacggcgtgacccagctgctgcgccgcagcttccgtccggagttcctgaaccggctggatgagatcgtcttctataagcccctcaccaaggaaaacatccgcggcattgtggatctgctggtggccgacctgcagaagcggatggcccagcggcagctgaccgtcaccctgaccgatgccgccaaggattatctgatcgccaaggggtacgaccccatttacggcgcgcggccgctcaagcggctcatccagaccgaggtggagacactgctggcccggtggattattgctgaggaccccgcccccgagactgccattacggtggactacgacggcgaaaagctggtggctatgtaacaaaaatggatagcggctgccccgggcggccggagagatcgaggtacggcaaggagcggcggaaggaaggctcttgcccggcgaagacgggctgatgccttgcgacgccagcgacaccgccggaaccgatctatccggttgccggggcggacgcgaaaagataaaacaagaagcaaaggagcctgtgaccatgagaacgaagcagttcaaagccgaaagcaaaaagctgctggatatgatgatcaattccatttacacccacaaggagatcttcctgcgggagcttatcagcaatgccagcgatgccattgataagctgtatttccgctcgctgaccgatgacagcattcccctttcccgcggcgactacaagatcgccctggcggtggataaggaaaaccggctgctttccatcaccgataacggctgcggcatgaccgccgaggagctggaaaagaacctgggcaccatcgccaagagcggcagtctggactttaagcgggaaaacgagaccggcgaggatgtggaagtcatcgggcagttcggcgtgggattctattccgcctttatggtggccgaccatgtaacggtggaaagccgcgcctggggcgaggaaaccggcagccggtgggaatccagcggcgccgagggctacaccatagagccctgcgaaatggactggaggggcacccgcgtcaccctgcacttgaaggacgacaccgaggacgagaaatacagcgaattcctggaggaataccgcctttccgagctggtgaagaaatattccgactatatccgctaccccatcaccctgctgatgccgcagtaccgccccaaggcggtgccggagggcgaggaagcccccgaaaagccggagtatgaaacggtgtgggaagaaaccactctaaacagcatgatcccgctgtggcgcaagcaaaagagcgaagtaaagccggaagagtacaacgacttctataagaacaaattctacgactatgaagacccggcggtggtgatccatacccggacggagggcaacgccacctttaacgccctgctgtttatccccagccatgccccgatgaactactactccaccagctatgagaagggcttgcagctttattcccgcggcgtgcttattatggaaaagtgtgccgacctgctgccggactatttcagctttgtgcggggcctggtagacagcgaggatctttccctgaacatcagccgggagatgctgcagcatgaccggcagctgcagctcattgaacgggcgctggagcggcgcattaaaggcgagctggagaagctactggaaaacgaccgtgagaaatatgaggcgctgtggaaggaatttggcacgcagctgacctacggcctgtgcatggactacggcatgcacaaggacaccctgcaggatctgcagctgttctattcctccaccgaaaagaagctgacgaccctgaaggaatatgtgggccgtatgaaggagggccaggaggccatctactacggctgcggccgcacggtagaggcaatagacgctctgccgcaggccgaccagataaaagaagccggctacgagatgctgtatatgaccgggcaggtggatgaattttccatcaagacgctgcgggagtatgacggcaagaagttccttaatatccgcaccgatgagatcgatctttccactgaggaacagaaaaaggcgctggccgaggaaaatgaggcggctgctgatctctttgcggcgatgaaggaggcgctgggcgaaaaggtacatgccgtgcgctttaccgacaagctgaaatcccacccggtatgtctttccaccgagggcgggctttcgatggagatggagcagacgctgaacgccatgccggggcgggagaatcgctttaaggcggatgtggtgctggaattgaaccccgaccacccggtaacggccaagctgaaggaatacgccgtgaccgacaaggaaaagctggcggactacgcaaagctgttgtatgccgagggatgtctcatcggcggcgtgccgatagaggagccggccgagctgtgccggctgatcaccgggctgatggagcagtaaggcgaggctgaaaagccggcggagcgcaaagcggccccgcaggggccgcggcgaagctgcggggacggccggcaggccgtcacggcgcgaagcgccgccctgcggggccgtatcctgcggcgggcaggaatcggcgaggaagcgaaaaggaggctgggcccatgcagatcacgatacgaggatatgaaagccgggacctgccgctgatggtagccatctggaatgaggtagtggaggacgggattgccttcccgcaggaggagctgctgaccgaggaaagcggcagagagttttttgccgggcagagctggtgcggtgtggcggaggacgaagccggaaaggtactggggctttacattctgcaccccaacaatgtaggacgctgcgggcatatttgcaacgcgagctacgcggtaagtaaaaaggcccgtgggctgcacattggcgaaaagctggtgctggactgcctgaaggagggcaaaaagcatggctttggggtactgcagtttaatgccgtagtagccaccaacctgcacgcccggcacctctacgagcggctgggctttatccagctgggtaccattcccaagggcttccggatgaaggacgggcactatgaggatatctgtccctactacaaagagctgtaaaagaaaaggctgctccctgcgcgggggcggctttttgcggtttggggaggaactggcgacagaggccaaggcggcgcagccgctcctgccccatgaacagagtgtaaaatctgcggcagccgcccacccccaccctactgtcccctttcctttttcggcggggtgtggtatactggaaaaagaaaatcgaaaggggaagcgcatttatgaaactgagcttttggggggcggcccgggtagtgactggcagctgccaccgtttgaccgcctgcagcaagaatattctcatcgactgcggcctgcagcagggcggcgatgtatacaatgaaaacgagttgttctttgacgcgacagcgatagacgcggtatgtgtgacccatgcccacaccgaccacagcgggcggctgccgctgctggtgaaaaacggctacaaggggcctatctacgcgacacgggcaacctgcgacctcttaaagatcatgctgctggacagcgcccggatacaggaaagcgatgcccagtggaaagcaaagaaaaataaacgcagcggcgacccgaccgaggacgctctttacacggtgcaggatgccaccgataccctggagctgctggtgccggtaagctacggcgaccatgtggagcttttcccgggaattgcggcggactggtatgatgccgggcacctgctgggttcggcggcgatccgctttacggtgacggagggggccgagacccgtaccgtcatcttctccggggatatcggcaatgtggataagcctataatccgggacccgcagccggtgcccccggccgactatgtagtgatggaatccacctatggcgaccggctgcatgagaccggtgaggatgtgcccaaggatctttccgagatcatagaccggacgctggcccggggcggcaatgtggtgatcccctcctttgcggtggggcgcacccaggagctgctgtatcacatccgggagatcaaggcgcgggggctggtgaaatccaaccccaactttacggtatatgtggatagcccgctggcactggaggccacccagatttacgacggcgacctgaccggctatgccgacgaggagaccatagagctgctgaaaaacggctttaagcccatcagtttccccgggctgaagctttcccgcacctcgcaggaatccatggcactgaacaccgacccgacccccaaggtcatcattgcctccagcggcatgtgcgaggccggacgcatccggcaccacctgaagcacaacctgtggcggccggaatgttccatcgtctttgtgggataccagagtgagggaacgatgggacggcagctgctggatggtcttacctcgattaagctctttggagagaagatcgctgtgcgggccgagatctgctcctttaagttcatgtccagccacgcggataaaaacggactcatccactggctggagatgcagggacagaagcccaagaaggtctttattgtgcacggcgaggaaaccgcggcgctgagcttccgcgagacgctgcaggggctgggctacacggccgaggtaccgctctttgaatcggaatacagcctgatggacggcgcgtgcctggccaagggacgagacttcccgcgggacaaggagaagaaagccggcttcgtcagcgagatgttccgccggctgctggcggccgtggaacggctttccggcattgcgaacggttaccggcagagtgccaacaaggacatcgcgcgctttgcggacgaggtggaggagctgtgccgccgctgggaaaagtgatcccaaatccaaacgatataaaaaaatccggcctgcggaaacaccgtgggtcggatttttttgattctattgggctaccatgcggtaaaaaaggccctcgccgagagaggtggtttggcggaggggttccccgacgatgcgaaagccggccttttggtagcagcggacagcgcgggtattccaggtacgcacctccagataaaggggcttgccgggaaacaagcgccgcgaaagcgtgcaggcgatttcggtcatctgccggccatagcctttgccgcaatgggccggtgcaacgccgatgccgaagaagacttcggtttcctcctcgtacagattgataaagccaaccagttcttcccctgcgtaaaaggaatagaaatgattgagcggattggcaaagccaaagccttttttcttttgctccgcataaggtgtggcattgtagattgcatactcaccttcatattcccaggcggtgatacggtatttttctgcttcagttgtttggtgataagtaagcattcattctccttacggtgtaatggggcagcccgcagggccgcagcgaagctgcggggccggttccgagcgaagcgaggaacggcacgatgcgaagcatcgcctgcgggccgtaccccaggcaatgcagcgattagaaaagggcgggaatctggcgcaggtcggtaacggtatcatctaccccggtgggagcggcgggggccccggggcggcggtagtagcaggttttcatgccgtattgcaggccaccggcaatatcggacgagagagagtccccgatgatgagggtctcctgcgggaggatggggacggagcgattttcgttcagctcgcggaaggcgtaatcgaagaaggctggggcgggcttggcggcgccagcatgctccgaaatgaagaaataatcaaaatacggcttcataccgccgatctccagccggtggagctgctgttcgtaggggccgttgctggcgacacacaggagtgcgcggccggaaaggctttgcaggagctccatggcaccggggactgggatggcgctctcgtgcagggcggcacggaagtaatgttcaaaggcggggccatcaaaatggatgccaagagcggcaaaaacattgttccagcggattttttgaagctcggcgaaggtgagtgtaccctcctcgatctgccgccagagcttattattttcggcggtgaaggtgtggtacatctccgggcggtaggcgggcaggccaaaatgggcaaagccctgctccatggtggtgcggacataggcatcaaaatccagcagggtgttatcgatatcaatgaagatggctttcatgaggtcctccgtgaatactatgatggaaagaaagccccggtttgacgccggggcctttttgctgatagttactgacggtaggtttgcaggaattcaccgacatcggtcatggcgcgggcgaggtccttcgcttccggcagcatgacgacccggaagtgatcgggctgaggccaatcgaagccgctgccgggcaccagcaggatgtgtttttcgtgcaggagatccatagcgaactttttatcatcggtgatggggcactttttgagatcgatgcgggggaaaatgtagaaggcggcggtatttttgaccaccgagaggcaatcgaaccggcggatggcctgaacggcggcttcccgctgctcataaaggcggccgccggggatgagcagctcacgggtgctttgttcatcctgcagggcggcaggaatgaccagctgcgtgagggcattaccgcacaggcgcatactggtgagcgccaccatgccggcgataaaatctttggtcacctcgcgagggccggaaacagccagccagccgcagcggaagccgcagatcatgtggcttttggaaaggccgttgaaggtgaggaccgggagatccgggcagagggcagcggtggagacatgctccttgccgtccatgaccaggcggtcgtagatctcatccgagagaaggataagttccttttcccgggcgatcgccacaatctgctccagcagttcgcgggggtacagcgcgccagtggggttattgggattgatgatgaggatggcacgggtgcgggaggtgatcttccggcgaatgtcctcgacatcggggtaccagtcggaggcttcatcgcaggtgtagaacaccggcttggccccggcgatgagggtgacattggtccacagggagtagctgggactggggagcaggatctcatcaccgtaattgagcagggtggtgatggcgaactgagccatctcgctgacgccattgccgacgaagatatcatcgggggtgaggccctggatgcccttaccggtttcatactccagaatggcctgacgggcggcgggcatgccgcggaaatcgcagtagccaacggccttatcggcattctccagcagggcgtggcgcacgcttgggggcatggtaaagccgaaggtggcaggattgccggtattgaggcgcaggacgggggttccctccgcgatcattttcatggcctccacatagacggggccgcggatatcggaatggacctgcgagagtttttcggaacggatgatgggctgcatagcaaagcctccttgctgtggagtaacggaaaataaaaattataggctattatatcactttgggacaagaaatacaatgcgtggatggtttattctatgaaaaagcggggtggtgggtgcggagggcctgggcgctatggggaggggcggaatcccggcagggggcgggcccgcagggccggccgccgcaggcggcc

SEQ ID NO: 127 - DNA, 3521 bp, Unknown
  16S sequences of unknown bacteria
aacattttgttaattatatcacaagcgatgccggatttccggccgttttgcccctctcggatacggggccgtgaccacgagagcccacaccgagtttacctcccgtcttgaagaaatctacgacggcatgaccgagcttatagccaaataccgacccgactgcatttcggtggaaaagctctacttcaacaccaacaccaccaccgccattgcggttgccgaggcgaggggatgtatacttctcgccgcaaaaaaaggtcttgtgccggtttacgaatatacgccgcttcaggtcaaatcgtcggtgaccggatacggcagagccgaaaaaaagcagatcatggaaatgacccgtatactgctcggtctcgacaaaattccccgtcccgacgacgctgccgacgcccttgcccttgccgtttgccacgggcacagcgcgggctcgctgctcactcaaaacagattgtaggagaaatatatgttctattcattgacaggaaagcttgttcttctcagccgcaaccgcgccgttataagctgcggcggcgtgggctttgactgctgcataaccgagacgacctataaggagcttgtcggaaagaacggggaggtaacgctttttacccacctgaacgtcaaggaggacgcccttgatcttttcggcttttacgcaagagaggagcttgaatttttcaagctgcttattggaatttcgggaattggtccgaaggccgcagtcgccatactttcggtgctttctcccgaccgcctttcggttgcgataatgtcgggcgacttcaaggccataagcgcggcgcagggagtgggtgccaaaaccgcccaaagggtggttatggagcttaaggataagctcgggcgctcaaacgttgccgtgtcccccgacgcacaggaagcgggtgccgtttcggcatcggcaaacgcaagcgacgccgtcattgcccttgaggctctcggctttcagcgttccgacgcgtcgttggcggtgggccgccttgacagcgggcttgataccgaaactctcataaagcaggcgcttaaacttttgtccaaaggcctataaaagaggaaatataaatgatagaaaacgaaatggattttgaaaaccgcatggtgtctcccgattttgctccgggggaaaccgagcttgagaattcccttcgccccaaaacccttgacgactatatcggtcaggaaaaggccaaggaaaatctctcaatatacataaaggcggcaaagcagaggggcgagccccttgaccatgtgctgcttcacggccctccgggactcggcaagaccaccctttcgggcattatcgccaacgaaatgggagtcaacctgcgcatgacctccggccccgccatagaaaagccgggcgaccttgcggcgctgcttaccaatctcaacgagggcgacgtgctgttcattgacgaaattcaccgtatttcccgcaatgtggaagaggtgctctatcccgccatggaggatttcgccgtcgacatcataatcggcaagggaccctccgcccgctccattcgcctcgaccttaacaggttcacccttgtgggggcgaccacccgttcggggcagctgaccgcgccccttcgcgaccgtttcggggtcatgctccgtcttgagctttacactccggaggagcttgcgaagatagtcacccgttcggccggtattctcggaattgaaatcgacgccgagggtgctcttgaaatagcctcccgatcgagaggaaccccgagaatcgccaacaggctgctcaagcgtgtgcgggacgtggccgaggtgctttacaattcctctataacccttgaggttgcgagggcggcgctcgaccgctttgaaatcgacgagctgggtcttgacgatttcgaccgaaggctgctgacctccatgatatacaattacggaggaggccccgtggggcttgaaactcttgccgcctctctcggcgaggaagcggtcaccattgaggacgtttacgagccctatcttatgcagttgggctttttgaccagaacaccgaggggccgctgcgtgacgcctgcagcctatcggcatcttgatattgaaattcccgaaaaatagataaagaggagaaaaaattatgccaagactttttggaacagacggtgcaagaggagtggccaacagagagcttacctgcgagctggccatgaaaataggacgtgcggcggcggtcgtgcttgccggggcgggtaaaagccgtccgaaaattctcataggtatggacccgagaatttcttctcagatgctcgaggcggctttgacggcaggaatttgctctgtcggcgccgacgtgctcagaataggaaccgtccccacccccgcggttgcgtatctcgtcaaaaaatacgaggccgacgccggcgttatgatttcggcttcccacaattcctgcgaatataacggcataaagcttttcagcggaaccggctttaagctttccgacgagctggaggataaaatagaagagcttgtcgtgagcggggtttatgacggcgctcatcccatcggagaaaatgtcggacgcgttatagaaatgccgaatgccgtggaggactatataaagcacgttgtttccaccgtcgatgtccgttttgacggcatgagggtggcgctcgactgtgccaacggttcgtcctcggtatgcgccgaacagcttttcacccgtctcggtgccgaggttgcggttatacacaacagccccgacggaataaatattaacgaccgctgcggttccacccatatggaatctcttgtgagtttcgtaaaggcgggcaacatggacgtgggctttgcctttgacggagacgccgacagatgtcttgcggtggacggcgacggaaatattgtggacggcgacgtgctcattgccattgccgccatggatatgaaaaagcgcggcgagcttaaaaataataccgccgttgtgaccgtcatgaccaacatgggcttttggaagtttgcggcgggcaacggcattgaggtcaaaaagaccgccgtcggcgaccgctatgtgctggaggaaatgcttaaaaacgattattccatcggcggagagcagtcgggccacataattttccgcgaatttgccaccaccggcgacggcgagctgacgggcgttcagattcttgccgccatgaagcgggagggaaagaccttaagacgtcttgccgaaattatgaaaatatatccccagacccttaaaaatgtcgtggtcacgcccgagggaaaggcggcctatgccgacgacggcgagataaagagcgtcatcgaatcggtggaaaaggaactcggaggcgacggacgggtgcttgtccgtctttcgggaaccgaacccaaaatccgcgttatgcttgagggaaccgaccttggcgttatcgaaaagcttgccgacaaaattgtggacaaaataaaggaaagacttctataatgagatcaacggaaaattggaaggactatgagct

SEQ ID NO: 128 - DNA, 5850 bp, Unknown
  16S sequences of unknown bacteria
cgaattacgaatagaaatttaaacacagtgacttaagatataatatcatcatcggcggtaaaatgcaagtcttttttgatattttttctcccgccgtgcaaaatattaaaaaactcccttgaaagaaggcaaagccatgtcccaaagaaccgatcttgcccttgaaaaaagcgagaaagcgggcaaagtcccgggaatagaccttgaagaagaaataaaaaacggggtgaccgttacccgtattcgcgtgaccgaccgcgcgggagagttgacggtgggaaagcccgccggcaattatataaccgtcgaagccgataatttcggcggcgaaaccgacggcgattgccgcgaaatcatcaccgaggagctgtcaaggctcattccgaaggagggcaccgtgcttgtggcgggacttggaaattatgacataacgcccgacgcactcggtcccaaaaccgccgacagaatttttgcgacccgccatatcgacggggaaacggcaaaggaaatcggtcttgaaaggcttaggccggtttgcgtgctcagccccggtgtgctgggaaagacgggaatagaaacggccgaaataatcagggccgtggccgaaaaaataaagccgtcggcggttgtggcggttgacgctcttgccgcaatggagccggttcgtctcggaaagacggttcagctgtccgacaccggaatttgccccgggtcgggggtgggcaacagccgctcggagctgagcaaaaagagcctcggaattccggttattgcggtgggtgtgccgacggtggtggatatggccactcttgccgaagggcttgcgggggaacaaggcgccgcccggcttgattgcggctgcgagatgatggtgaccccgcgggagatcgacgccgttatcgaccgcgctgccgaccttgtggcgctgtccttaaactgcgccctgcagccgcagctttcgccgaaagagctgtccgcacttgtttgaccgtctgttgcttaaaaacggtaagaagaaagccgcggtttttgccgcggctttcggttgtaaatcagaatgcgtcgtcggtccacttgacgattttttcgcacaaatcgttttgccccacaagatattggagaatatgcagcgcgtcggcggcggtcacctttccgtccatgtcaacgtcggcagcgacaagctgcatggcatttaagcggactttgccgacggtatactgaagaacgtaaagggagtcggcaggcgaaatttcaattccgtcccttacatatccggtcaatacggtgttccagccctcataaaattcctgaacgcccaaaaggtcgacttgagccgagcggacgatgggattttcgttgagaacgtcgatcatgtcgaggacgtgctgcttgtcggaggtgtcgaggaacaaaagcaggatttgtctgtattcgtcacggttaagcaacagatgcccgaacaccgtacggtttcgctcgttccttttcccgtgcagcatcgtgttcatcaaccgtaggcgtcagccttacggccgatttcacacttccccgcacagaaaaatgaacggcagaaactcttcgaccttaaaaataggagaattttttgtttttgaagttttgccgtaccgacataccggcgtatttcaagcggcgaaacaataaaaacggggaatttaacatttttaaggcgtgcggggttcgggcatctgttgcttaagataaggataatcaccgttagggtcgagcaggggagtgagatagcctatcgacttaacgtcaaccccggggaaatcctccggcgaatattccttgtcaagctcgctgtaatcgtgcaaaatcgagacaatcacgcggtcgggtacaaatttatcgtcgagggtgtagtgataaatcggatttttggtgtctttaatcggtgcggcggatttaccttcaaactcttcggcccctgcaatcggaaaagtgacaaaggaaagaatgaatgtaaaagccaaaagaaaacataaaatttttgtttgtctcctcatattattgctccttttttgtcttttgtcgatatgcgtttgaatattgtttgaagtaaatcacctcctaactgaataatatcattgttcgggacaaaagtcaacaaataactgtgtgaattattataaaatatgtatttttacacagtttgtttacggcaaaaaaatttgtttcggggaaacggccggttatcacggctttttcggtgtaaattataaataatcgccgcaaatcccgatttaaagagttaaaacccttgccaaacgcaaaaaagtgtagtataatcaattccatataataccgatattatgctttggattaagagaacagaaaggattgatacgcatggtaggattcgccgtcatgggtcacggcgttgtcggttcgggagttgtggaggttttttataaaaaccacgacagcattatttcccgcgccggaaccgacgttgaccttaaatatattcttgacataagggattttcccgatctgccctattccgacaagttcaccaagaattttgaggatatactgaacgacccggaggttgaagtcgtggccgaggtcatgggcggacttaaacctgcatacgacttcaccaagagattgcttcttgcgggtaaaagcgttgtcacctcgaacaaggagcttgtggccgcaaagggcgccgagcttcttaaaatcgcaaaggaaaagaacgtaaactatcttttcgaggcttcggtgggcggcggtattcccattatccgccccataaaccagtgccttgccgccaacaatattgatgaaattttgggcatacttaacggaacaaccaactttattatgactaaaatgataaaggaaagtatgtcgtttgacgacgctcttgcccttgctcagcagcttggatatgccgaaaaggacccgaccgccgacgtcgacggacacgacgcctgcgctgccatacccattgaaaagtaacgcgtacttgcgtcaattgccttcggaaagcacgtctatcccgcccaggttcacaccgagggaatttcaaaaatcagccttatggacgtggcctatgcctcgaattacaattcggtcataaagctcatcggcaaggttgccatgaaggaaaacggaaaaatatactgcattgtttcccctatgctcgtcagcagggaaagccagctttcctcggttgacgatgtgttcaacgccataatggtccgcggcaacgctaccggcgacgtcatgttctacggcaagggcgccggcaagctgcccacggcaagcgccgtcatggccgacataatcgactgcttcaagcacataaaggcaaggaaatatgttttctgggaggacggagatcccgattatgtggaggactatgacctcgagaaggtttcgctctatataagaggaaaggccgccgaccccgaaaacgccaaaagcgacatcgaaaaggccttcggaaaggtcaaattcctttcggccgacaacgccccctcccacgatgtggcatttgtgaccgaaaaggacaccgagcgcacgctcaaagagaagcttaagagcctgagctccgagcttgaacccttaaacgtactgcgtatttgcgaataacgccgattggagactgaagaaatgcttattgttcagaaattcggaggcagctcggttgcaaacgccgaccgagtgagaaacgtggcctccatcgtcgccgacacatataaggcgggaaacgacgtcgttgttgtcgtttcggcccagggcgacaccaccgacgaccttcttgaaaaggcaaacgaaataaacccccatgcctccaaaagagagctcgacatgcttgtgaccgccggagagcagatctcggcttcccttcttgccatggctcttgagggaatgggtatgcccgtcgtttcgctgctcggatggcagatgggcatgaaaaccaactcaaactacggtaacgcccgcattaaaaaaatcgagtcggaacgacttgaggccgagctcaaccgcaaaaacatcgtggttgttgcgggttttcagggcataaataaatatgacgacataaccaccctcggaagaggcggctccgacacgactgccgttgccatcgccgcggcgctcaaggccgacgcctgccatatttataccgatgtggacggcgtttataccgccgacccgagaattgtcaaaaacgccaaaaagctcgacgaaataacctatgacgaaatgctcgagcttgccaccctcggcgcccaggtgcttcacaaccgttcggtggaaatggcaaagaaatataatgttaacttagaggtgcgctcgagtctcgaaagagttgagggcacggtggtcaaggaggcaataaaaatggaaaagatgcttatcagaggcgttgcaaaggataataacgtaacccgcgtttcgattgtcggagttcccgacacccccggtatcgcatataaaattttctcgctgctttcggcaaagaaaataaatgttgacatcattcttcagtcggttggcagagacggaaccaaggatattgtctttaccgtcgccggagatcagatggaggagaccaaggcggcgcttgaggcttccgacattcttcacgacgccaaggtcacccttgacaacgacgtgaccaagctttccattgtgggagccggcatggagacccaccccggcgttgccaccaagatgtttgaggctcttttcgagcatgacataaacattcagatgattgccacaagcgaaatcaaaatctcggtgctcatcgacaaaaaggacgccgaccgcgccgtcaaggcggttcacgacgcatttttcgcataagcgagggataaaaatgaatcctaaaatcaaggaaaccaaggccgaaaatctttttaaagccatactcacacttgaaacggtggaggaatgttattccttttttgaggatgtctgcaccattcccgaaatcaaggccatggcccaaagatataatgtggccgaaatgctgagcggcggcagcgtctacagcgagatcgtcaaggaaaccggcgcctccaccgccaccataagccgggtcaaccgttctctcgaatacggaagcgacggctatgaaatggtctttaaaaggcttgcggaaaaatgagcggatacggcgatttttcaaaggtttatgacattttaaacgccgacgccgattatgaaaagcgggggcaatatcttctttcgcttttcacacggcacgggaaggctccgaaaacctgcctcgaccttgcctgcggaaccggaattatgaccgagattttcgcaaaaaacggcatcgacatgataggagtcgatatatctcccgaaatgctttcggtggcaagagagcggctgtgcgaaaagtttcccgaaacgctgctgctttgccaggacatgaccgagcttgacctttacgggacggtggagggaggcatttgcaccctcgacgggctcaatcacctcgattcgatcgacgaggtgtcggcggttttcgacaggcttaaatttttcatcgagccgggcggtctgtttattttcgacgtaaacacgccctataaacataaaaacgttttggcaaacaactgctttgtcatagaaaacggcggagtctattgcggctggcagaatttttatgacgacgagcaatgccgcgtggacatggtgcttgacattttcgagcaaagaggacagggctatgaccgttttcacgaagaattttccgagcgggcatacccgtcggagcagatttcccgcgcggtcgagcaaaacggattttcggtcgttgaaatctgcggcgacatgacattttcgcccccttcgccg

SEQ ID NO: 129 - DNA, 27427 bp, Unknown
  16S sequences of unknown bacteria
agtttactcccccgcccaccagcttgtcaaaaaggcttttttgacaagctgaggcgttggcagaatttgccattgtggcggcgtagatgcgccattttccgcgaatttactgccaaagacttgtattttgcggaaagcacaggtataatatgagagtgtacaaaagatggggggcgcgattgtgagccagtattcccggcgttcttccgggcgcgatttgccgccgcggaagcccaatcagagaaattccagaaaaagccgcaggcggaaaaaagcgagcgccgcgccggcgtttgtgatcagcgttgtgtcggtggctattgcgctggccatcgtatatctaccgcgcgggggcgcgccgcagcccgagatggtgccgcccgttgcgccgagcgccatcatcgccagcgccgagggcacgccgaagccgctcagcgacttggtcgccatgtatgccacgcccgcgcccacgcaaattccgacagaaacgctggaaaattgcttggcgaacagcgcgtttctgggcaattcgctgcttggctcggtgcagcgcagcaatttggccccggagtgcgatctgttcgtgggcacgggcatgaacgtgaagaccgcgctggaaagatccacggacacgggaaccgtgcccatggtcgacgagctcaacggccatgcgtacgaccgcgtgttcaccatgtttggcgtgaacgagctgaactggcccaacccgggttacattgtggagcgctatgtgcccctgattgaggccattcgcgagcggcagcccaacgcgaagctctatatgatttccattttgccgctgaccaagggctacaagagcagcacgggcaaggatatggacgatgtgaacgaactcaacgcgcaactcgccgcgctgtgcgagcagcagggcgtgacgtttatcgatgtgacggacgcgctggtggacgatgagggcttcctgcccgcggaggcgagttcggacgggcaccatctgcacagcgcctacgcgcaggtctttatcgatgaggtgcgccgccaggtgctcgcccttgaaaccgcgcccactcaggcataatttcaccaaagaaaaggagattctcccatgcgaaaggcaagcattgcgctggcactgattctggtattgctgttgtccggttgcgcccaggaaagcgcggccacggaaatcgatgtggcttccgctgcgcaggccgcggtagaggcgctgacgtttgacgacgaaatgacgcccgtgacgcaggatctggcgctcgatttttatggcgtggacgcggcggacgtgaaagccgtgagcgcctatatgagcacgggcgcgaccagcgaagagctttccctgtgggaggcggccaatgcggaggctgcgcagcgcattcatcaggcgctgctttcgcgcgtggagcggcaaaaggaactgtacgcctcttacgcgcccgaggaagccaagcggctggatggattctgcgtggaagaacggggcaattatctgctgctggtggtggccggtgaaacggcttcgtcggcagatgcggctgtgaaggccgtgttcccgtaatgcttttctccagcgccacttttctatttttatatctgccggtggtcatcggcatttattatgccgtgccccgcaaagcgaggaacgcgtttctgctcgtcgccaacctggtgttttatggctggggcgagtgggaatacgcgtttcttatgcttgcctgcgcgctggtgaaccaggttgcgggcatgattatcgaaacgaaaccgcgctatcgcaaggtcgcgctcgtgggcgcgctggcgctttcgctgggttcgctcgggtactttaagtacgcgggcttcattgcgcgcctgctggggctgaatttggcggcgcagatccatttgccgctgggcatctcgttttacacctttcaggcgttgagctacaccatcgatgtgtaccgcggcacaaaggcgcagcgctcgtttgtgaatttcgcggggtatctcacgctcttcccgcagttggtggccgggccaatcgtgcgctatagcgatgtggccgatcaactggaaaaccgccgcgaaaacataggccaattcgcggatggcgtgcgccgcttcgtgctgggcttcgccaaaaaaattctgctggccaacgcctttggcaagatgtgggtgctggtgcagggcacggacgtgggcgcgttgggcgcgtggctgggcgcgctggcctatacgctgcaaatctattttgattttgccggatattccgatatggccatcggcctggggcgcatgttcggctttgaatttctggaaaacttcaactttccctatatttcccgctccatcaccgaattttggcgcaggtggcacatgtcgctttccacctggttccgcgattatctgtacattccgctgggcggcagccgcaagggcgaggcgcgcaccattgtcaacctgctgatcgtgtggctggcgaccggcttgtggcacggcgcgagcgagaacttcgtgctttggggcctatactattttgtgttgctggtgctggaaaagacgctcctgcgccgcgcgctcgcgcatttgccgggctggtgcgcgcatggatacgcgctcttttttgtggtgctgggctggatgctgttttactttgaatcgcttcccgcgctgggcgcgcagctttcgcagatgttttcgctccgctacgcgggcgaaggctggctcgtgctgcgctgcttgcccatgctcgccatcggcggcatttgttccacgccgtggggcgctcgcctggtgcgaaagggcggcgatgtggggttggccattctgttccttctgggcgtggccgccatggtcagcgatagctacaaccccttcttgtatttccggttttgaggtgctgacatgaaaaagcgggatttggctgtcgtaatcgcgtttttggccgccatcagcctgtgcggggcggcgttccttctgctgcccaaggcggatttttcgccccgcgaacgccgcgtgctggctagtttgccggagttggggcaggacgatttcgattcggctttcgaaagctatgtggtggaccacattcccctgcgcgaaccgttggtggcgctcaacgcctattttggcttaataacaggtcgcgacgggctaaatggcgcatacctgggccgcgacggctatctgctggccgcgccaatggaaaagaacgacgcaggttttgcgcgcaatctggaagcgatggcctccttcgtgcaatcttccgggcttccggcgcgcctcatcgcgcccatgagcaagggtgcggcgtttgcggacaagatcattggcccgcacgagccttacccggatgaagagtacctgtcccagttgccagaagcgctgccaaacgtggaaatcgtcgatatcggccaggtggaatactataagaccgaccatcactggacgagccgcggcgcgtatcaagcctactgcgcctatatgcgcgccgtgggcgggcaaccttctccggaggacgcctatgaaaaggtggcgcgcgaggggttttacggcacgacgtacgcacagtccggttatttcgcctcttctagcgacaccatggaaatgtgggtgagcgattggaacgcctccgcgtttcactgggaaaagctggatggctatgacatgtatcaggtgtttctgggcggggacgtgggcgtggacgtgctggattccccttcggcctcggaagggacgctgctgctctttaaggattcctttgccgacgcgctcgcgccgtttctgatgcagcattatagccgcattgtgctcgtcgatttgcgctatgcgcgcaataccgatctggcagaactcgtggcggaatacgcgccgcaggaaatcctcttcgtctattgcatggatagcctggtgaacgaaaccagcctgcgcctgctcgacgcagcgtatgcgggataaagggagaaaaagcgctatcgcggaggcttgtgctccgcggagcgctttttcgattttgggatgtgaaattttggcagacagaatgtaggggggcttttccatgaatggggcggaaaacgcaatctattttgccaaatcgccagacgcaaatgggcacagagaaaccgtggctgaacatctggaaaaggtagcaaggtgggcaggcacattcggtgaggaaaccgggcagcaaaatgccgcccgcgttgccgggcaaatacacgactttggcaaatacagcagggcttttcaggaagtgctggttggaacgcggcatggcgtggaccacgcttttccgggcgcggcgttcctctatcgggcgggcaaggagcggttgcgcgccattatcgaggcggtcaacggccaccacgatggcttgcgctctctggaggccataaagccggaaatgctggaaaacttgcgcacggatcgggtgctgcgctgcccgtcgggcaaggacgcttcgctcaatggtggaggagaatatgaaacggcgattcgggcatttttccgagattttccgcgctttagcaaaacggatttggtcatggccaaagaggcattctcttcccaggaggggcggatgctctatacgcgcatgttgttttcctgcctggtggacgcggactattgcgtgtccgctgccatggcggtggaagagccaaagacgccctcatgggatgcggcgatacaggcgttgaacgactaccggctttcgttggggcgcgactcaaaagccaacgccggcctcaatgcgttgcgcgaccgcctgtttgactgctgcggcgaagcgggcagtagtggcaaggcaggcctttacacgctgaccgcgccgacgggtacgggtaagactttggctttgctcaactttgcgctgcgccagaagaaacgccgcatcatcatcgtgctgccgtttctttcgctgatcgagcaaaccgccagggagtacgcaaagatccttcccgatatttttgaggaccacagccagcgggaatatgacgatgaatatcgcgagttcagcgctcgctgggatcctcccttcatccttaccacttctgtacgtttctttgaggcgctgttccgctggaaacccggcgactgccgcaaattgcacaacattgcgggaagcgtgatcgtcttcgatgaagcgcagagcttgccaggcgcacttactggagcgactttgcgcgccgtgcgcgcgctgtgcgaccggtatggctgctcggtcgttttttccaccgccacgcagccgaacttcgcagcgctgcccaacctggaatggcagccggtggaaatttgcccctggcattccgaattgtacgccagcctgcgccgcacgcgggttgagtggcgcgtgcaggagccaacgccgctaaaaacgattgccgaagaaatggcgcaattggatagcgtttgctgcatcgtcaatttgcgcaagcacgcgaaacgcttgtttcggcggctcaagaagctttgcccgaaggaggagaccttctttctcacgacggacttgtgccccgaacaccgcagcgcgcagatcgattgcattcgggaaaggcttcgcgcgggccttccctgccgcgtggtctccacacagtgcatcgaagcaggcgtcgacctggattttgcgtggatgtatcgcgcgttggcgcctttggaggcgatcattcaggccgcggggcgctgcaaccgcaatggccgcctggctgaagaaggtctcgtggtcgttttcgttcccgaagcggcgggcaggctctatcccagcgccgcctatggcaagggggccatgcgcgtgaaggaaatgctggagaacggggagatcgatatccacaatgcggcgcacatcgccgaatactatcgccgtctgttccgggatgcgcgcgacgacgagaaattgaccgacgcgattgcgcgtggctcgtatgaagacgtatcgcaatgctatcaattgatcgacgaccgctgcgtgcaggtgattgtgccctatgcggggaggcgggaactgtttgaggaaatccagcaggaattgcagcgcacgcaatgcgtcacgccacaactgcttcagcgcgccgcgcccatcacggtgtcggtttatgaccgcgatagctgcgagcgcttcgcagagccgctctttctgcctgccaggcgcgggcagccaccgcgcccaagcggatattgcattttgcggccgcagtatgcgcagctatatacagaagaaatggggctgcaatggccggaagaggaagaaaatggcatcattttttgaaaagggcttgacaaagcaaggaatttttattataatttacttgacgactgttttgaaggcgggaatagaaataagtaaatgatgatggcggccccgccccattcggcggggcaaggaggtgaacgatttggagattgctggaatggctggagcgaatgggacggctggaacggtagaaattgccctggaatgctggggggattttgcttgctggtctgcgccgtatggcaaagtggagcggctcagctatccctttcccacgccttcggcggtgcgggggatttacgccgcaatttacaacaagcccatggagttttattggcaggtcacgcgcatcgaagtgctcaaccccattcgctatatcagtttcaagtgcaacgaggtcaagaaaaaggtcaaggataaggtcatttatgccgacgaagaacgcacgcagcgccagaccgtggctctgcgagatgtgcgctatcgattttcggccgtcatctgtccccgcgaatcgtttcgcggcacgcttgcgcaactcaatgagcaagcgttgcggcgcattcgcggcggcaaggcgttttaccagccttccctgggcctgcggcagtttgtgggctattttgaggagagcgaccacgagcgcgctcccatacgcgaggatatggacgcgggcctgatggtctacgatatcttcgatttgcacgattgcgaagtgcgcaaaaaggcgcggccccagctttcgctgtatcatgcggtgatgaagcagggcgttatcgaagtgccgccatacgacagcccggaagttttgaagggggagacgctatgctgaacgcgctgtatcagtatgccgtggagcaacagcttgccctgcccgtgggcttcgtgctcaagacggtcaaagccttcctttgccttacagcggacggacgctttcttggattggaactttcggatgaccgggcctatgccgcgccggatatcggcagcctagccaacggcacaaaccgctgcaatccgttggtagaaaaaagcagcatcgtcgttccggaggcggccagcgctaagagcgagtattttcagcaggttttggcggagggttccagcgcccttcccgctttgggcgcatgcctcgcggcgctgcgcagcgcggaaacgttggacgccatgcaccgcgaattggagcgcgagaaaatcaagccgggagaccgaattacctttcgcgtggatggagcatgcattttggagattcccggccttgtggcgtggtggcaggaataccggcggcgattcgcttcgccgagagacggcgcgaagagcccttgcctaatcaccggtcaactgaccgttcctctggaaacggcgccgcccatcaacggcctgagcgtagtgggcgggcatccccgcggcgacgcgctgatctgtttcgataaggatgcgttctgctcctatggcctttcgcaggcggccaacgcgcctgtatccgaagaggcttatgcgggcgtgaaggcggcgctggacgagttgctgaaaaaagcccccatcgtcgccgggatgaaattcgtgcattggtatgaccgccccctcccttctccagaggatggcttggatggagttatggctggctttgaattggatgcggaggaagaagaggaagaaaacgctccgcccgaggaacctgtcaatgccagcgcggtgcgcgcccaggcggacgcgttgcccaaaagcgtatatagcggccagccgcaagccccgctgccggatcggtatttcatcctgttgctatccggcgtgagcgggcgggtgatgatccggcgctatgaacagggcgcttatgaggacttgcagcgcaagttggctttgtggtatgacgatctttccctttgccggatggacggcgtgagcgcgatgcgcaattataagctcagcgcccgcctctatcgcttgatgaaacggcaggacaacgataaagaaccttataaacgagccgccaaggagttggcaggcatagtacccgcggtgttcagcgccatcctcactggcggcccgctgccggacgcggtggccgcccgttcgctggcctacatccgctctcagatgctgcaaaacgatgaggaacgcaccagtccgcccataccggatggaatctgctgccagtggctcaaagcgtggctgatgcgcaggaaccgattgaaacgtcaggaggaaaagctaatgctttattacaatccccatcatccagatagtgcctaccagattggggctttggttgcggtttataccgccatccagcgcgcggcaatgccggatgtgaatgcgagcatggtgcagcgctattacgcgtccgccagccagatgcccgcgctggtgcttggtaggttggcagctatgtccaaccaccatcaggaaaaactggaatatcgctggcaagtggatatgtttcaagaactgctcgacgcggcgagcgtggccatgggagacagtatcccggctgtgcttaatttagaagaacaagcgtattttgcgctgggctaccggcaaatgcatgcggagatcaaccaccggcagaacgaattctacgcgcgtcagaaagagaaaaaagaaggaacgcaagcgatacagaaggaggatgcgtaaccatggccattcaaaaccgctatgagcttatgtactacgttgcctgcacgaacgcaaaccccaatggcgacccggatatgggcaacacaccccgcatagatccgcagaccatgcaaggcttcatttcggatggggcgaccaagcgccgcattcgcgactacgttgttactgctcacgggggtgagccgggcatggagatcatcgtccagcaggccaccaacctcaaccgccacatcgcccgcgccaagcgggaagctggctttgaagattgcgctaagggcaaggacgctgtctatgccgggcgcaggaaggcctgcgaattgttctatgatgtgcgcacattcggcgcggtaatgtccactggccccaacgcggggcaggtgcgcgggccggtgcagttcacctttggcaagagcctggatccggtgctgccgctggatatcagcatcacgcgcatggccattgccaagaacctcaaggaaaacagcacgatggaggactatcagaaggacgaggacgccacgccagaagacaagcttcgcacgatggggcgcaagcagttgattccttttggattgtacgaggtgcgcgcttttatcagcgcgaatctggcggcagaaacggggtttgacgatcgcgatcttcaggtgctcttcgaagccatcctcaacatgtacgaacacgatcgttccgccagcaaaggcgagatggaggtcgtgtcgccgctgatcctcttcaagcatgtgggcacggatagcgatgaaaaccagcgtcgccggcaggcgaagctgggctgtgcgcctgcgcaccggttgtttgaactggtggatgtgcatcgcaagtccaatgtggagattccgcgctcctatcgggattatgacgccgtcgtccatttggataaggtgcccgcgggcgtagagattggcttccagcgcgatgcttttggtcccatcgtctggggagcattgcccgagcaggaggactggttgcgcaatggatgaggaagagtatctgccgctgtcctggctctcgcaggcaacctattgcctgcgaagagcggctttgctcctcaatgagcggctgtggatggaaaatgccgataccgcgaagggacgcgatgaacaccgccgcgcccatgagcggaggatcgagcgtcggggcgatcagctcaaattgttcgagtacgatgtgtattccgaacagctacgcatatggggcaagtgcgattgcgtcgaggcacagcgttgcgaaccggggtgccgcatcccggcggcagatttcccggtttgcttgtatcccgtggaatacaagcatggttcggtgcgggaagagccggaatacaacatccagctttgcgcgcaggccatgtgcctggaagaaatgtatcatacgcacattccttccggcgccatcttctttatcacggcacaccggcgcttggaagtggcgttcacccctgaattgcgcgcagagacaaaaacggcggcaaatgcgctctgggagattcggcgcacgttgaaagttcctgcggcggaatatgggcgcaaatgccagcgctgttccctgaaggatttgtgcatgcccaagacggcctcttccgcgaaggcgtactgtcaaacccttgcccgcgaggcgcaggaggtggaagctctgtgaaaaagctgttgaacacgctctatgtccttacgccggaaagttatctctatcatcgcaacgaaaatatctgcgtcaaagttggcggggaagagaaagtttccattccggccctgacgctggaaaacatcgtttgcttcggtgtgaataccgtttccacgccgctgatcggcttttgcggcgaaaaaggcatcgcgctgacgtttctttctggcaatgggcgctttcttgggcgggtgacgggcccggtgagcggcaatgtcttgttgcgcacagcgcaatacgccagcactgggcggcgcgattttgtggatgccctcgtccgcgatctgctgtatgccaagctgcgcaacagcaaagaagttttgctgcgcgccgcgcgcggcaatttgcccgaaaatgacgcggttcgcctcaaagaaggcgcgcagagactcagtgcgttggcgcggcagctggcggattgttcggatgtggatagcatgcgcggcattgaaggtgcggccgcatccgaatatttttcctgctttgactgcatgttgcgaacgcaggcacatggctttgccctggaagggcgcagccgccgtccgcccaagaacgaagtcaacgccgcgctttcttttacatacacgcttttggccagtgaaatgcgctctgccctggaaagtgtgggcttggatcccgcggttggatacttgcatgcgttgcggccagggcgcgcgtcctttgcgctggacatgatggaggaacttcgcgcagcgctttgtgaccggtttgtgatttctttgttcaatttaggccaattgtcgctgtcggattttgaggtggatggagaggcggtctatctcgatgaacggggacgcaaaacgcttttgacaagctggcaaaagcgaaagggcgaaaccattgtgcatccgtttttgcaggagaaaatcccaattgggttgatcccttatgcacaagcgatgctgtttgcccgcgtgcttcggggagatttggaccgctatccgccctttgtatggaggtgatgaacggtgctgctcgtggtcacctatgacgtcaatactgccgatcctggcggtgcgcagcgcttgcggcaagtggccaagctgtgcgagcgctatggcgctcgtgtgcagaattctgtatttgaagtaatggtggatgcggcacagctcactgtgctcaaaagcgaattgcagcggacgatggatcctgaaaaggatagcatacgcttttaccgcctgggcaatcactaccagaacaaaatcgatacgctgggccgtagcgctaaggtggaggctggacaacccttgattctctgaatgcgcgaacctttcccgcacagaaattccgggtgggtacgcgcaaatagcgggcactttttgcgcgcatattctacgtagggcagcgagaattttgcgtgcgccctgccttaatagctacactttgtgacaaatatggaaaaatgcgactcgcattgcgtccatttttgcagaccgccctcacgcgagggcgagaattgaaatggaggcctatttgcgcggcatccctaaccgtcttggaccgccctcacgcgagggcgagaattgaaatataagctgcgtatcgcgcgcgtagatggtctcgcgaccgccctcacgcgagggcgagaattgaaatgaagccctcgaatcgggcggatcggaacccggctcgaccgccctcacgcgagggcgagaattgaaataagtctggacttgccaacgaaattgacgataccgaccgccctcacgcgagggcgagaattgaaattgatgcagaaaggagtgtgaatagggatgatgcggaccgccctcacgcgagggcgagaattgaaataatgtattagattgttttgctggcgagaatcatgaccgccctcacgcgagggcgagaattgaaatgcggtagcttgcagacggccaacacggtgatcgtgaccgccctcacgcgagggcgagaattgaaattcaccagtggggccaataggcccttgttcacctgaccgccctcacgcgagggcgagaattgaaatacttcccagctatcaagttgcttaagttctttgaccgccctcacgcgagggcgagaattgaaatcgaaatcgaggtggaatatgttgcgggcacggcgaccgccctcacgcgagggcgagaattgaaatcgaaatcgaggtggaatatgttgcgggcacggcggaccgccctcacgcgagggcgagaattgaaattgtgagatcacttagcgccgccaccgtgctgcgcgaccgccctcacgcgagggcgagaattgaaatgaaagctcggccatcgcgtctccaagtagcggccatgaccgccctcacgcgagggcgagaattgaaatcggaagagatgggcgtatatgacacgctggagaaagaccgccctcacgcgagggcgagaattgaaatgccgtggcgataaagatattcagcgaacgcttctagaccgccctcacgcgagggcgagaattgaaatgagaacacgtcggcatccgcattgaacacgctggaccgccctcacgcgagggcgagaattgaaattaatccgctttttccggtctcctcctcgatgatgaccgccctcacgcgagggcgagaattgaaataatccgccagtaccgcatcccattaacggaatgtgaccgccctcacgcgagggcgagaattgaaatagggcgatagatttcacgcccttgcccgctggcccgaccgccctcacgcgagggcgagaattgaaatctcgtagccggaaatttcttccagcgccttttcatgaccgccctcacgcgagggcgagaattgaaatttctacttcggtgaacccgccattttgcactttttgaccgccctcacgcgagggcgagaattgaaatcgcgcgcgtggcgctaatgtagcatccgcgcgacgaccgccctcacgcgagggcgagaattgaaatgttattccaaaacccgaacgatactttatcaacgaccgccctcacgcgagggcgagaattgaaataggctccgaggatgaaaatgttgtaactttgcccgagaccgccctcacgcgagggcgagaattgaaatttccacggtgcaaattcccctttcttggtaaattgaccgccctcacgcgagggcgagaattgaaatttgaatataaaaaaatggaggaaaaacaaaatggaccgccctcacgcgagggcgagaattgaaatatgccgcgcattgcaaaagcgctgggcgtgtcggagaccgccctcacgcgagggcgagaattgaaattaggaatcgggcaatgtccaagtcatccataccgccggaccgccctcacgcgagggcgagaattgaaatggatagagatagccgcatcgccgaattgtatctgaccgccctcacgcgagggcgagaattgaaatagcgaagtgatgcgatttgcatcgcgggaggtgtgaccgccctcacgcgagggcgagaattgaaatgatacaggccagcccggttggtatgggacgaatgaccgccctcacgcgagggcgagaattgaaatatggctgaaatgaacgacggcataaataagtggggaccgccctcacgcgagggcgagaattgaaatcatcgggatggaagcggcatcatcaccctgcgcgggaccgccctcacgcgagggcgagaattgaaatagatttggcagccaaagcagattctgccgcactggaccgccctcacgcgagggcgagaattgaaatgggaaaccgctcaagcaaggaaccagggccgggaagaccgccctcacgcgagggcgagaattgaaatgattatctgcgggagccttgacaccatgtccgggaccgccctcacgcgagggcgagaattgaaataggaaggcgtcgtcgctcttttccacagcgatagaccgccctcacgcgagggcgagaattgaaatgaaaaaatcatgactgggaatttaaccgcaacgggaccgccctcacgcgagggcgagaattgaaatgcgacgctggacggcaggacgcggcatagccacagaccgccctcacgcgagggcgagaattgaaatatctcgcgactgcatattgccactcgcgcgccattgaccgccctcacgcgagggcgagaattgaaataagtccgggactgcggaaccggaggcgtaaacatgaccgccctcacgcgagggcgagaattgaaatcgacgtagatggcgagaccgtggagggcggggacagaccgccctcacgcgagggcgagaattgaaataaaacgaattagtagcagacgcccgataagaggatgaccgccctcacgcgagggcgagaattgaaataaattgaagccgatggaatgcgcgcacccatcaagaccgccctcacgcgagggcgagaattgaaatttgtaacctggcttacaagcggaagtgcaggggcgaccgccctcacgcgagggcgagaattgaaatgtttaccacggagcgaacaaattccatgcggtttgaccgccctcacgcgagggcgagaattgaaattgaactacaccacccagggcgagaccaatcttagaccgccctcacgcgagggcgagaattgaaatgaaaaacccgctacaaggccaagctggaggaaatcgaccgccctcacgcgagggcgagaattgaaatagtttttcttgtcgataagtaatatcccgttttcgaccgccctcacgcgagggcgagaattgaaattcaatgtctgcaaacgcactttcgcaaaatggcttcgaccgccctcacgcgagggcgagaattgaaatacgagggcagagatgggaattttaatgagaaaggaccgccctcacgcgagggcgagaattgaaatcgtatgcgtctgaatcatttggcggatacagtcgaccgccctcacgcgagggcgagaattgaaatggccccgagccgattctacaattgcggcggggcgaccgccctcacgcgagggcgagaattgaaataataacggcgacgaagtgcgtgaaaaatgtatcgaccgccctcacgcgagggcgagaattgaaataggatcaacatccacatcctgtgggggggggtagggggaccgccctcacgcgagggcgagaattgaaataagctcccgctgtaccttgggaagctgctccgcgaccgccctcacgcgagggcgagaattgaaatctcaatctggcgattgtagcttatgcccatggtgaccgccctcacgcgagggcgagaattgaaatgcgcatagaaacacggctggtgcaggcgcagctaagaccgccctcacgcgagggcgagaattgaaatggtaagagtctggatggtatggttcgggtcgacacggaccgccctcacgcgagggcgagaattgaaatatgccatgcctcgcagaccgcaatccctctgccgaccgccctcacgcgagggcgagaattgaaattaattccctttgttgtgctcacggctaagcccccgaccgccctcacgcgagggcgagaattgaaatatcggcgcgccgcaccacgcgcagaacggtgtttgaccgccctcacgcgagggcgagaattgaaattccccagtttcgcctttctcgccctgcggtccaggaccgccctcacgcgagggcgagaattgaaatatttgccacgcctccaatctctatgttctcaacgaccgccctcacgcgagggcgagaattgaaattcgtatgcattgatcacgcgtagccagcctgcggaccgccctcacgcgagggcgagaattgaaatattgacgttagcggaatcaccagattcttccaggaccgccctcacgcgagggcgagaattgaaatacgcgctcggctagctgattctgcaacgcctcaaagaccgccctcacgcgagggcgagaattgaaatatctctatcgtgcaagagttccgcagaaacccacgaccgccctcacgcgagggcgagaattgaaatcacctgctagccgatgaatttggcgacagcgactgaccgccctcacgcgagggcgagaattgaaatcgcattggtgatgaggacgttttgaccggagatgaccgccctcacgcgagggcgagaattgaaatcgtttcaagttcgggcgcatctccatctggattagaccgccctcacgcgagggcgagaattgaaataagattcgccatataacgtctcccacctctccatcgaccgccctcacgcgagggagagaattgaaatcgctacttcgcgcggttgccttgatggatcctgtgaccgccctcacgcgagggcgagaattgaaatttcgcccgcgcatacagtaccacggggaattttgtgaccgcccttacgcgagggcgagaattgaaatggaatcagtgcggctgcgctcgttgagaaactgccgaccgccctacgcgagggcgagaattgaaattatatggggaacgatttcaagtattacgcttgtgaccgccttcgcgagagggcgagaattgaaatatgtcagggttagcccgtttcatagcatccacttgaccgccctcccgtgagggcgagaattgaaatcggatccacgctgcggtcgcccggcccgtccggcgaccgccctcacgcgaggggtgcaaattgggataggcagagcgttggtacaccatcaggtgcggatactcgcatgcgtgtggcgatgcgtatgcttcatcgaacagaaagcatagcgagctgctcgccgccgtagaataccgccagataggccgcagaattttcatcaaagctatccggcaggagcgtggtggaacagctagtgcgctcgcgcagaggcaagagattcccatccgcgtctgcgagcgcgaaggagcaataagcgccgctgtaaatgagagtgtcatccacttcgccacagtggggacagggctgcttgcccagggcggcggctgcgctgccgtacatggcgatggggctttctgtggcctcgcatgcgggatccagatgggcatagagatcgtcgggagtgccaaagaagccactgctggaatagtaggttagatagggaaggaggcgtggcgcgatgtgtggcgcccgcgacagatcgacggaacaatcggtttccagatacagtgaaagtggcgtgcggacaagccttgcagaggcgatatgcaggaaatctcccacattcgcatccttaagaagaggcgtcgccgaaagaatcgatttttgcactgggcaagagagcagcagctgcgttccgccggattcgacggcaatgctcctggtggcaaacggcgcgttgtggctgggggaatgctggtataacagcacgctcgcaccttggcgaatactttgcgtggagtatgactctacggttacgatgcgcggcttacccgggtatgatggcgtctctgtaggggcgggggaggctggcgcgcgatcttcgatcacgatccattcgccttctcgcacaggtgccacttcaatcagcgtgtgtagcgcaatgccatcgtagagcgcttcgcgcacggtgaggcggatgaaatcgttttctgtcgtggcgcaatcgcgctgtaccaacggcagggcttcttcataaggcgcgatcagcgaatcctgcagcaattccagcagctggctgggcgcgctttccgccccggtggcgcacgggataaggaagagcagagccaggactagaaatatcgttttctcgcgcatgtttttctccttattttgaatgctttttcgggcggcgacgcgaaatgcgccgccgcccaggcgtttcgcgccgctatgccctgcccgcgttgcgcaggatttgtgcggcgggtgcgggaatgcggcccaggtagtccgggccgacgttcaagagatagttgataccgcgctcattcagatgctgtttgagctcgagcacgcggcgcgcgtccttccagttgttatcgaaggacttatagccccaggtatcgttgagggtggcgggcgtttcgaacaggccgccggaaaggtattcctcgggaatctggttatcgcccagggagcggtagtcgcccaggccgttgccgatgcgcgagttgatcaggcaattgggctggtaggtatgcaccatgtccaccagcgtttgactctgcgcgggggaaagcgtggtgggcgtatcgaaccagatcaggcacagttcgccatattgcgtgaggatttccttcacctgcggcacgatcttgctctcaaagcactgtgaatagtcctttttgtcgttctctggaaaatcccaatcgttggtccaggccatgcactcgtcgtcgtgcgggccatggtttgtatggccgcgcgtgtagccgccgccgttcggctcgctccagtccaggtcctgcgagtaatacaggccaagcttcatccccctgcgcgcgcaggcattcgccagttcttccaccacgtcgcggccaaagggcgtggcgtccacgatgttaaagcggctcgcgcgcgaacggaacatggcgaacccctcgtggtgcttggcggtgaacacgatgtagcgcatgcccgcatcctgcgcgagggacacccattcttccgcgtcgaacagcatgggattgaaggcgcgagcgagcgcgtgatattccgcgttcgggatgcggaaacgcgattgaatccattcgccgatataggccatgcgctcgcctttccactcgccggcgggcagggaatatagcccccaatgcaccattaggccgaattttgcctcgcggaaccatgtgaatttgtccataaccttttcctcccacaattgtattttcaggggttttgtggtatactgatgcctatatcatagcacgtgcctgggcgattgaaaagggcccaaagtggcttttgcgtttaaaatcgatttttttggcactatacacatatgcttgcaggtgcgcgccgcccgctcgggcgattttgcacttgcggcgcacgagtgagagaggagaattccctgcaatggcgatggaagcggccaagatattggcgacagaattcaaaattcaaccctggcaggccgaggctgtgatccggctgctggacgagggcaacaccctgccgtttatcgcgcgctaccgcaaggagcagcacggcgaattggacgaccagaaattgcgcgaaatcgccgagcggctggcgcagttgcgcgcgctggaagcccggcgcgaagagatcgccgcctcgttgcaaaagctggaagtgtggacggaggaattgcagcacgcgttggacgcggcgggcacgatgggcgagctggaggatatttaccggccctaccgccccaagcgccgcacgcgcgcgatgatcgcccgggaaaagggcttggaaccgctatgcgatattttgcaattgcaggcggaaaagcgcaaactgcctgaggaactggccgctccctttatttgcgaggaaaagggcgtggatagcgagcaagccgcgctcgcgggggcgatggacatcctggccgagcgcgtgagcgacgatgcgcgcgtgcgcgcaaagctcaaggcgctttatctgcgcacggcccaggtgcgcacgcgggctgcgaaggaagaggacagcgtataccgcatgtattacgagtatcaggaacccatgcgcctgatggcttcccatcgcgtgctggcggtgaaccgcggcgaggccgagggctttttgaaggtcagcctagaggtggacgcgcagcaggcggaaaacgaagtgtgcgcgctgtatgtgcggccgggcagcaccaccacgccgttggtggaggcggccgcgcgggacgcctacagccgcctgatcgcgccctctttggaaaatgagctgcgcggtaatttgaccgaacgcgcgcaggaggcggcgattcgcgtgttcgcgctcaatttgaagccgctgctcatgcagccgcccgtgcgcggcaaggtggcgatggggctggatccgggtatccgcacgggctgcaaggtcgcggtggtggacgccacgggccgcgtgctcgatacggcggtgatctatccgctgccttcgcacggcaaggtggagcaggcgaaaaagacggtggaagcgctgatccgcaagcacggcgtttcggtcgttgccattggcaacggcacggcttcgcgcgagacggagcagttttttgtggacgtgatgcgcgagatgagcctgggaagcgggctttcctacatggtggtgagcgaggcgggcgcatcggtgtattcggcctccaaactcgcggcggaggaattcccgcaattcgatgtatcgctgcgcagcgcggtgtccatcgcgcgccggttgcaggatccgctggcggaactggtgaaaatcgatcccgaggccattggcgtgggccaatatcagcacgatctcaaagaagcccggctggacgaggcgctcgcgggcgtggtggaggactgcgtgaacgccgtgggcgtggatgtgaacacggccagcccttcgctgctttcgcatgtggcgggcatcaacgccgcggtggcgaagaacatcgtcgcttaccgcgaggaaaacggcgcgttcgcttcgcgcgcggcgctcaagaaggtgcccaagctggggccgaaggcgtttgagcagtgcgcaggctttttgcgcgtgccgggcggcaaggatcccatggaaaacaccggcgtgcatccggaatcctatgcggcggcgaaagcgctgctgaagttgtgcggctgctcgctggaagacgcgcaaaagggccttttgcgcctgaaggccgaagagaggggctacaaaaacctggcggaacagacgggcgcgggcgagccgacgctgcgcgatatcgtaaaagagctggaaaagccgggccgagacccgcgcgatgaactgcccccgccgcttctgcgcacggatgtgctcgatatggacgacctcacggagggcatggagctcaaaggcacggtgcgcaacgtgacggatttcggcgcgtttgtggatatcggcgtgcatcgggatgggctggtgcacatttcacagctttccggccggcgcgtgcgccatcccagcgaagtggtttcggtgggcgatgtggtgacggtgtgggtgctttccgtggagaaggataagaaccgcatttccctcaccatgcgcaaaccggcgggcgcgccgtgaagcaaattttgcttgccgaaacgcccggaatatggcataatataggggaaggaactttcaggaaacaaaagaatgtagcgataggtttcaggaaggagaatgcccatgcatcagagagatttgcgcatccgccgcatcttggaagagctgaaggagcggatgtacatccacagggagccggttgctagtttggaaatttccccgcgcggggaaaacgccttcaagccgtttgaaaatggcgccctttggggcggggaaggcgaatggtgggatttccgcgtgcacgcgcaggtaccggcttcgtttacgggcgcggtacttttggccgccaccacgggttatgaatccggctgggaagcggtcaacccgcaattcgtcgtaaagcaggatggcaagatcatccaggcgctcgacacgcgccacaccacttgcctgttgatgggcaaggcggttccgggcgcgcggattgagctggagctcaatgcctatgccgccgatgtgaagcagccgccgcgcctgtatctggaattgtgcgaccgggacgacgaggtgatgggcctggtgtacgacatcagcgtgccgtgggaagccgtgaagctgatgcccgagcacgagcgcgagcgggaaaccacgctgttcacgctgtgcgaggcgatcaacatgctggacctgcgcaagccgcacagcccggaatttaacgccagcatcaaggccgcgcgcgaatacctgcgcacggaatactatgagaagcgcgcgcggctcccggccatcgcttacgcggactgcgtgggccacacgcacatcgacgtggcctggctgtgggatctgtatcaaacgcggcacaaggccgtgcgcagctttgccacggttttgcacctgatggagcagtatcccgaatacaagttcatgtccagccagccggttttgtataagtttgtgaaggaggacgcgccggagctgtatgagcgcatcaagaaggcgatcgccgatggacgctgggagccggaaggcggcatgtgggttgaggccgactgcaacatctcttcgggcgaagcgctggtgcgccagttcctgtatggcaagaagttcttccgcgaggaattcggcaaggacaaccgcatcctctggctgccggacgtgttcggctattccgccgcgctgccgcagatcatgaagctgtgcgacgtggattactttatgaccagtaagctgagctggtctgaatacaacctctatccctacgatactttctggtggaagggcatagacggcaccaaggtgctcacgcactttacgccgtcccggcagtacaaccgcgccgaagtgggcgatttgcagcactttaccacctacaacgccatgctcaatcccgaggagatgaagggcggctggcagcgcttccagcaaaagggcctggacaacgaattcctcgtttcctatggatttggcgatggcggcggcggccccacggactggatgctggaaaatggccggcgcatggccgtgccgctgccggaagtgcccgtggtgcggcaggagttccccagcgttttcttcgatacgctgaacgagcgcgtgaagaacgccaaggatatgccccagtgggatggcgagctgtatctggaataccatcgcggcacgtataccgccattgccaagaataagcgcaacaaccgcaagaccgagctgctcctgcgcgaggttgagctgtggcgcgagcgcgcctggcggctgaagggactggaatatcccaaagcggtgctggacgatatctgggaggaaatgctcaccctgcagttccacgatatcctgcccggatcgtccattgagaaggtctatcaggattcggacgagatgtatgccgacatcaccgtgcggctcaatgcgctgctcgatgaggcgcttgccgtgctcgcatccgatgcgaagggcgatatcgcggcgtacaactccctttcttacgcgcgcgacgacgtcatttggttcgatgggcccgagggcgtgaccgcgctgcgcgatgcggcgggcaacgaatatcccgcgcagcaggataagggccgctactgcgcctttgtgcgcggcctggcgccgatggccagcacgcccctgtggtttgtaaagggcgaagcttccagcgagcgcatggcggtggacaaaaacggctttgagaccccgttctacaagggcacgttcgatgcggccatgcggattccctcgctgtttgataagcgcgcgggccgcgagctggcgcgtgagccgctcaaccgcatcgtgtgctacgagaacaagccccacaattacgatgcctgggacatcaacatctattacgatcagcggttctgggaagtcgacgatgtgcgcaaggtggaaatcctctccgaaggcccggtgctcacgcgcgtgcgcgtggtctacgcctatatggattcgctcatcgcgcaggatatcgtgctgtatcgcgacctgccgcgcatcgatttcgaaacggaagtggagtggaaagaagtgcagtacatgctcaaggcgcacttccccacgaacctgttctatgaggacgctgccttcgatatccagtatggcaacgtgcgccgcgctacgcataagaacaccagctgggatcgcgcccgctttgaggtgtgcgcgcacaagtgggcggacatcgcggaagaaggctatggcctttccgtgctgaacgattgcaagtatggttattcggtggacgagaattccatcgcgctcaccatgctcaagagttccgcgtatcccaatccgcacggagaccaggagcaccacaccttcacgtattccatcttgccgcacgagggcacctggcgcgagggcggcacggtggagcaggcgtatcagctcaacattccggtgcgcgtgttcgccgccgggaacggacaggccgaactggcctgtgccgcgcgcgtggatcagccgggcgtgctggtggaagcgttcaagcgcgccgaggacggcaagcacaccgcgatccgcctgtacgagtgctttggccgccgccgcaagggcgtgcgcctggaggcgaattgcgaaaaggccgtggagtgcaacgccatcgagcgcgtgctgggcgacgccgtggtggacaacggcgcgatcgtattcgatctgcggccctatgaaatcaagacgttcctgatctagcgggaacgcgcgcaaacaaacaaacaaaccggcccgcaaagcgccctgttcggcgttttgcgggccggctgcttttgtgccgcgcttgtgcgcgggggaggaaagcggcggtttcagcccttgaccgcgcctcccgtgacgccctccacatagtacttctggatgctgatgaacagaagcgtgatgggaatggccaccaggattgcgcccgcgcagaagcgggtgtagtattcatagatgttttcgcggtcgatcatgcggtagaggccgacggcgacggtgtagttgtcgtagttgtccttcatgatgaccgaggcgaatatgaagtccacccacggggcgatgaacgaggtgatcgccgtgctgattacgatgggacgcgacgtgggcaggatgattttccagaacacgccgttgcgcgtcgcgccgtccagcatggcggcctcgtcgagcgagcggggaatcgtgtcgaaaaatcccttgggaacgtaatatcccagcgccgcgccgcccgagtacaccatcaccagcgccgccagcgactgcgccagccccagcgccttgaggaagtgatagatggcgatcatgctcataaagcccgggaacatgcccagaatgagcgagacgttcatcagctttttgcgggctttgaagcgcaggcgggaatatgtgtacgccaccatgagcgtaaggaacgtggtaatcgtgcagctgagcaccgcgacaatcagtgtgttcatgtaccagcgcggaaaattgaacagctcggtttccgtgaacaggcgcgtgaagttgtgaatcgtgtatcccttgggaaggatgtaggtggtgtacgcgccggattcctcgcgcagggcgctgagcagcagccagacaacgggcagcagccacaggaccgacatgacggaaagaatgatgtaaatcgccgtgttcgcggcgcgcgtgcgcgcctttatgcccattttgctcattggaactgatcctcctttttcaccgagccggtcaggttatagacgatcagcgaaagtgtggacacgatcaggaagataaagatgccgatggtggaagcgagcgagtagtcctgcttgtccacggtgagcttatacagccaggtcacgagcaggtcggttttgcccgcctgatagtagtccagcgagagcgggccgcctgcggtgagcaggtagatcacgttgaaattgttgatgttccccacgaaagtggtaatcagcgaaggcgcggtcacaaagagcatatagggcatggtgatggaggtaaacgtgcgcaccggaccggccccgtcgatggaagcgctctcgtacagatccgcgggaatgttcatcaggatgccgctcgccgtcagcatggtgtagggaatgccgacccacatgttgattacgattacggtgcagcgggcccaggtgggatcggtcaggaaggggagcggctggctgatccagcccagcttttgcagcagaacattcacgacgcccgtgtcggtaagcattttggaaaccagcatcaggcttacgaactggggaatcgcgatggtgatcacgaagatggtgcgccacattttcttgaaccggatgccctttttgttgatcatgatggcgagaatgatgccgaatatgtaattcgtgaacgtggcgaataccgcccataccatcgtccagccgaaaatgccgaagaaggtggcgctttttacgggatcgccccagaagatatccgtcacgttggtcatgccgacccaggtgaacagattgcccgggggctggtggctttggtcgaagttcgtgaacgcgatgaggatcataaaaataatgggaagcaccgtgaagcacacgagcgtgagcattggcagggagagcagggtgatgtggaagcgctcgtccaccagggttttcagatcctgccagaaagaattgggctttttgccgttttcgatcgcctgctgcgccgcgagcgaagacttgatgttcagccaccacagcacgaaaaagggcacgagcgaggcgagcgtcagcacgccgaagagcagaatcagcatggaattgtctcccgggacgcgctgataaatctgcagttcctcgttccacacgcgttcctgcgccgcggtgccgagcgtgccgaaatccttgaggtattgccagccaaatccgaaaaagaagtaaaagtagaatatctcaaacgcaaaatagagaagtcccttcatgacctgtccgtgcgtcaggctgccgaatcccatgatcaggcaggacaggcgcgtgcgcgcgtcgcccttttgaaggattttggccccttcgaccaggcggcggccaatggtttggggaagctttgtcaacgccgctttgaaattcttcatcccgcatcctcccaactgctgattccgtgcgttaccttaccgtattgtgcgcaaaaggcgcagcgcctgcgctgcggggcgacgattgcgaactgtgggcacgcggcccgggtggccgcttcctgtatcattttccggccgttgccgccgttggcaaagtcaacactcggaaccgccgcgcaac

SEQ ID NO: 130 - DNA, 17082 bp, Unknown
  16S sequences of unknown bacteria
gtatttatatattttaaaatttatatatttcgtaatatattctcgcgcgtatatgcctgttaaattttcatgggtacagtgggaacaatgggtacaacataccgtaagccctttattcaagccatttttttgttcccgttcttgttcccgaaaaaatttcaacgggcacacctacaaagaaaggattctgactatggaaacacaaaatcttgtaactgtggagtattcgccgcgacaacaggcctaccacatttccagcctgttcgaggttatgagaaacaacgttatggctttaggcgctggcaaagaacctggattttacctgattggtgtattcgaaaatgaaaacgcggcttcggaattcgtccgcaggagaaaagctattaacgcttaaaaaacgggaggatttaaatcatgaaatggttcagcttaagagaataccgccggtatttaaaaacgcttcgtgcatcagaccctcgaatttttgagaggtgggtaaatgaaaacggcatcgataaatataccggggctgccccttgtgacctcgcaaggtatttaaagcacggcggacgagggtgtcgcttgaatttggagcggccgccttgcacagaccacgccaggctattcaaaaactccaagacgggtaaggtatggtttgtgtctcagccttacgatagcccgaaagatgctatgcaacaggtattgccatgggccaaagaaaaagggcttacggctacggtatatagcccaaacgccagttggtatcatccaggtgcctcgtgcttgattgtgatagaagggggttctcaaaatggtaaacgctttgattgactgtctttgtctgctaggctgcgtcgtgtgtatagggtttagcatagtcgttatcgcggcggtcattaagtctctaaggaagtgagcgctatgcccaataagaaagatttaaagctagaccaatacggtattggcaagtacacataccgggaattacataatttctgcctgcaatacccggagaaaaaacgccggctgagagaactggaaaatccatatagcggccccaaatggacggggctaccatctggcggagttacaggagacccgacaggcagaaacgccgagagagcagcggtagcatctgccgatattgacctgatagagcgaacggcctccaaggtggccgggaaggacgcactttggctgataaagaacgtgacacagggtattgcttgggagtatatgccagtgagctgcgggaggcggaagttttacgacatgcggcgaatgtttttttatttcctcgccaaatcaaaaggctatgtgtagggtaacacagaggacctatattcatggtacaatatcactagtgaaagagcgccccgaggaatcggggtgcttttcttattacatggaggcgagcggaatggggatgcacaagcacggtgccaatagtgccaaggcaaaggcgtgtaagaaatattctgacgagggacggcttgccaagaataaggccagaatagcggaaaaccgccggaaatggatagccaagaaacaggctacggcttaatgcgtagctgaaaaaccgccgtggaatgctacggtattacctggaggaggtggcgtggatgaaactgacggaaaagcaacgcgcatggatcgactactacaaacagggacacagcgccgccgaagctgcgcgtctggcggggtatcgcgggaacaatcacgacgtcataggggcgcagaacttagcaaagcttagtaaattcataaccgaccgcgacgatgtactcgatgcctcccgcattgccgacatggaggaaatcaatgcattttggacgaagaccatgcgggacgaaacggcggaacgccgcgaccggctggaagcgtcgaagctgcgggcgagggctgcgggcatgttcaccgacaaagtacaagtttctggcagtgtggacgccggtctggagcggctggacggcataattaagcagctgcatgggggtgattagcccttgagtgatttactgctatcgccaaaatacaaggcgtttctgcggtgcgatgcaccggtggagtttctcgagggcacctagccacagcggcaggaaaaaccaccgtggggctatttaaatttatgctcagggtggccgaaagcccgaagaaaatccatatcctatccggccttgacctgggaacaatcgaaaagaacatcatccaaaaagaattgggaatcctggacgacttcggcccgctggcggaatacaacgcatcgggccgcggggggaattccatgccgcacatcctgtttcacacaggtagcggagacaaggtgatatacgtccttggatatgacaataaagcccgctggaaaaaggctctgggcggtcagtatgggtgcttgtatatcgatgagataaacatcgcggatatggaatttgtgcgcgaggcggccatgcgctgcgattacctgctggccacgttaaacccggatagccccaacctgccggtgtatgccgagtatatcaacaaatccaggccgctgccggagtgggagcgggataccccgcgggaaatcgcggatatgatgcgggagccgccagagcagggctgggtgtactggtttttctcttttgaccacaacgcaggcctgtcagaggccaaaaaagcgcagataatccgcaacgtgcccaagggtacgaagctgtataaaaacaagattttgggcctgagaggccgagcaactggccttgtattcaatcttgagccgcggcacatcatcacggcggagcaggccgcggaatacgattttatccagctgtccatcggggtggatacgtcatactcgcagtcgtccccggatacctttgcgtttgtgctgtcagggatcaccacctgccgcaaaaagataaccctggcggcagaggcgcacaacaaccgggatagggtcaatcctttgacgcccagcgacatcccaccgctggtcatcactttcgcggagcgcaaccgggaaatctggggatttgcccgtaacatctatatcgattccgccgaccaggccacgctgctggaatgcaaaaagtacgcccaccaaaatgggtgcatttacacctttcagccagcctggaaaaagaccaaaaacattgaccgtatcaacctgcaatgtggctggatggcccatggcgattttctttttgtggaaggcgcttgcaagccggaactggaagaaatggccctgtacagctggcgggaagacaaggacaacgaaccggaagatgggaacgaccactgcatcaatgccgatcaatacagctggttaccgtacaaagatcgcatagggggcaaagtatgaaactgtccgaaagggtgaaaaccaaaatgcagaaatggctggaagtgcggccggcgtcggagattggcagtatcgtcatccgagagccgtacagctttgaaaccgatgcgatccgcaatcgaatatggtatcgcggcgacgcggacgaattaaagcagctgtatgcccaaattccgggcacagacgccgggtgcagccgtttttgggccgctgtgccaactggcgatacagtgcgcaagatgcacaccgggctacctgggattatcgtggacgttctggccggtgtcgtcgtgggcgattacgacggcatggaattccaggacgataacggcgacgacgataaggcactgaatgaccgctggaaggaagtgcaggaggctatatcgtttccgggcgtcctggagcaggcactggttgacatgctggtgacgggcggcggggcgttccgggtgtcgtgggataggcggatttccgcgtatccgtcgctggagttttacggcgaagaccggtcgaaatgccacacccggagcggatttgtcacgggggtgtccttttttacggattattggcaaggaaatgaccggtatcagctggaggaattgcgggaacctggatggatccggtacatcctgcgggacgccggcgggaagcctgtagacctaaagaccgtcccggaactggccggattaaaggatacaccggtgccggccggcatcgtgaccgctatcccgttccaggtgtggaaaagttcaaagtgggacggccgcggccggtctatatatgccagcaaaacggatgatttcgacgcgctggacgagatcgcgtcccaatggctggatgctgtacgacaagggcgggtgcagaagtatatcccgcaagacatgatcccgcataatccaaaaaccggggaattaatgcaggttgacgcatttggaacaaattttgtccaagtggaaaaccctgtgggggaaaccggaagcaacagcaagcgaattgaaatcgtgcagccggacatccgatatgaagcctataaggaatcctacatatctgccatcgacctgtgcctacagggcatcctatcccccgccaccctgggaatcaatatagcggccacggcatccggggaagccaagcgagaaggaaaggacgtcaccgggttcacgcgcaaccgcatcaccgccaagctggaggacgtactgccgaaagtggcggccgccctgctgatggtacaggactggataaacggggaacccatcaagaaatatacaccgtccgtatcctttggcgaatacgcggcgccggattttgggacgcgggttaaagctatccgggaagcggacgccgccggcgcaatgagcaccgaggccaaggttgacgaaatttggggcagctcgaaaaccaaggagtggaaagcggaggaagtggcccggataaagcaggaaaaagggatcgttgatgtggacgaaccgtctgcgggggatgaactgccgtgaccgcccgagaaattgcggacatttttgaaaagatacagctgcgccttatcgcgtctctgaaacgcaacctaaagcggcacaaagcggaagaaaaggaatacggctttaactggcctgcctggcaggctatcaagctgcaaaacctggacaagttccgcgccgagtgcgccgccatcatggaggaatataagcccctgattgacgccgaggccgagaaaatcatcgaagaagaattcgaggccggtatggatcaggtggacgaagaaactgggcgcgcggacgagccgggagacgatcatttttttggcatgaaccggcagcgaatagacagcttgattgaagatgtcaaccacaatctgcatgaagcggaatcttccgcgctgcggatgatggatgacgtataccggcagacggtttatcgggcggaactggaggcagcgtccggagcggcgacgatggagcaggcggtagatatggcggtcaaggattttttggccgccggaatcaactgcatccagtaccgcaacggccgcttggtcaacatcgccacctacgccgagatggccatccgcaccgcaagcttgcgatcgtacctgcgcggagaggctacccgccgggaggcgctgggaatcgatactgtactggtcagccagtacggggcgtgttccgatacctgcctcccatggcaaggacgggtgtacatagatgacgtgtggggagcgttcgccggcgagcgggcagacaaccgcgggaaaagcagcagcgggaaatggcacccgcttttgtcggttgccgtggaggccggtctgttccatccgaactgccgccacacgctgaccacgtggtttgatggcgtcagcaccatgccggaacctatggacgccgataaagtgcgggagactgccaagctggaacgccggcagcgccgcatggaggccaatatacgccggctcaagcggctggcggatggtacgctggacggcgataccgccgcggaataccgccggaacgtccggcaagcccaagcacaactgcgtcgatttatcgaccagcacagcgaccagctgcggcgggattactggagggagaaaacccacaaaatccccgccgacgccaacaaacacgcctgattgcctgactatcaggaatttatataaaacccaaaaaaggaggaacgaacatgcaggaagaggaaaagaaaaatcccgagcagcctgcgccggaaaaagagccggagacggaacccaccaaggagccggaaacggagcctgccaaagaaccggaggaaccgcccgcgggtgaaccgactgtcgagaccgaaggcgaaggagagcaaccccaggcggatcctgaaaaggaaaagctgatgcgggagctgaccatcgcccgcgcccagctggcggccatccaggcgaatatcgatccacggatggcgccggacgcggtgattctggctgtgtacagcctggagcaggaaggtaagacggcagacgaaaagtctatcgcttccgccttggaaaaggtcatggaacggcacccggaatggaaagccggaaaaacgccggcggcccccgataaaggcggggccgatgaacccggcaaagattcaggcgacaaaaagacgccgccgcctggtaaggtcattttttaagttagaaaggatgaagtaaatcatggcaagaacccaagctatcagcatgctgtctggtgccagcacccccgccagcctggcggaaatctatgggctggtcatcgaaaacgtgcagaaatccaccctgtccaccgcgctgaaatccaaccagtacaccggtaaccctgccgcgggttccgtggaattcacgcggttttccaatgcgacgccaaaggactacggcaccgcccgcgccgccggcaagggcgataaagtgacggcgaagccgatcaccgtcaacttgtctgtccatcgggaaatcatcgaagaagtggccaagtttgacctggaaaccttcggggtgccggacatcatgcgccgccgggcggataaccacgtgctgcgcatgtcggccgacctggattcggcgttcttcgccgcaggtgcgacggacggaacggcatttacccccgcttccggcgtcactgatatccaggcggtggtggaatcgtgggtgcagacgctggagacgctgaaaaacgaatatgtggacggggtggatcgcaacctgatggccctggtgctttctcctgaaaagtacggcctgctgcgcatgttcctggatacgcagcccaaccccaacgtcaacaccgccgcggaggaatttggcctgtatcacggcgtcaaggtgtacagctgcacccgcctgcccagcaagaccaatggcctgttgatggtcaacggggttatcggccagccggttgtgaccaacccttatgccgatcccgaaaaaattccgctgtccaatgattttgccgtggagatgttttacgactacggcaccgaaacccttgcccccgatcttgttttgaaatgggtgacggaatgatgaagtaccgcaatagggaaaccggcgtcatcctggaaccggcgtcggacgtagcagaagccacattcgcggcggatgagcggtacgaagccatggcggcggaaaccggcgaaaagccggttgcccgccgcagaaaaggcggagaagtcaaggaggagtagccgtgtatgtgaccgcgcaggagtacgaagcgcttagcctgacccatgccgtgccggaggaagagctggaatccgccctgaaagcggccgagcgggacatagacagcttgacattttgccgaatacataggtgcggactggacggccttacggattttcagcgccaaaacgtgaagcaggctgtggtggatcaggcagatttccgggcgcaatacggagaactgctggataaccccctggcctcctattccgtcaacggcgtgtccatgtcgtgggacaaaagcaaaatcctccgtatttctgacgtggacacatccccggcggtctattccctcctgcggcgcaccggtttgacctataggggggtgccgtgatgcagtggcccaagctggtgcccaaggatatatgcacaacgccgatcgaaatccatttcgaaggcccgccggacgaatctggcgggcctacccagctgggcatctttatcgggatgtgcaattattccgaaaaatccaagtgggtaatggatgcggaacgcggctggatacagctgcaagcggccgccctgatggatggcgacatactgccgggtgcagacattgccggggaggttgtcatcaacaaagggatccggcgtcgaatacaaggcagcagccgcgggcggaacccggatggcaccgtgaattttaccaagctggagctgatgtgatgggtatcaaggtgacgttagaccctcgggcgctcggccgattgtgggaggctgcaaaaaaagcggccgtcatgacggcggaggcgctgcacggggacttggtgtcgtcgcagaccatgccgtacaacgtcggcaccatgcaaaacgacaacacgttcacggacatgcaggacgacggcgacgcatttaccgcgtccatcataaccgattccccgcaggcccgccgcctgtatttccatccagaatataacttccaaaaaaccaacaacccgaacgctggcggcgaatggctggagccgtacatcggcggcgaaaagcaggatttcgcagaagaaaagtttgccgggtttatgaaggaggagatcggaaagtgacgctgaccaatgtcatgaactggctgaaaagccagacggatgtaggagacgggatcgccgtgggccttgttgtcgagagcgacgaccgccggatcggcgtctacgacgggaaatcatccggcggcaatcagcggatatgcatcggcgggaagaaaaacaccaagtaccaggaaaaaaacatcgtcatcctggtgcattggacgaagaacccagtcgaagcggaggagaaagcaaatgaggtttaccgcctgttttacggcctgtcaggcgtggacatggacggggtaaaggttatatctgccaaccccggaaatcaaccggaatgggccgggagaagcacgagaggcatatgtgagtatgccatccgtgtgaaacttacgtatgaaaggaatgaccaaaatgccaaatagcggagtatttccggtatacgacaatgtttttaaaatcggtaccaaagggcgggcgtctgcgtcgccgggagacctggtgcagatcgccgaaatggaaagcttttcggtgtccatcgatggcggcgtggaggagtggaagcccatggaagggcgcggatggactaaccgcatgacaaccgccaaatccctgaccatatctctggccgggaaattgtgcccgtccgaccccggtaacgcctatatcgcaggcttggcatggaaatccggcaccgactgcgacagcaaattcgaatgggctttccccaacggcgacaagctggcgtttgattgcgtcgtgaacgtgacggccatcggcggcggcgacagcaccgggatcgcggcgcttgaatttgatatcatgtcgcacggaaccccgacgtacacccctgcatccgagggataaaagcaaagccgccggcggaacaacacgccggcggctaaatgtgaaaggactggtatacatggcaaaaatgtacacccttgacggggcgcttttgaccggcgcgcccgaggtgcggattggcgataaggtgttccatgtggataaccgggtcagcacggtcaaaaagctggacaaggttggacgcgaagataccgacgccatcatcaagctggcgtacggcgacaaggaagggaaagaaatcatcgatatggatatgcctttcccggcctacctggaactggtcaagctgaccatcgccgccatgaccggcgaggacgcggaggaaatcgacagccgatttcaaaaagcaacggccgccgagtgaatcgtggtatgacctggaatatgaccggacgttgatagagcagagcatcgccaagcagtacgggattatcccgtcggagcaggaagacctatcgtggccagactggtgcaagctggtgggcggtctgatggaggataccccgctggggcgagtggtatccatcagggcagaaactgaccgggataccatccggcggtttacgccagaccaacgccggatccgcgccgagtgggacgcgttccggcttgaaaaaatggcgggaagtaagagcgggcagctgggcatccagatgatgctggcagccatgtgtggggagaaggtgagcgggatatgaccatcggcgagatacaacttgatttggtaatcaataacaccataggcaagcaggtgcaggacgcggcggacaaggccaaaaagccggcggaggccgctttctccgccgtcggcgaggtcatatcgtccgccgtatccaagcctatggaggccgcacaagcgtccatcaaaaagtccatggacggcatcgacaagcgcgtagaggaaaccaaaaagaaattcaagggcatcgacaacatgtcagatgccgagctgcacggcctgaacccggagttccggaagtcgtccaaggaaatcggcgacaccaccatggcttggaaaaagtcgccggcacagcaagccacgccagaaaagccagcgccaaaaatcggggaaatcttttctgtggcgtccgacgccgtagggctgttgaatcaaaagctggatattacatacgcgcagttgggcgaacaggaagccaaactgaaacagctggcccagcagtacgcggaggtgacggcggaaaaaggagacgggagcggggctgcaaaagctatcgattctcaaatcaccgccgttcaagcaaagcttgtttccttgcagcagaccgccataggaacacaagcgaagctggacaaagctctggacagcagcgcggcggccaaaaaaacggcggacgccgtggacgctgcgaagaacaaggtttctgaagcggccaatcagcaaaaggcggccttggaaaagcctgccgccgccgcggagagggcgcacgcgaaaatcggatcttcagccagcaaggcggcgaagatggtaaaaagcgcgttcaaagcggcaacttccggcatcggcagcgcatttaaaaaagccggatctgccgtcgggaaacaactgggcggcatccagaagaaggcgcacggcctgtcgaaaagcgtgaaatccgcctttaaatctgcgtttttgatggccgggctatatgcagcattccgtggcatcaagtcgctgatcggcggcgccgtagggcagaatgaggagtttgcaaagtctctaaacctgataaaggccaatctgctgacggcgtttacccctattatgcaggtaatccagccagcattaaatacactggctggtggatttgcagctatatctaaacagattgccaccgctaccgccggaatgtttggtaaaacatacgcccaggccacggcagccaccaaaaagatgcagggcgtgaccgatgaagcgaagaaagcatccggaaccttggcaggcatcgacgagttgaacacgctggacagcggcgcgtccgaccaagacaatggcaccgacctgggagcgctggatactgcgaagtatgacgatgcagccgggtttggggccaaagtgacagatatgctgtccaaactggccgccggtataggcccggcaatcgctgggatcctgggaaaaatatcgggggccgccccgcagtttgccgtcgccgccgctacggtggtgaagtctctgctatccgggtttaacagcaatttttccaaaatttcggaatccggaatcagcatcctgaaatccctgcttgccgggctggaaagcgtactcccggagctggggccgtttgtgaccaacgtcatcgatttgatgctgcaagcgttccttacatatgccccgtcgctgttttcaatgggtgtgacgctactgggtgatgtgattcgcgggctggccgaccgcatgccggaactgatcccaatggccaaagaggccatccgcaccatcatggacgccctaacaaaaaacctgccccttatcctacagtccggcatcgacattctgttggccttgatcgaaggtatatccgatatgttgccggaattgattccggcggctatcgactgcattttaacgctggtgcaagggctgttggacaacctgccccagattattcaggcggccatagacttgatcgtggcgctggcttttggcctgatcgacgccttgcccatcctgatggaaaaggcgccggatattatccaagcactggttgacgggttgctcgacgcgatccccatgctcatcgatgcggccgtggagctgctgatgaaactggtcgattatctaatcgacaacctcgacctaatcctaaccactggcccaaagattatgatgaaactggcggatagcctgattggagcgatcccaaaactgtttgatgccgccatgaaaatacctaaagccatagccaagaaaatcatagaaacggactggctggaggtaggcaaagacatcataagaggcatcggggacgggctgatgaacggcgtgaaaagcatcggcgacaccataaaaaaagttgccggcgggatagtggacggatttaaaaatttcttcggcatccactcgccgtcaaggttgttccgagatgaaatcggtgaaaacctggcccttggcatcggcgaaggctttaccgaagaaatgggaaccgtggaacggatgatgggccgcgccatgccagatttgacggcggccgttcaagcgccgacattggggatcacaagcggcaccagagcaggatacgccacgacgcccgcggtcgtgtcacagccacaggctgccggaacaaacgatacccgcgcggcccaggtgctggagcttctgacgcggatcctggaagccatcgaaggcatagacccgcagctgattttggaaggaaagctggtaggacgtctgcttaacccatatatcaaggaagatgaccgccgcagagggaattccgtcgtgagggtggtgtaaatggtcagtaagaacatgatggcagtaaacggcgtgtgggtgccagacccggacggactggaggttacatattctgtgttggataagtacgcaaagcgcaacatgtccgcccagctaagccggaagatcgcaggaaaaaaactgaaatatgtcttgaattgggcctacatgcccgagcgggcggagtttatcgccctgtggaacctgttggccgccctgccggaatacgccatgtttaccctgccgcacccagatggcactatgcacacgttccaggggtatcttggcggcgacactaccgtgaccatgatgtcctactgggacatggggcagggatgtgaaagccggtggaaaaacctaaaagcaaccgtgattgaaaggtgataggcatgaccggtgtgcgtatatcgttctcggtggtggatgccaccgcaaaaaaggaagcggcctataattcagcgtcggcccagccgtgggtggattataacacactgaaggacggcctgggattgccgggaaacgacgatcccagtttcccactgcggcgctgggccaccggggagccaaacctgtttaagctgtcggattatcgcctatttccctccgacggcgctcccggatactggtcaggcgttatgtccggggcggacgggactttctcggccgccccggtgcttacggccacgatggaaaatgcccatagcagtatcggggtgacagtctgctttgaccagactgcccacttgtctgattttaaagtggactggataggcgcggaaggcgcggttatatcgaccgtaacggtgtccgataacgaccagcaagccgcgtttgtggacaatcatgtggacggctattacggcctgcggatcaccgccatcaaaacagatgcgccataccgctatgtaaaaatccaggaaatcgactacgggcaaaaccttgtgtacgacgataattccctggtggacgccaaaatcgtggacgaagtggacttgtccggcgcatccgtcccggccggggagctgaattttgaagtattggatccagatgatcggctgaacccgctgaacccggaaggaatttatgcgtacatggccgaaggagtccccgtccacgtggattgcataacggaatccgaaaccttcccggccggcatatattatatgaccgcctgggaggggtctgggctgggcaccgccaaaatgcaggcggtaaacatcgtgggaacacagacggaaaagacgtatgaatccaagttttacagcgcggtgtccccgtgggatgccttgaaggatattgccgccgttttaggcgtcagttccagcgtgacagggctgccggtatcgacactgacggggtacatccctgccgtacccgtgcaggacgctatcgcccacataagcgtagcgtccggcgggtttgccagggtgacgcgctggggtgacctggagattgtgcaggcatcgggagaccccctagtgattgccgaggaggacgtgcttggagatccggtcgtaacacagctgaaacagccggacagcttcgaagtggaggtaagcgcgtataccatcagcagcactggctatatgacaggcataaattttgacgccttgcttggctacccagtggacgcggagtttacgcaatccttggcgtttttggattccgccgggcagccggtgatgattgccgacgcggcgccggtatctacccaaaacgtgattgattatcgggtgtgtgcggatcgcgtggatataacccgcacgtataaggcggggtctgtaagttaccgggacaagcaagtgacagtaggggcgccgcaggtggtcacggtgcggggtgctggggcgcaaaccgtcagcatcaagtctatcccgtttattacgcagtccaactatcaggcggtattatctgccatgcaagcttattacggtctgcgccgcaaaattacattgacaaccccattggtctatgacctgacatgcggcgcccgcgtgtccgtaccgaccgcatacgggcgggtggttgggattgtcaccaggatggacatagacctatccggtggccttttggcggatgtggaggtgctggcctgatggacattaaaaccgactggacgccggacgattattacaatatccatgatgatctgaccaggacggaaggaaatatccacgaaatcgccgctgtcctttccgcggccggacgcccggcgtctttggacgaaaagctgaattggactatgcaggactttccgacggatgaggaaatgaaccggatcgtcggaaatataaacgcattgcgaacagccgcgaatgccccggagctaccggagccgcagctgttttacagcgaggaatacgtgaccgccgatagaatcaacgacctggaatcgtgcatacagcgggcatattggacatcggtgcacacgccgcctgtccaggaaagcggcgggaagctgctggccgattctgcggcggctgtgatcctttgcgtggataccggatttcaggcggcgtatccaagtgcctacacaggccagcaaatagaggcatttatcgcccagatgaaggagtggaacaatggacagttataacctgacgcataccggcgcagaactggacagcgccgtagggcgggcgctggaaggatttgcggcggcagatgccgccacggaagccgccaaggccgccgcaaaattggcagaggacacagccgccgaggtgcaagaaaaattggacaacggcgagtttatagggccgatcggcaaaagcggggtgtacgtcggaagcggcgacatgccggaggggtacaccgtccaggtggatcccaccggggatatgctgtgctataccgccggggagagcgacagccggtatctgcgggccaccgagattcgccgccccttcaccggcggcggaatcaccctgaccgacgcggacgacgcggccttcggcggcgtgaccgtgctgggcgcgaccaccgaggcaggcacgggggataaggggcccgataacccgtataccctcgcgggtgtacagccgacaaaggtgacggtgtgcgggcggaatctgctgacatatccgtataccagcaaaaccaaaacggaagtgggtgttacctttaccgacctaggcaatggggcgattaactgctccgggacgtgcaccatcgcgcagggggtagtattcagctttcgcggtgccgccgagccgttcacctgttttccggggtttacctattcggtatccggctgcccggcggggggtggcgattcgtcggtagggacgtactgcatccgggttgtcgagataaaaaatggaacaattatctggaataatcgatacacggataccggtcatggaataacgttccaggtagcggaggaaaagcaatttgttatcaactttaccgtgtggggatttgctacggtcaacaatctgctggtcaggccgcagattgaaatcagccccgccgccaccccctacgccccctacaccggacagaccgtccccctccccgcgctggagcccttatacggcgacggaaccgtgtgcgacgagtacgacgcggccaccggcgtggaaaaccggcggtggggacgggtggagctggacggaacagaggcgtggataacgaggacaagcggcacgggagtatatgggtatgcgctgccggatgtttttgatgcgccggcagcggctggcgtttgcacccacttcaaatttatcaaaaacggggcatccgggacgcaaacggcggtttgtgttgcgtcggccagcacgagaaaagacctatccgtctttaccacaatagcaacgctggacgatttcaaggcctggctcgccgcccaagccactgccggcaccccgatgacggtggtgtatcagctggacgcccccgttgtgacccagcgcgggccgcagcggatccccacctatccaggctacaccaatctgatgctggatatttcggcggagggcgctgtacagtatcctatatccgccgctatgcagtgggacgccaaggcggacaaggcggcggtctacgaccgggataccgccgacagccggttcgctggcgtcccgtccggcacggcttcgggaccggtggccggcatggaggacgtgtccccgacgggggcgctgcgccgggcggcggtgctgggcgcgac

SEQ ID NO: 131 - DNA, 2567 bp, Unknown
  16S sequences of unknown bacteria
gcgcgcagacgtttgtgaagatgttcccgaacggaccaagctaccgcgtatgggcctgcgggttctgcctgctttcctttttgatcgccaacctcggtctcaacgccatcgtcgcctgctccatgccggtgctcatgttcctctatccgctggccatcgcgctgatcctgctcacgctgtgcggcaggctgttccaggacgatccgcatgtgctgcgctggacgatctccctgacggccatcgctgccgccctggacttcctgcgcgcgctgcctgctcccctgctgcagacgctgcatctggatcagctgaccgcaacgctcagcgacctgatcccgctggccgctcagggattcggctggatcccctttgccctggccggcttcctcatcggcatgctcacccgcgccatgcgccaggcacacacttcagcctgaaggatcattttgccatgcacagcctcccgcaatgtggtaaaatatccatcgttttgatcgaaaggaggatgctgcggcatgcgaaatctgctgtcttggataaaagcgcacccctatagcctgtgggtcacttattatattccttatctgatctgtttcatcctgctggaacagttctctgatccgaaattcatcatctacagcccgatcgatgacatgatcccattctgcgaatacttcatcatcttctatctgatgtggttcccgctcatgttcttgtccttgttgtatttcctgctcaaggataaggatgccttcatcgacctatgtttcctgatgttcacgggcatgagcatctcgctgctgatctatgtcatcgcgccgaacggtcttgacctgcgcgtggagatcgcttcagacaatctctttgcctggatggtgcgcatgatccagactgtggatgatcccaccaacgtctgcccgtccatccatgtcgccagcacgctggccatcatgatggtcgtcctgaagcatcgcgaattccgccatccgctgctggccaaaggcggggtctcgctgatctctgtgggcatcatcctgtccaccatgttcctgaagcagcattccatcatcgatgcggctgccggcatcgcgctgacgctgatcctctatgtcatcacctatcacacgggatggagaaagctgtttcagcgcacgccgctgcgctttctggtcagcgagcgtccatccgcagccaaaaagacaggctcatcctgatcggcctgtgtccatcagacacagcagaccgagatgaacctgtcttttttcatgcagggcacgtataaaaggggctgcgcctcctgatgcacagccccttgctgccagcagctgatcacacctggatcagcgcgggcagaacgctcaacattccatgttcgatcgcttatcggtgaagatgcctgctctttctgatctgcggaaagatcaccatgcctgcgctcagcagcatcagccctgccatggcggccaggccgctgcgcacgccggtatcgccctgtccgccagcctgcgtgctggctttttcgctcagcgcgctgactgccgcatccagcatcttcagcgcgtcatcgacatcttgctgcgcagcttcttcatccgcgatgatctgctgcgcctggaacaatgccgtgcgaagaccgctgacgctcgcgtcggtatacttgctcagatccatcgcgttcacttcggcgatcagtgcctccagggcgctggtgtctgccttcgttctcgcgctcagtctcgcttcacgcaatgtcttcgtcgcttcatcgatctctgcctggctcgtcgcattggtcagtgccgccttcgctgcgtctaccttctcctgcagtccttccaccgtcgatgccacatagtcatcgatgttggccaggatctgttctgccagttcgatctcatgctcgagcgcgctcgtatctaacgtgatctgctcaagcccggcgatcgcgctggccagatcggtgatcgctgtcgtcacttcgctcgtcgtcgcatcatcgttggccgctacggtcttcgccgccgtgatcgctgcctgcagcgcacggtagctcatctcggtatagccgtctgcttcgattgtttccgctgtctcgatcagcgcattcagttctgccttggagacgatctcccacagctcctgtgccttttcggtcaatgtccggatcgctgtctggatctcctcatccgtggcatccgcatccaggtatacctggtatgcttctgcgactgccgtcttcatctcctgcaccttgcccggacgcacattgtccacattggtcaggatatgctcgttgatgtaatcgatcgtcgccttcaggttctctctgagcttatcgcttgcgccttcttccggcagttcgctgactgcctggctcagatcgagcatcgcgctgacaactgcagtggaagatgcgttggccggatcatccagcagtgcctgtgcggcagtgatcgctacctgcacatccgcaaagtcttcttcgctgtaatcatccttcagggcagctgcgttgtccactgctgtctgcagggcatccatcgctgcctggctcgctctgttctgca

SEQ ID NO: 132 - DNA, 17814 bp, Unknown
  16S sequences of unknown bacteria
aagcacaaaacatgcaatagtcttgaatgaaattttgactttgtcaatactctgatccatgctttgcatggagcgcactgtgcggtagccgaaaatggggttgatatcccggggcgcgtgccgcatgaaatatttgccaaagccaatcaaaacggcgggcaccagcgcgtttaccatcgccataaaccaccagaaatccattggggccgccttctttcgctcattgcgcagccacagccgcttcttccgcctcgctggcggaagcgccgtgcaccttggcctcgcgctcgcgcgccacggcgagcatcagcttgatgcggttttcctggttcacgcgcgaagcgcctgggtcgtaatcgatgggcacgatgttcgcctccggatgcaggcgcgaaagcgtgcggatcatgcccttgcccacgatgtggttgggcaggcagccaaacggctgggcgcagatgatgttcgagcagccggaatcgatcagttccagcatttccgcggtgagcagccagccctcgcccatcttgcagccgcggccgatcacgccctccaccaggcggcacagcgtcttgaacggggcgggcgcggcgaagcggccgctctcgatgagcacgcggcgcatctttttttcgatgcgctccacataccagcccgccaccttgctggccaccagcaccgcgccgcccttgccatacaggcgcgcgtcctccaggtggttttcgatcatcaggccgatgaagcccatcagccccggcaccaccacttcgcaaccctgggaaaccaggaaatcctccaggtggttgttggccaaggaggaatatttcacgtagatttcgcccacgatgccgactttgagcctgggttcatccgtcaccggaatggcggcgaaatcccgcaccatggcgcgcaggtttttctgaaagcgcgtggcgaagcgcggcgtgcggcattcttcggcgatgcggcgcgtccacgtttccagcatgcgctgggaatcgcccgcgtggatttcgtgcgagcgcacctggttgttcagcagcatgagcatatcgccatagaaaatggcgtaaaccgcctgcgccagcatgggcacggtgatggaaaagccggaatttttttccagcccgctcacgttgagcgagatcaccgggatgtgccccaggttcgcgcgctccagcgccttgcgcagcaggtggatatagttggaagcgcggcagccgccgcccgtctgcgtgatcatcagggcggtgtggtcgagatcgtatttgccgctcttgagcgcgtcgatcatctggccgatgcacaaaagcgccggatagcacatatcgttgtgcacatagctcaggcccgcgtccaccacggcgcggccttcgtttttcagcagctcgatcttatagccgtgctgcaccagcacgttggcgatcagttcaaagtgcacgggcagcatattgggaatgaggatggtgtgcgttttgcgcatttcctctgtgaattcaattcggttttccatggcgcgccacctcctttcccacggccgcgaacaggctgcgcagccggatccttaccgcgcccaggttggcgatttcatcgattttcacctgcgtatagatgcgcccggcgcgctccagaatggcgcgtacctcgtcggtggtcacggcgtccaccccgcagccgaaggaaaccagctgcaccaggttcaggcccgcgtcgcccgattcggccacgtatttggccgcggaatacagccgggcgtgatacgtccactggttgagcacgtttgtggcgaatttgggcacttccgcgcacagcgcgtcctcggtgatcaccgccgcgcccagttcgccgatcagccggtcgatttcgtggcagatttccgcgtccacatggtagggccgccccaccagcacgatcaccggcacgcccgccgcgcgcgatttgcgcaggatttcctgcccgcgctcgcgcacgcgcgccatataggaatggtattcggcataggcggcccggcaggcctcgcgcatttcggcaaagggaatgggcccgaattcgcgctccagcacggcgtgcatgcggcgggggaagtgccgctcgtcgtgcggggccacgtaatcgttgatcagccgcacgtccccgcggatgttgttcttgatcacctcggcgtaataggccaccacggggcaattgtaatggttatcgcccttgccctcttccatgttataggtcatgcagggatagaagatggcgtccacacccatatcccgcaggatttccacgtgcccgtgcatcagcttggcgggatagcacaccgtgtccgaagggatggtcttttgcccacgcgcgcaggtttcgcgcgtgctctctccggaagtgacgacttcgaagcccagcttggtgaacagcgtgtgccaaaacggcagcagctcatagaagttcagacccatgggcagcccgacgcgcacgccgcgcttgcccggcacgggccggtaggcggcgagcatctgccgcttttcggcgtagagatcctccggcgcgtcttccggcttgccgcccagcgggcgggaacagcggttgccgctgatgtaccggcgggcgccgccaaatgagttgatggaaagcgtgcagtgattcgcgcagccattgcaagtggaagtgcgcaccgtgtaggcgaacgcagccaattcttccggcgaaagcagcgtgctctccggcaggttcatttcctgcacccattttgccgcgccataggcgcccatcaggcccgcgatggccgggcggatcacgtcctgcccgatttccagttcaaaggcgcgcagcaccgcgtcgtttaggaacgtgccgccctgcaccacgatttttttgcccaacgcgctggcgttcgccgtgcggatgaccttgtacagcgcattcttcaccacgctgatggacaggcccgcagaaatgttttccagcgaagccccgtccttttgcgcctgtttcaccgaggaattcataaagaccgtgcagcgcgaaccgagatccaccggccgatcggccaggatgcccttcaccgcgaattcctccacgctcatatcccacgcagaagcaaaggcctgcaaaaacgaaccgcagcccgaagaacaggcttcgtttaagaaaatattgtcaatagcgccgccgcggatcttgaaacatttgatgtcctgcccgccgatatcgatgataaaatccacatccggctcaaaagcgcgcgcggccgtgaagtgcgccatggtttccacaatgcccgcatccatgcggaaggcgtttttcaccagctcttctccatagccagtggccgccgcacccgccacgcgcgcgcgcggatacgccgcgtaaaacgcgctgaggaaggccttcacgtgctccacgggcgagccttcgttggagcggtagtcctgcagcaggatgcagcctgcctcgtccagcgccacggccttgatggtggtggaacccgcgtccacgccgatgtacgcgcgcccggcgtagtccgccccttcgggcgaggccatattcgtcttggcgtgccgggcggcgaaggcgcggtattcttcttcgctcttaaaaagcggtgcgcactgcgcgtagggctggcccatgtcctccttcaggcgcgcggcggattcggcaatgtccatctcttcagacgcgcccagcgccgtgccataggccacgaaatacagcgaattttctgggcacacgcccttcgaacccaatgcccgatcgaacaaacggcgcagctggggcaaaaaggtgagcggcccgcccaaataagcgatgttgccggcgatgtcgcgcccctgcgccagcccggcgatggtctggttcactacagccatgaggatgctggccgccacgtcctcgcggcgcgcgccctggttgatgaggggctgtacatcgctcttggcaaacacgccgcagcgcgaggcaatgggataaatccgctcatgcccagcggccagcgcgtcgatctcttccacgggcacgcccagcagcgcggccatttggtcgataaacgcgcccgtgccgcccgcacaggtgccgttcatgcgcacttccagcccgtcgcccccgttttcgccgtgcaaaaacaggatcttcgcatcctcgccgcccaattcaatcgccacgtcggtaccgggcaacaagtgggtgagcgcaaggcgcgtggcgtatacttcctgcacaaaggggatgcccatgcgctccgccaggcccatgcctgccgagccagataacgcgatgcgcgcccggcgctgccccgtcgcttccatggcggattccagcatggtttgcatccgttcgcggatgcgcgcgcgatgccgctgataatccgaatatacaatgttccccttctcgtccagcgcgacgcatttaagcgtcgtcgagccaacgtccaagccaatgcgcatcgtttcaccccttttgtaatcgcgcaaaaaggcaaccagcgcgaaaatcgcctgccgggcgagcgtctggctcgcgcgcgattcccgcagtggttgcccgtcccccgtggaatatgctctttcggcaagtgtatcgtcgcgcagtgtaccgcgatttctccgcctagattataaacgatagatatgactttgtaactcattttttgtaaaatcatgcggccatacgcgaagaaaacattttaataggaaaaaaggcatgcgaaaacccgcttgcggggccaaatgataccgctacggcggaataaccattggctttattgaaacagccagcgcccaaacacgcgacgcaatccatcggcaaaatcctgccgcccgacagcctgcgccgcgaccacggcaatgcgggcgattttgcgtccatccagcaccacatccacgctgcccaccgcgtcgcccatatccagcggcgcttgcacgctttgcggcaaattgggcaagagttccaccgattgctccgtgccttttttcatcagcaacgtgaggtcgccctgcagcatcagcgcgatagaagggaggttgccgccctccacgggcatttcgcccttgattttcgcgccgctcttggcgacgggatacaaccggtagttggcaaagccgtaatcgaacatggatgcggcggtatcaaaccggtcgctgctgctctgcgcgccgagcaccacggcaatcaggcgcatgccgccgcgctcagccgtagcggaaatgcaataacccgcttcgttggtggagccggttttgccgccgtcgcaaccatcgtacaggcggatgagccggttggtgttggtgagctgcgtttcgcgtccgctctcatgaatcacggaatccagccagatggtggaatactcgaaatacagcggatgcttcagcatttccaccgtcatgcgggccacgtcgcgcgcggtggtgtaatgcccctcggcgggcaggcccgtggaattcacaaagtgcgtgtcggccatgcccaactcttgcgcgcgctcgttcatacgatccacaaacaactggtgcgagccatacaggtattcgccaatggcgaccgtcgcgtcgtttgcgctgcccacgatcatgctcttgagcaaggtctcaaaaggcagcgtttcgcccgcgtcgagcagcacctgcgagccgcccatgcccgccgcggtttgggaaacgggaacggggtcttccagcgtagcccgccccgcttccaacgcctccaatgccagcaaaatggccatgatcttggtcacgctcgccacggggcggcgctcgtccgcgttttgctcaaagagaatttgcccgctttctggttccacgagcaccgcgctttcgcacaatagcgggattggcggcgcggtttccagcgcggcgtccatcagttcgccgcgcgctgcgcagggcgccagcagcgccagcgccaacaaaaggcatgcgaatttcctcatgctatcgacctcccaccttattcttacacgcagaggcggacgggtatgctggcacggcgcaaatgccacccgaataacatggctttgcccgaaacttcgttgacttatgccggttcgcggtgttatgatacctggcagattgccaaagatgccgcgcgccaaacttcgcgcgcggagcgtatgggggaaactggatatggaagaaacgcgtcaaagccgtgtagaaaacgatttgggccgggacgacattcgccaattggtgcgcagaatcgccgtacccagtatgcttgcgcagtttgtgagcgtgctatacagcattgtggaccgcatgtatatcgggcacatcccggaagtgggcgagttggcgctggccggcgtgggcgtgtgcgggccagtggtgacgatgatcggttccgtggcctcgctggtgggcatgggtggcgcgccgctgatgagcatcaaaatgggcgaaggcgacacggcaggcgcgcggaaaatccttgccaactgctttgtgctgatctgcgtgttcgcgctcgtgctgatggccgtggtgattccgctgcgccagcccatgctgctattctttggcgcgagcgccagtacgttgccctacgcggatacgtattttttgtattatgtcacgggcacggtgtttgccctattggccacgggcatgaactcctttgtgaccgcgcagggattcgcgcgcaaggcgatggcttccgtgctgctgggcgcggtgatgaacattgtgctcgatccagtgttcatctttgcgctggatatgggcgtggcgggcgcggccattgctacggtgatttcgcaggcggccagttgcgcatacgcactgtgctttttgctgggcaaacgcgcgcaaatccgcatcgagcgcccgcatctggattttgcggtgattcgccgcgtgctgctgctaggattcacgccgttttccatcatcgcagtggacaacgccatgatcattgccatgaacgccgtgctccagcgctatggcggcgcgagcgaaggcgatttgatggtgaccgtggccaccatcgtacaaagctttatgctggtggtcaccatgcctttgggcggcatttccggcggcacgcagcccattctaagttttaactatggcgcgcgacaggtcgaccgagtggtgcgcgcccagcggcacattttcttgtggtgcctgggatttacggcgctcatgtttgtgctggcgcgcctggcagggccgctgtttgtacagttgttcaccaccgatccgttggtggcggaaaagtccgtctgggccatccgcgtgtgtacgctggcgctgattcccctgggcttgcaatatgaaattgtggatggattcacagccattggacaggtgcgctatgcctggccgctgtccttctggcgcaaggcagtgtatttcgccgcgctgttcatcctgcccgcggtctggggcgtggaggccacattctacgccgaagccatatcggatgtgattggcccgctcacttccatcgccgtgcatgcgctggtgatgaaaaagctgatggcgcgccgcgcgatgaccggcgtgtaacggcataaaaaacccccgcgcaccaggaactcgcgttccggtggcgggggtatttttgcgttgtgcttagcccttggtgtaagggagcagagcgaccgtgcgggcacgcttgatggcgacacccaactggcgctggtgcttggcgcaagcgccggtcatgcggcggggcaggatcttgccacgctcgctggtgaaagccgaaagacggcccgtatctttataatcgatgtgcgcgaccttatccacgcagaaacggcaaaccttcctgcggggcttgcggccacggggacggcggttgcgatcgccacgatcctcagacatttgctttccctccttgacgaatggttgtgaacaagcgaatcggcaggcaatgccgggcgcaaggctcctgttctagaacggcagctcgtcgtcttccacttcggtgaagccgccattggcctgcggggcgaaacccatgggctccggcggaggcggcaccgcctcgttttggcgcgcctggttattatcctgcacggaagaaaggaactcaacgtcgtccgctacaatttcggtcacatatcgcttagaaccgtcctgcgcatcataggaacgggtctggatgctaccggttacgccgaccttgcggcccttggagagataccgcgcgcatgtttcccccaactgccgccaggcgacgatgttgaggaaatccgcctcgcgaaccccctgctggtttacgaatttgcggttgatcgcaatcgtaaacgtacacacagaaacgccgctgggcagtgtgcgcaactccggatcgcgcgtaagattcccgatcagaaatgccttattcatccttatttacccgccttttccgattacgcctcgctcggggcggcttcttcggcttccaccgcagcttcagcggcgggcgcttcggcggcaggagcctcttccggcgcttccgcaaccggagcgggggcttccgcagcttccgggctcttttccaccgcggcttcgcgcggacggaacggctcgcgcttgggcggcagcgcgccctcaaagcgaatcaccagatagcgaagcaccgaatccacgttcttgaagttacgctccagctcgcgcggaagctctgcgggcgcggtgatgtacatcaggatataatatccctctgttttgtagttgatggcgtatgccagccggcgccggccccactcatccacccggtccaccatgccgccgttggcggtcacaatgccctgaaagcgctccatcagattcgcacgcgcctgatcgtcaagcgcggggtcaaggatatacatgacttcgtattgattcacgcattttcacctccttatggacttacggccttggacgcgtgcccaaggcaaggatgcgctaactataaagtatactcgccgcacgtgaatattgcaagctatgccaaaaatttaacacgcggctgcttatattggcgcaatgcggcgcggcggcataggataaacaagaatttgacttgaccgctggcggctatgaacgtataatagaagccaaatatactttaagccgctaacgcaatggaaggatgacggagcatgggcatcaaagtttgcaaattcgggggatcttcgctggcagacgcagcgcattttcagcgcgtgcgcgatattctgttggccgacccgcagcgaaggttcgtggttgcgagcgcgcccggcaagcgcgataaggcggatgaaaaggtaacggaccttttgtaccagtgctatcgcgccgtggagcgcaagcagcctgcggaagaaattttcgcgcgtgtggccgggcggtatatggatatcgccaacgcgcttgggctggaaaacggcatgcaaaaggtgctggaagatacgtttgcggagatcgtgcgccaaaaatcgccggatttcacggccagccgcggcgaatatctcaacgcgtttttgctggcgcgctatctgggctgggattttatcgacgcaaaggactatgtgaagttcgaccggcaaggcgtttttgcctccgaatggacgaacgagatcctggcggcggcgctgcgcgagcacgagtgcgccgtgttgcccggcttttacggctccctgcccaatggcgaaatccacaccttctcgcgcggcggaagcgacatttccggcgccattgtggctcgcgcggcggaagcggaaatttacgaaaactggacggacgtttcaggctttttgatggccgatccgcgcattgtggaaaaccctcagcccatcgacgtgctcacctaccgggaactgcgcgagctgagttacatgggcgcgaccgttttgcatgaggacgcgattttccccgtgcaccgcgcgggcatccccaccgcgatcaagaacaccaacgcgccggaagaacccggtacgctgatcgtcgccgaaccggtggaagcctgcttccgccgtccgatcaccggcatcgcgggccacaaggatttcacgctgatctccatcgaaaaggccatgatgaacagcgagttggggtttggccggcgcgtattgcaggcgctggaggatttcggcgtttcgtttgagcacctgcccacggggatcgacaccatgtgcgtggtcattcccgatcgcgaactcacatccacgcgcgcgcaaatcgtcagccgcatccgcgaaacctgccagccggattccatcgaagtgagcaacggacttgcgctgatcgccacggtggggcacggtatggtcagaacgcgcggcaccgcggcgcggctgttcaacgcgctgtccgaagccaatgtgaacgtacgcatgatcgaccagggttccagcgaactgaacatcatcgtgggcgtggatgtggcggattttgaaaccgccgtgcgcgccatctatcacgcgtttgtgaaataaagcgccatgcgcgccgcgccgctcaaggccgcgcggcgctttactatcgccaagcccaaaagcgaggaacgaaataccatgcggctgatctttcactatattcggaaacacctgggcatttttctcctttccaccctctttttgaccatggaagccatggcggatctgttgcaaccgacctttatgtcctatatcgtagacgagggcgtgaagaatgcggatgtgcgtcagatcctgttttatggcgcgattatgctgggcatcgcgctggtgggtgcggtttccgccgtgatgcgcaaccgctttgccagccgcacgtcgcaaaccgtgggcaaggaactgcggcgcgatatgtatcacaatgtgcagcgactttccctggaaaatatcgaccggttgcaacccgcatccatcatcacgcgcatcaccaacgatgtgacccaggtgcaggaattcgtcaacagcattatgcgcatcatggccaaagcgcccatcacctgcgtgggcgcggtcgtgctcatcctgctgcaaacgccccggcaggcgccagttatcgccgccattgtggtggtggtgggcctattgatttggggcaatatgaagatcggctatccgcgcttcggcgccgtgcaggaacgcctggaccggctcaatggcgtagcccgggaatttttgtcctcggtgcgcgtggtcaaggccttccgcgcggaaagcgcggaaaaagaaaaatttgaaggcgcgtcttttgatctggctgccgccaacgcggccgctctgcgcacgatggcgatcttttcgccgctgatcaatttgaccgtaaactttggcattgtgctgctcttgtggctatcccgcaaccagcgcagcgcggagatcggccggttgatggcctctgtgaattacatgacgcaagtgctcttctccgtgacgatgatttccaacgcgctgaacgcggccgtgcgcgccgcagcttcttcccggcgcattgaggaggtgctgcaggaaacgcccgcccagcgcatgcccgccgcgccgcaaaagccagaaattcgcggcgaaatccgctttgaacacgtgtcgtttgcctatgcgggcgcggggcgagaatcgctgcgggatatcgactttcacatccgtcctggcgaaacggtgggcattatcgggccgacgggttccggaaaaaccacgctcgtcaacctggttccccggttttatgacgcgacgcagggcagggtgtggctggatggctgcgacgtgacgcaaatcgatacaaaatggctgcgtgacgccgtggcggtggtgccgcaaaaagcgctgctcttcagcggcaaaatttgcgaaaatttgcgttggggccgcgcggacgccagcgacgaagagcttcgcgcggcggcaaaggccgcctgcgcggaagaatttattgaagcgagcgcgcagggctatgacacgctgctggaccagggcggcgtgaacctttccggcgggcaaaagcagcggctttccattgcccgcgcgctcgtacggcggccgcgcattttgattttggacgattgcaccagcgcgctggacgcgcaaacggaagccgccgtgctccgcggcctgaagagcgcagcggacggcacgacggtgctgctcatcagccagcgcgtttccactgtgatgcgcgccgaccgcatcctatgtctggacaacggcgcgctgcagggctttggcacgcacgcggaattgctggcatcttgcgaaacttaccgggcgatctaccgctcgcagattggaggcgcggaaaatggctgaaaagaaaggaatggcgccgcccgccaatctcacgggaatttcccggccaggacgcggcggcgtggtggtaaaacccaaaaacatgaagggtacactgacgcgcctttggcaacttacgcgtgggcagcgcggcggactcgggtggattttgctcctgtccgcactggcttcgggcgcttccattctttcgccctatgcgacaggagcggctgtgaccgcgatcagccagggcgacgcggtcacatggattttgtgctgcctgacagggctgtatatgtgcgactggttggtgaaatttttgcaggcgttttttatggcgtccattgggcagcgcatcattcaccacattcgcaaaacgctctttgcccacatccgcacgctgccgctcgcgttttttgatcggcatcagcatggcgaattgatgagccgcctgaccaacgatgtggacaacatcagcacgacgatttccaattcgctcacgcttttgctcacctatggtttcaccatcgcgggaattttctgcgccatggtcgcgctcagcccgcttttaacgctggtttcgctgtgcggcgtgctgctgatctttctcttaaccaaaaccgtcaccaagcgcacgcgcaaactctttgcgcagcaacaaaagagtctgggccaactgaatgggcaagtggaggaaagcatttcgggcttatccgtcgtgaaggccttttgccgcgaagaagaaatggagcgcgaattcgcggaaaagaacaacacgctgtgccgcgtatccattcgcgcgctgatttggtcgggttacctgatgcccttgatgaacgtgatcaacaacctgtgctatctggccattgcggtgctcagcggtattttgtttgtgaatggcgcgatttccaatatcggcctaattaccagcttcctgctctatgtgcgccagttcacacggccctttgtagagatcgccaatatctacaacaattttcaaaccgctgtggcaggcgcggagcgcgtgtttgaaatcctggatgaagcgcccgagcccaaagataaggaaaacgcgcttccgctagcgcatccgcgtggcgatatcgaactgcggcatgtgaaatttggctatacgccagaccggctcgtgctgcgggacatttccctcaaaattccggcgggaacgcaggtggccatcgtgggcgctacgggttcgggcaaaaccaccatcatccagttgcttacgcggttctacgacgttacggaagggagcatcctgctcgatgggcacgacctgcgggattaccgcttgcaggatttgcgcgcagcttttggcgcggtgctgcaggatacggcgctgttcgccatttccgtgcgcgacaacatctgctacgggcatcccgaggccacgatggagcagattcgccaggccgcgcaaatggccggagcggatagctttatcgagcgcctgcccgcggggtatgataccatcctttcgcagggtggacaagagctttcgcagggagaacgccagttgatcaccatcgcgcgggccatcctcgccaacgcgccgatcctgatcttggatgaagcgaccagctcggtagatactgtcacagagcaaaagatccgccgcgccatgctgaaaatctgcgaaaaccgcacgtctttcatcatcgcgcaccggctttcgaccattcgggattcgcagtggattcttttgatggaggacggcgcgattgccgaacagggcacgcacgaacaactcatggcgctcaacgggaaatatgctgccatgtaccgcacgcagacagggttggcatagcggcgctttggaatatagaaattttgagcccccggaagatgccgggggctcaaattatatgcgtcagactcgcgaatattattagtaatatttattaaaattttttcgcttcccgctcgcaaaatacgcgcatttgccttaggaacatagaaaatttttccctgtcgcttgacatagtacagaaaacatgctattatatctctaaagaaaaaattaaactgccaaattatattactaattattttcaggaggaatttatgcgttttttggtaatgaccgatatcgaaggcgttacaggggtaacgacctttgaacaagcggaaaacagtgagctgggccggcaaatgctgatgcacgatttgcgcgcggtgctggccgggatccgagatgctggtgcacaggcaattgtttatgatatgcacaccgatgggcgcaacgtggatctttcgcagctggatgtaccggtgattatgggcaagcccattcataggcagctatatcgcggtataggtggcagcggattggacgggctttatctggttgggctacacgccatgcaacatgtaccgggggctttgctggcacatagctatttaaaggaatacgatgcaatttacatcaatggacagctagtgggcgaaatcggcgtagaagcgcttttggcgggcgagcagggtatcccgttgcgttttgtttccggcgacgatatggggtgtgcagaagccaaggcattggtgccagaagtggtggtttgccccgtaaaacactcattgagcgctgcagcggcactgtgccaaccaccgcaagttacgggtcacctgctgcgcgaggcggcgtgcaaagctgccagcaccgcgataaatccccttatcggttccgctccatgggaaatccgcatcgatttttccgattgtgcatatctcgccgtgatgcgtaagctccatccagaaatttttgtgggcgagcgcagtgtatgcgtgcaggggaacacgttattaagcgcgtggtcgaaatatctagagtgcgaaaaggagatggtgctcgcgtgaaagtggttctaggagcaaaccatcaattcctgtatccacaggcaatgaccaatgcgcaggcgcacacgcaaaccttgcgcagcatggcgcaaattcgttcccttgcggcgctggattgctggctatggccggaacgccagcgttctagcgaggaaaagcgcattttgcgggacagcggcaagtggatcaactataacattggcgacaggcccatggacgagccatgctttcccgcttcgcccgatccaaaccggcgtatgcgcgcactggatctattgcggcgggaagtggagttcgccatggaagcgggagcgcggaagatcgtattgggcagcggcccggatgtaccggccggtcgagaggcggcaaaagaacgcttgagcgaggttttgctgcggctaggcgcggaaatcccgccgcaagtgacgctcacgctggaaccaaccgaccgcgaaatcgacaaacgctttctctttggccccgtagaggaaaccgcggcgtttgttcatcaattgcaagcagccggccttgccaatctgggggtactgctagacatggggcatgtgccactgatgggtgaaaccctggaatcggctgtgacccatgcgggcgacacactgcggcatatccatttgggcaattgcatcttaaaaaatccccgcaatccgctatatggcgataaacacgttgcctggggcgccgctgaatcggaatatggtgaagaagatgcggtgcggtttattcacttattgcaagcggccggctatttccagggagaggattgcaccgtctcttttgaaatgcggccaatagaaggcttaggaccagaagaaagccttgcgcggttcattgccgtttgggagaagtcgcggccggcagagctggcctcgcaacaataaaaatgggagggactttggttatgaaacggatttttgccctgattctggcactgaccatgatggtaacagcagcagcttttgccagcgctgaaaccacgatgcccatcgtggaagaaccgatcaccatgacgatgatgattggactggatacttcccgcggatacgacccggcggacaacgcggtattcaagtacctggaggaagtgaccaacatccattgggatttcatcgtggtagaccgttcttcctggaccgagcgcctcagcctgatgtgggccagcggcgatatgccggatatgatctataacggcgtttccggcaacgatctgctgctctacacgggcacactgattctagacctcaagccctatttggaggaatacgcccccaatttctggaacctgtatcagaacaacgcggatgtgcgcctggcggtagatttgcccacgggcaaaatcggcagcttcgtatggaccaacatggaaatcgaagctggcgcgggccagtgcccgaacgagattctttacatcaaccagcagtggctggatgcgttgggcctggaaatgccccagaccgtggatgagtactatgaaaccctgatggcattccgcgacaaggatcccaacggcaacggcgaacaggatgaaatccccctggcgccccgaaacgcttctaccgatctgagcaaattgcaacccttgatgggcttcatgagcgataccaacaacctgtatttggatggcgataccgtgcagtatgcgcccctcatggaagaatacaagcagtgggtggaattctgcgccaagctgtacgcggaaggtctgatcgatccggacatcttcgtgatggattcggcggaagtgcttgctaaaggcagcctgaacccgcaagtgtatggctctgtaatcgcttcggccgctttcaccgtggtgggcgcggacaatgctgacgcctatgtgcccacgccgatctacaccgcagccaacggcgaaacgatgtggtacaaccgggtgtatgccaactctggcgtaggcgtgatcaccacggcgtgcgagtatcccgaggaagccatccgctggtgcgatttgttctacagcgacgaatatgtgaagctggtgtggatgggtcaggaaggcgtggcctatgagtacaacgaggacggcacctgggattggatctacagcgaagagtatcccgacgctacggccgtgcgcgctgcactgaccattcaggcaggcggacagggcccgtccatgtgccccaccgactggttcaaactcaacgacgaaaccgaagcgccagtgaacgcgcaacgcgcgcagatcgcctcggactacgatggactgctccgcgtgccaatgcccacactgtattacgaagagtctgctgctcgagagatgagcacgatcgctacggatttgaacacctatgtcaatgagatggtcgccctgttcgttacgggcgaggccgatatcgaaagcggctgggccgatttcacagcaacggtggaagccatgggcgcctctcgcctggtggagattgcgcaagaggcgtatgacgccgtcgcataaaaaagtaacgaggtgggggtagggctttgccctaccaagcgtgtcaaaaaagtctttttgacacgctggtggacgggagagcaagcgccccacaattcgcaatggtcgtcctgctgcgcctggcggcttgcagtacttccttgctcattgggcttacttcgcgctgcttcgcccacagggcgcgcgcttcgtgcgcccccgccactgccaccctctccagtttccgctaaaatcctacggatttccgggcgcggaaactgcaaggaaacgatttttgctctggaaaatgggattttccgccgcaaaaatcgccccgtcc

SEQ ID NO: 133 - DNA, 32759 bp, Unknown
  16S sequences of unknown bacteria
caaacaaagtttttcaaaattgaaaggagaaacattatgatcacttaccacaaccacccccacatgaccgctgtacccacccgcctcctgctggatacgaacctctccgcagaagccaagctcaccggcgcgctcttgtacaccttcgaggacggcggtctgagtgcgcaggaacttgcagatgttctgaccctcccgcccgaaaaagtcgctccggtttttgctgaactcaccggcaacggctatctggaaattctggaagaaaacggtgccttcgggctgcacctgaaggggtgattctcatgccggaccgcacgcgccccatccgcaaggaaatctgcctgaacgagcaggaagtaaatctcatccagcacaaaatgcgccagttggggacgcacaacttcggcgcttacgcccgcaagttgctgatcgacggctacatcatcaaggtcgattacaccgagcagaagaagctggccgctgccgtcagccgtgccgcctcgaacatcaaccagatttgccgccgcatcaacagcaccgggcgctgctatgaagacgacgttgccgagctgaaagcgcggcaggccgagatctgggagctgctgaaagcgcggcaaaaggacgagctttgaccacaacgggattttccatgtgtgggttttccgtcaccggtttttcagacggtggacaagctgacgctccggagcgtaccgcaaccggatttcaggacgacggttttcgtgccgttcatcgggactgaaattcatcctctaactaataagaaataaatcaagatacaagagaatcaatctatcaatcaatcaacacaaaaatggatggattgatggatgggacaggaggtcagatgaaaactttttgcaagctcacgacgcagagcccggcggcgtcctatgtgccgcttccgaggttccttctccaagacgaagccctgcgggacatcagcaacgacgcgaaggtgctctatgcgctgctgggcagagccagcatttcccgccagaatggctacgtcgagccggacggcacaatccggctgtacttcaccttagagcaggcacaaaccaaactccaccgcagccgccagagcgccacgcggatcttccgcgagctggagtacagcggcttgattatccgaaaaaagcaggggctgggcaagcccgccctcatcacgctgaactacccatcagatgcaaagcttatcgcaaaggagggcgaagatgcacaaacttgaccccatcgagcggctgccggatggcacgctcttccgcctaacgccggggcagctccgcagcgtgcggggacttacaaagcgctgctgcaacttcttggatggcgactgcctgctgctggacggtgtctgcccgcagtttatctcacgcagcctgatctgccggtgggtccgccgcgccgtgctgccccagcagccaaagctggaacaggccatcctcagcccgaaaaaactccgccgttgcgaagtctgcggcacgggcatcctcgcccgctccggcaggacaaaatactgtcccgcctgcgccaaggaggttcaccgccagcagaaggcgaaatccgcccgcaaacggcggtccggtgtagacaattcaggggcgaaaagcccttgaattgcaagcattcccgcaccacccaagccgcatggcaatacgatttccctcgcagccgcgaaatcgaattctatttgtctacataagcaccggaacacacgcatagattgaagcagcaaacgctctggaaaggagggcagccatggaagtatttctgatcttcccgaaatcaaagcaggcgcagcaggagcttgggcaggagctggcgaagttccagtccgagcaggcgctgaaaaatgtccagaagctgccctgttccacggagcagaagctggaactggtagacgcagcggtgaagcatctgaaagcgcagcaataatacatagcaaacgagcagaccggcattcaacgccggtctgctcgtttttcatatgtttctcgctgaatttggccccataaggtttgtatagagctgcgcgatggcttcaagctcccgctgagcgcaaggtcagtcacgctgatagattgcctccaaccgttttctggattccaccagtgtgtaggcaggtgcgcgggaaagccgagcggtctctgctgcctccagctttgcgcgcagcttcaaggtttcctcacgctgttcggctttttcatgcgccagatcagagaccatgctgtagtcgttacacagtgcagtcgaagatttaataatcatgggtctgtatctcctgaattattcacggctttcaagaccctgcttgaaatacttctcccatgtggatttgaaaatctgcacgcttccctgttcccatcgcttgaacttttgcagcgggacgccaagctgcgctgcatatgccttctgcgtcaagccgagccgctgacgtatggctttgatttgctccccctgtccccgcagcagaaacaggttatagacatccagcaaatcctccagcggcacttcaaacagctccgccagcttctccatatgctccttcggataaaagtcccgccatgcctcttcgtaatggatgtaggtactgcggtcgatgctcgcatagtccgccgcgtcacgctgacgaagtcctttttgatagcgataccaccgcagcttgtccgcaatttccgtgatctcagatgcgtccgaaaaccgcagattgaacttctcggcatccaaaaacttatgtggaaggacgaccgggaacttgagaatttgaagcggcgcaacttttaacgtacctgcaacattcgcagccaatacatagctgcggactttcaggcggcagaacatagaccattttgccccaaaaggttcatggttttctacctcaactgccgattgttccgttgcgatagtatagtattgctgcttgtaatagtgcttagtgtcttgattttgggatacatgtggatccattcgccaatgtaacaatcggaagttgtcgaggtgacagaaaatgaaaaaatgcaaatattgtggcagagaaataagtaacagttttgagttttgttgtaataaatgtgaaaacgactatacaaagaacattgaacattgaaaaagctgaaggtaaaatcaaatattttattatcggaataattattggatttcttgttatgatttatggagttttatcaaacagtgacttcattattggagacggaattatagtaataggtatagttgctgttgtactaccatttgctacgtctgaaacagttgctcttttaggatatcagaagtcaagaattgtgggaagaatactcggtatattacttgtagtaatttctgcgttgtaaatagatatgacccacagaaagtaaagaaaagagggatagaaaagaatcaggcgttagaaagaatttcacggaggagatcaagagggctttctgttgctccagtgcaaatgatttttgagctttcggtttagatcttctacacttgcaaacttttcccagttgtaaaaatagcgctggtcgtttcgatgactccgctctaccttgccgttgtgccaaggcgttctgggcggaatcagcttgtgctgcacaccggcgttcttcaaagcgatgtcaaaggacagagttccgtatcgctgatgtacttgtatgtaaactcagttccgttatccgtctggattgtctgaatcttgaacggaaatattttttaaagcattttgaagaacttcacagagttttccggtgtatgctcctcaaacccgtaaataaatcgtatcctggtgcattcgtctatggctgtccattggtaaaagtgctttccgtcccgtcttgctgcgcctttcaggcagttatacggcacttctttaacatctacctgcactttttcccccgggacgagaatctcgggataccggcgatcactcttgcgggtgtttggcttttcctgcttgcctccgcacagtccgagccttttggcagcatagatcccgaaaccggcgtttgcgcaaattttgttgactattgagaacggaatctgtataatgaaagcaaaagtattctgagcaggaggacgaaatgcatggcgacgatcaaggatgttgctaggatagcaggcgtgtccgtgtcgaccgtctctcacgtggtcaacggaacccgatacgttagtcctgagaaagtccggaaggtcgaggacgctattcgccagctggacgagctcccgaattttatcgcgaaacggagcgcattgaagagcaaactgtccgaaagccgctatgtgctgatcttgctgtcgaaaaaacgcagcctgtttcagaatcaagtcaaggaaaagctggaagaaatcgtagagcagaagggttatatcgccatttcgctggcgtatgacctcgatgaagaccgactggcggccatccgcgcactggctggaacgctggatcttgcgggaatagtcgctttcccggaccgggaaggtgtgctttccggagcctttttcaaagggctccggtttccggtggttctgattgggaaccccgtggatcggtttgccgcagacaccctgctgcccgacacctttgagggcagctaccgcgcggtgcggcacctgattaaaaacgggcatgagcgaatcgcttacctgtgcgagtcggaagtgtgcggcacccaaaggtttgaaggctacaggaaagctctggaggattccggcattgcgttggaaaaagtgctgatccgcgcgggcttgaaaaccgaggcgttggccgccgaagctatggcgcagatcgtcgcggcagagcctgcacccaccgcggtcgtgattgccgactcgctgcctctgattcccgccatccggtatggaatcggccacaacatcgccgtacccggtgacctctctgtcgtcagcctgaacgatccggaatgggcctcgctgacgacgccggagctcacttgcgtggataaacaaccacggcagtttgcgctttccgccgcggacctgctgttccgtcggattgaccgcggcgaaattgcaaacctctcttcgcccgcgcatgcgtactgtacgaaaactctcccctcaatcctcaatgtgcgcaactccacctgcggaatcggccggggtcccttcggggaacgggcagcgggtgcgggcggccttgccttatccgaagtggaaaaggaaaagattcggcaaaagcagtatacggcggcgatctcattccactatacgggcaaggcgtggatgcgcctgcaggaaaagggtatcaaaaaagtcttcgacgagcttggaatttccatcatcgccgtcacagatgctcatttcaacgcggcgctgcaatgcaaacagttggaaagcatcaaatttctgaagccggatctcctaatctcgatccccgttgatactaggggcactgcggaagccttccgctcgattgcggacagcgacacccggttggtgctgattaccaatgtcccggagggactcaccccgaaggattacatctcctgtatctccgtaaatgagcgagcccacggggacagtatgggccgcgggttgggcgagtacatggtacggcacggcctgaaatatgcggggctgatttgccacggcgagcagaacttctttgccacaaagcaacgggacggcgcggcggaacaggttctgacagaggaatacccggaaatccgggtgtgcggaaaggtcaattttctgacagaggtggacgtctaccagaaaacactgaagctcatcgggatgtacccggagattcaggctctgtatgtttcttgggacggtcccgcgctggaggtgataaaggccctgacggagctggagcgcacggacatcgcgatcgtcacgggagatctggactatgccatcgccatgcagatggcacagggcggcatggtcaaaatgattagcgcgcagtgcccctatgagcagggggaagccatcgcaatggtggcggccaacggcctgctgggaaaagcggtcccctccttcatcggggtggagcccatcagcatcgaccgggagaacctgctgaaaaactggaaggcgattttcaaggaggatccgccggcggcgttgcgcaacgcgatcaaccgcagcgccggcgcactttaacggcggttcgccgcgttcaaaccgaccgacagaatatcaagcggataagcatctggaagcagggcttatccgctttttacatagcgcccgagcaagccgggttcccggaatttttcattgcccctatcccccgcgcggcttttcagccgcgttttttttgcgcggtaaagaaaatttgcgcaaatatacatgaaaggacgagaagtgaaggcaccttccaacgagcaaacagcccggacagcctaacacaggtgtcaaagcattgcaagcgaaaagaaaagcttgattggaaatgcctaattttgtcccttgtatttggcgaaacaaacgaattttctcaaaattgcaagtagaaattgacaatcaccgcagtgcagagtattataatggaagtaaaattaatttgcgcaaatttataaaaacaagaaaggagcagacatgaaactcggttatatgacaaacgcgttcggccctctggtaggagaaggaggcggcgttacaagcattaaggacatccggtatctgaccctttgcgacgacgaagcggtgctgaaaaaaatcacaaatgcaggcttccggtatattgaggtgttggaagggaacctgaccaaatatggttcggacatccaagtgctcaaagacatgctggcccgctacggtgccggcatgatgagcgtctgcgtgggcgccaattttatctacccagacgcgctggaggacgagatgtttcacatggagacagtcgctgctctggcggaacaggtaggcgtttcctacgtggcgttctgcggcggtgccatacgcgggaaaggcgtccagacgggcgactatgcgcttctggccaaagggctgaaggaggcagaaaaggtcttcgccgcccacggcatcgaggcaagctaccacccgcacctcgggtccatggcggaaaagccggagcaaatcgaccgactcttttcggtgagcgacatcaagatctgtccggatctggcgcatctggctgccggcggcggagatcctctggagatcgtcaaaaagtattacgacagaatctccttcgtccacctgaaggatttgaacgaaaacggatttgccccgctgggcaccgggcacgtcgatgtcgaaggggttctgcggttcctgaaggaaaagggatatgcaggagattatctggtggaggctgacggctttgccggcgacccggaagaagcctgccggacatcgtaccgtttcctgcagggcaagctgatctaaaattcctcccgtccgcggcgtcggtcaacggcgcgcggcacgggagggcatcttagaatgggaggattttacaatgaaaaaactgaatgtgggcctggttggtgccgggttcatgggaaaagcgcactcaatcgggtattccgacatgcccaagtatttctggccggccccggccgtgccggttttaaaaacaatctgcgacatcgtcccggaaatcgcggcggacgcgaaagaacgcttcggctttgaaaaatgctgcacggactggcgcgacatcgtcaacgatcccgagatcgacgtggtaagcatctgcacgccgaacaacgtccacgccgaaatcgccatcgctgcgctgaacgcagggaagcacgtactctgcgaaaagccaatcgcctcgacattggaggacgcgaaggccatggcggaggccgcaaagaaagcggcgcaaaaggggatcattgccatgaacgcctaccagtacagacgcgttccggcgatcgacctcgccaagaaattcatcgatgagggatccatcggcaaaatcctcaacgtacggtgcacctatctgcaaagctggtcggccgatcctgcctccccgctctcctggcggttccagaaagacatcgccggcgcggggacgcttggcgacatcgcctcacacgtgatcgacatcgcccagtatctggcgggtgacatcgaggcggtaaccggcatgatgcagacctacatcaccgagcggccggtgcaggaaggcggcacagacctgctgggcaccgtaaagcttggagccgatgcgaagcggaaggccgtagacgtggatgatgaggacagcttcctcgtgaagtttaaaaacggcgcggtaggcagcatcgaggccacgagaaacgcctggggtcgcaacaacttcatcacggtagagcttcacggcactctgggcagcctctacttcaactacgagcgactcaacgagttgcaggtgtgtttagctggagaccccgacgacagaaggggctttaagacaatctacaccggccccgcgcattttcacggggaagtgacctggaacattcccggaatgaacatcgggtacggcgaattgaaatccatcgaatcctacgagtttatcaaagcggtggtagaaggcaggcagccgtctaccagcttcgcagaagggtatcgagtggaacgcgtttgcgatgccgtgaaacgttcggcggaaaccggacgttgggtaacggtgaacgattgatcgaagcgcccgtttgacacgcagcccaaagccacatgttataagagtggcccgcaacggtaaagagcagattttcaaaatcgtgcagaccattgccgacgacgagatacaccggctggaagcccgagagaggtatctgtctaaatttcaaatttgccaaaagtccaccgcaattttcgtgaaattgcggtggacttttccttgataccggtgcagcaagctcaccctgcagctgctcggaaggcgctctgccttaaaatgctttcccgttccatatggatctgaatcttgacaaatttcggatttagaggtatgctattttgagcttagagggtacctgtttacctaatcattacagcaaagaaagagagaggtacaacatgaatatttatagtgatgcaatcgagcagctcggtatattcaccatcgtcggcggaattttggctatcgtcgccacagttttggcctatgtgtttatcgtccccgaaaaacgccgcgaaaagctcaatgctttcggcaagttcctccacgatacctgcaatttcaagtacctgatcgtagagaaaattctgcaggctctgtacattttcttcacggcagatatgatcattctgggcttcttcatgctctttgccgcgcctgaagactactttggcaatcgccactggctgggcgtctacggcatcctgaccatgatcctcggacccattatgatccgactggtgtatgaactgttgatgatggcagtcttgctgctgaaaaacgtaatctccatcaacaataagctccgcagccagaacggaaacgaagagaagaacggcattttcatggcccccgacatgggcgacctgcgccagcagtttcggtctaaggcagcacagcctcagaacccgcagccccaagtcccgcagagcgcacccgtagccaaattctgcggcaagtgcggttcgccgttgaacgaagccggcaagtgccccaactgtgacaacaatcagcctcaggcttaagcgcaaacattaagattatgccccgagcggaagcaatgccgctcggggcttttgattttgtccgcttcagcagaacgacaacatcgccccgtgcagcttcaaagttgcacggggctcttatcatttctcatttgactgatctttttcggctttgatacgttcgatttcttccgctattatatttccgatcgtatgatcgtccatttttatactttctgccgctgcaacagacttgtcagcaaatgcatcaaatttttcctgtttatcttttaatatatccataattctttcatcgatcgaattctcacaaagcaaccgataaaccagtacatttcttgtctggcccatacgatacgcccttgaaatcgcctgattttcaatagagggcttaagctgcggttcgcacaaaataatcacactggcagattgaatattcagacctgtcccgcccgactgtatttgtgctgccaaaaccgccccggcaggagccttatcaaaatcgtcaatgatctcttgtcttcgctgcggcgaaacggaaccatttatcggattcatacagcgatcacccaaaagctgcacaacttttcggatcgtatccagaaaaaacgagaatataatcacttttcgcttttcagattcggcctcttctatcagctccatcaatcgcttcgctttgcaggaatcctttatgttttctgcattccatgacacacgccttgtttctgcaaaattcttaccgaacaccgcttgttcatatatatccttttctgcctgtccgagtgtgcaccattcttcactttcaataagttcagggagctccgtcagcacgtcttccctctttctgcggtaataaaccggcgcaactgcctctctaaattgtggcgccgcggtcaaagcaagcatgtgttgtattcgcaatgcaatatcaggacgtaaaatatggataagcgcaaccatttcctccggcttattttcaagtgccgtgcccgtcataaacagcatgcgctctgcacgttcacagattttcttcacattcatcgtacgtcttgcctctgaatttttaatgtaatgtgcctcgtctacaaccaaaagcgaaagctcaaacgattccggcaaattaaaatgtgctgttgtctcgaaggttgttacagctacaccaccagcgcttatccatgaattcagtgcttcttttctgtccgcaccatgaattttcacaacctgcaatcgactcattttgcgaatttctcggcaccaatttgtaacgacgctcgccgggcacacaactgcaaaatgcgatgcccctgtgtttttcaaagataccatcgtggcgattgcttgtacggttttaccaagtcccatttcatctccgagaagaacgcgcttttggtgcagtgcatatttaacgccccattcctggtaacgacgcagctcgcacagcaaaccatccgggaaaaaacattcctcttgtacttctcttgcgagttcttccggcagtccgtatattgaatcatcgttaccgagtgttcccgggacaatattttcaagagcattgaaaaacgaaaccgaatgttcggaaaattctttccaagcatctatcccgttgatccgctttgtgttttcaaatattgtcctttgttcccgaactctttgaccatagtttccatttctataagaatccaaaaatttatatgcatccactgctttttgttttttagctgatgatgcaaatatccacttcaatcttttctgagataataacaaatcttctatcgcatattcgatttgccttctattctcagtaatcaagccacgacattcttttgtcgtttccctcgcataaacatatttagataatgctgtcactaaagctgtcgattcccgcgttttgttatcaacactcagtttgatctttgcaccttctcgcaccttgtctgccatattattcgctatacgctttatggaatacgctgcatcttcgctgataccatgcaccgaactgatcgaatacacattggccgcaacaatatctgcgatcgaacgaaatccgtggtctcgaagtgctttcactctaaatccgcctttttcacgattgatctcttctaccggaatatctcgaagcacatctaatacgtttcgggtcacgaccagatttgctgctttttcaatatccatctgcacgttgtcttcgtactgtgcaatctcatccagttcttccagcatcatgcgatgttcctgtatcaatcgctctgcatccgccgtatcaaaaagctttgccaactgtattctctccttttctgccgatttcagtttatttaaagtatgacgtaacagttcttatttgtcaatatttctctatgcaaacctcaaaacttctcattaaacattaaatacatattttttccgaatatcgcaaatgatttcctacccccgccccccacctgtcgcttttccgctcaccttacctattcttcaaatttagcatatttacattgtacttttcccgtgctatgatggtcttaacaaagacgaaaaggtgattttatggcgaaaaagctggcacatataagtgaagatcattcccgcaagcaaaccgtatacgaacacctcaccggcacggcagagcttgcaaagcagtttgccgccgcattcggcgcggaggaagacggctatctgctcggtttactgcacgacatcggcaagtacagcgatgcctttcagcatcgattagacggcggcgtgcgcgtagaccactccacggccggcgcaaaagaagcttgcgcgcacggtgtcggatatctggcgctcgccatcgcaggccaccacggcggcataccgaatttcggctcccgcgctgataccaaaaacgacgctaccctctcgggccgcttaaaacgcgacctcgaaccgtatgacgattggaaaaccgaagtcactctgccgccggtcaagccctttaacatgcgagaattcaacaccgggtttcggctctcgttttatatccgcatgctgttttcttgccttgttgatgccgatttcatcgacactgaaacctttatggacggcgcacttgccccgcgcggcaactacgatgcgctccctgtgctgctcgaccgcttggaaacgtacatcgcaccgtggtatccgcccaaaaccgagctcaaccgaaagcgctgcgccattttggatgcatgcaaagcctccggcagcaccgccgcaccgggtgtttatacgcttaccgtgccgacgggtggcggaaaaacgaccgctgccatggcatttgcgctgaccgctgccgtgcaaaactgcatgagccgcgtcatctacgccgcgccgtacacgtccatcatcgaccaaaacgccgatacgtttgaaaaaatcttcggcacggaaaacgtcatcgagcaccacagcagcgcggaatatctcttttccgaaagcccgaaccccgcagaataccgcaaaatgctggccgcagaaaactgggacgcccccgtcatcgccacgaccaccgtgcagctgtttgagtccctgtttgcgagcaaacccgcccgctgccgcaagctgcacaacctcgccaacagcgtgctcatcttagacgaagtgcagacgctgcccatgccgtatctaaaaccgttcacggcggcgcttgccgagcttgcccgaaagtacggcgtcattgtcgtcctgtgcaccgccacgcagcccgcgttagacggtgtttttgccgatttgaaaatcgacctgccgatcaaagagatctgtcccaatgtccctgaaaatttcgagaccttccgccgcacgaaaatcgcgcagcacacatttgacagcacagaatcgctcaccgccgaactcaccacactgccgcaagtgctttgcatcgtcaaccgcatcgcagacgcacagaaaatctatcaagcgctgccaaaagacggcgcgtactgcctcaccacgcacctgtgtcctgcccaccgcaaagcgcgcattaaggaaattcgcgaacgcctaaaaatcggcctgccctgccgcgtcgtttccacctcgctcatcgaagccggtgtcgatgtggatttcccgcgcgtttaccgcgaagaagccgggcttgattccgtcctgcaagccgccggccgctgcaatcgcgagggcaagcgcccgttagatgaaagcctcgtgaccgtcttcaccgtccaaaacaccaccccgccgccctacatgcgccagcccgccgcagccatgaagaacatttcaaaacgcatggaggacatcacttcgttagctgcaatccgcgcgtattttgagttctatcgcgatttgtacggtaaagaagatctcgaccgtgagaagattctcatagcgttcgaaaacgagatgctcccgttcgcctccgttgcggaaaaggtacgggtcattgaaagctgcaccacacccgtgtatatcccgatcgaccaaggcgaagccctcgtcgagcagctgtatcgcggtgaacgcagccgcaccctgttcagaaaactcgggcagtacagtgtgaacgtctacccgcagcagctcgctgccctgcgcgaagtcggcgccgtgcagagcgtcgatggcggcgcgctctatgtcctcgccgatccccgccgctacgacagtgccctcggcctcaccctcgaccaaaccgaaaccgctctgtttatataaaatagaaaagccggtaaggtaaacccttaccgacctctctatacaaatcaacaataattatttctacccacactgcctgtaaaaacagacagcgaccttaacttgattttatcccatatgcagctgggctttcagcgcgtcttgcaggacctgtgaaaagttgatgttctgctctaaggcggcggtgttcagccacgcgggaatggtcagcgtctttttgacggctttttcaaagtgcgttttggcgtattcttccacgtccacggtgatgatgttcacgaacgcgccgtccatcgacacttccagctcggcggcgacatctgcaaggcggatcgcgtccacggacgagggcgccggggcggcttcaccgtcttttttcagccagtacagatacccggcaaggcaatcgaccgccatgcgcagcgcttcatcgagcgtttcgccgcaggtggacagatcgctcagatcggggaaaacaacagaataaccgctttcttccttaaaaaaacaagcgggataagctgacagcataaaatcgacctcctgatatagtctaagcggaagcgggggagattatttcaaacctgcctgcttcaaaatggaattttccgtgcctttcggaatgtccttgcaatgaaacggaatggtgaccttgccgggcttcgtcgggtgcgtataatggcggtgcgaacccgtctgcatcttgaacacccagccgtcttctaaaatgatccgttccagttcctttggcttcttcggcatttcaattcccctcctgattcaaatctattataccatatgatacgtattaaagcaatacgtattcaaattatgctttataaattccgtaaaaaataaactaaattcaaattttatcttgacacgttcaaataatcgttatatagttgaattaacaaaacaatattaattgaattttgaaaggagttgatcttattgattcagttggaagtctggggcccgtatgcgttattcacacgcggagagatgaaagtcgagcgtgtaagctacgatgtccccaccccgtccgctgcgcgtggcatagttgaatctatctacctgcatccgggtatgcgttgggtaatccgccgcatctacgttttgaaccccatcgagttcaccaccattcggcgcaacgaggtaaaaaacaaaattctcgggagcaccgccatgcgcatcgcgcagggcaaggaagatgagccgtacctcgtcacgacgaaacaaattgtccagcgcgcctccatggtgctgacgaacgtccactatgtcatcgaagcagagttcgagatgctgccggaaaaagccgcacccggcgataaccccggcaagtttcaggacatcgtcacgcgccgcatgagaaaaggccagtgcttttccaccccgtactttggctgccgcgagtttcccgcacacttcaagcagtgggagggtggcccgatcccgacaattgacgagacgcgcgacctcggctttatgctgtacgatttcgattattccgacccacaaaatatcacgcccctgtatttccgtgccaaaatggagcacggtgtcattcaggtggccggctgcgaggtgttcagatgatcctgcaagccttagttcagtattacgaagcgctccttgcccgcggtgagatcgaccgcccgggctggagcaaagtcaatgtcagctggcgtctggacctaaacccagacggctcccttttcgatgtttctcccctccaaaagccctctccaaacggtaaaaagatgctgccgcagcagctcgccgtgcccgcacaggtcaagcgctcttccggtgttgcggcaaattttctgtgtgatacgtcttcttacctgctcggcgtggacgataaaggtaagcccgagcgcaccaaagcctgctttgaagcgagccgagaaaagcatctggaaattttgaaagatacccccggtgaagccgccgcggccgtccgtgcgtttttcgatacatggaatccttcctctgccgtcgagcaccctgctttgcagccctatctttcggaaatttataagggcggcaatctgatcttttattataacaataagcccgcggcaaacgactctgacatcgccgccgcgtggcagcaggcctatgattctgcttcagattccgacacgcccactcggtgcagtgtcaccggcaggctcgcccccgccgcgcgtctgcacggcaacattcagggcgtgcgcggcgcacaaagctccggcgcatcgctcgtttcgttcaacgccgatgccttctgctcctacgggcacgagcagggcgagaacgctcccgtcagcacctacgccatgaccgcctacacgcaggcgctaaactacctgctgcgcagtgataatgtccgccgcatcggcgacgtcaccgtcgtatattgggtggagaatgccgatcctgccatcgccgcatttgcgggagctatgcttttcggtccgcaggagcagtccgattggagtgaaaacgacattttaggcgcaattcaaaaacttgtatccggcagaacagccgacctacaggacatgcacctcagccccgatacacacttttacattctggggctcgcgccgaacgccgcgcgtctttccgttcgctttttctggcaggataccttcacaaagctcgccaaaaacgtgaacgcccattacgagcgtttggagatcacccgcccggcctacgaaaaattcgacacgctttggccctacaccctcgcgcgctctgccgtccgcttttccaaagactggaaaaaagccgatgaagagctgcaaaaatccttcccgcgcctttccggcgatctgctcacttccattctaaacgatacgcgctaccccgccactttactaaacggcaccgtgcagcgcatccgcgccgagcacgatgtcacccgggcgcgtgcgtccgtcataaaagcttattattctaaaaacgaagacccgctttgtccaaaggaggttttgaccgtgtctgtaaacaaagaaagcaccaatatcccctacaatctcggccgcctgttcgccgttctggagcgcacgcaggaagccgcaaatcccaacatcaacaccaccatcaaagaccgcttttttaactccgcttccgctacgccgagccttgtattccccacgctcatcaatttagcgcagaagcacctcgcaaagctcaacgagggtcagcggattgcactggataaatccatcggcgaactttcggacaagctcggcgaaacctttccaaagcagcttatgctcgcagaacagggcgcgttccagctcggctactaccagcagcgtcaggaatattttaagaaaaagacagacaccaccgaacagaaagaggaggcataaccatgcgtgaacccattcaaaaccgctacgatttcgtgatcttattcgatgtggaaaacggcaaccccaacggcgaccccgacgccggcaacatgccgcgcgtagacccggaaaccggcaacggcattataaccgatgtgtgcctaaagcgcaaaatccgcaactacgtgcaggacgtcaaagaagatgcgtccggctggcgcatttacattaaggatcaggttccgctcaaccgcagcgacctcgaagccggcgaagcgctcggcatcggcgaagagcttgccgagattcaaaaaggcaaggacgccaaaaagattgtgacaaagctccgcagcaatgacccggatatcgacctcaagctccgtgacttcatgtgcagcgagtttttcgacatccgcacattcggcgcagtcatgacaacattcgtaaagggcgctttaaactgcggtcaggtacgcggcccggtgcagctcggctttgcccgctccatcgaccccatcgtgccgcaggaggtcaccattacccgcactgccatcaccaccgaatccgacgcccagaacaaaaccaccgaaatgggccgcaaatacgtcgtgccctacggtctttaccgcgcagagggcttcgtttccgccaacctcgcccgccgcgtgaccggcttctccgaagaagaccttcaaatgctctggcaggccattctcaatatgtttgaaaacgatcacagcgccgcccgcggcaaaatggccgtgcgcgagctcatcatcttcaaacacgcgtccgagcttggcaacgccgcttcctataagctgttcgatgccgtaacggttaaaaaagtcgacggcgtagccgtcccgcgcaaattctccgattacaccgtcaccgtttccgaagacctgcccgaaggcgtcacctgcgaacgtctttcctaaatggacgcgcgtgaagacggacttttaatgtccggcatccagcacttcgcgttctgccgccgccagtgggcgctcatccacatcgagcagcagtggcaggaaaacgcccgcaccgcacaggggcaactcgaccacgcccgctgccacgatgaaacgttgtccgaaaagcgcgacaacgttttcaccgtgcgcggcatgcgcgtgttcagccgtaaattgaacctctccggcgcatgcgacgtcgtagagtttcataaagacaaaaacggcatttctttagaggggcagcccggattttggctgccctaccccatcgagtacaagcacggccgcgaaaaagagaccgatgccgaccgcttgcagctctgcgccgaagccatggcgcttgaggaaatgctcgtgtgcgatattcccgcgggcgcgctctactacatagaaacgcgccgccgcgaggccgttccgttcacggaagaactccgccgcaaaacggaagacaccgctgccgaaatgaaccgctatttcgcccgcggctacacaccaaaagtcaaacccggcaagcactgcaacgcctgctcgttaaaatcgatttgcctgccggtactgtgcagccgtgcagaccccgtctcgtacctgcgcgcccacatttttgaaagcgaggaggataccccgtgagacaactgctcaacaccctgttcgtgctcagcgaagacgcgtatctctccgtaaacggcgaaaatgtcgtcatcagtcgcgagcaaaaggaagtcgcgcgcttcccgctgcacacgctcgagggcattctctgtttctcctacgccggcgcaagtcccgccttgatgggtgcctgcgtgcagcgcggtgtggacatcgcgtttttctccccgcgcgggcagtttttggcccgcaccgtcggcgaagagcatggcaacgtcctcctgcggcaaacgcagaatcgcgtgtccgacgatccctatcaaagctgccgctacgcccgcgggttcatcctcggcaaggtctataacgcccgctgggtcttagagcgcgccacgcgtgaccacccccagcgcgtacccgtggaagcgcttaaaacagccgccgcacaaatggcacagtctttgccgctcatcgcctcctgcgaagaccccgcgcagctgctcggcttagagggcgaagccgcaaagctgtattttggtgtgtttgatcacctcgttttgcagcagcaaagcgacttccgttttacctcgcgcagccgtcggccaccgctcgataacatcaacgccctactttcgttcgcctatacactcctcacgcgcgactgtaccgccgcgctcgaaagtgccgggctcgacccgtacatcggcttcatgcaccgtccaagacccggtcgccgcagtctcgcacttgacctcatggaggagctgcgcgccgtgtatgccgaccgctttgtgctctcctgcgtaaaccgcaagatcatcaccgcaaagcacctgcaaaagcaggaaagcggtgccgtgcttttaacggacgacggtcgccgcgcatttctcggcgcatggcaaagcaaaaagcaggagcaaatcacgcacccgtttttaaaagagaagattccgtgggggctcgtgccctacgtacaggcgctcctgctcgcccgcactctgcgcggcgatctggaagcgtatccgccgtttttctggaagtgaggtcaaaatgctggtcttaattacctacgacgtcaacacggagaccgccgccgggaaaaagcgtctccgcaaagtcgctaaaaagtgcgtagaccacgggcagcgcgtacaaaactccgttttcgagtgcttgctgaccgccgcgcagtatgttacactgaaggcagagctcaccgcgctcatcgagcccgaaacggacagcctgcggttttaccgcctcggcaatcaatataagcagaatgtagagcacgtcggcgtacagcccgcctacgcgcaggattccgtcctgctcatctgattacccgcagtgcgaagccgaagcgcacacgcttttcccgcttccttcgcaccaaatcaaaacccaaaatttgtcctttttaaaacgccaccggcaaattttctctttccgcgtcttaaagaggcaaattcttctcccttttgcgcaaaaacagacgaaaactttgtccgtttttgctgtcgccctccacccggagggcgtggatagaaatatctgccgccatgtcagcgttttcggcgtagctgtgtcgccctccacccggagggcgtggatagaaatatcgattttttgcacactgtccgcggtttctgccgcgtcgccctccacccggagggcgtggatagaaatattttgctttacaagctgcgacagatcggcgtggagtcgccctccacccggagggcgtggatagaaatacacaaaagataaaaatccagaagcggagggcagggtcgccctccacccggagggcgtggatagaaatttacggggccacgttggaaaacggtatggtcgccgtcgccctccacccggagggcgtggatagaaataggtactcgatctgctcgttctcggagccttcggtcgccctccacccggagggcgtggatagaaatctcgaatcttgcgtcgtactgttcggggtatcgggtcgccctccacccggagggcgtggatagaaatttatttatcggaataccctgtaaaataaatacagtgtcgccctccacccggagggcgtggatagaaataaagcgtatgcacctttagccggaaaggttgtatgtcgccctccacccggagggcgtggatagaaatagagaaataagcgtcgccgccgttgcggcctgtataagtcgccctccacccggagggcgtggatagaaatataaagagcagatcgttggacgctttacgcattgcgtcgccctccacccggagggcgtggatagaaatatactgacaaacgtcgttccactgtgcacaccagcgtcgccctccacccggagggcgtggatagaaatatggtatactattggtataaaaggtggtaaatagtcgccctccacccggagggcgtggatagaaatacaatggcgcgtttgatttttcgtacattttggactgtcgccctccacccggagggcgtggatagaaattttggcttggaggtctttgaacctcatgcaaccatgcgtcgccctccacccggagggcgtggatagaaatcacgtcgctaaagtggggagcatacccgggggagtcgccctccacccggagggcgtggatagaaatatcaattttgcccagacggtcggcgaaggaaatagtcgccctccacccggagggcgtggatagaaataaaccgtttacaatttgtacgcgggtatagaatatgtcgccctccacccggagggcgtggatagaaatataaagaggagatcgttagacgctttacgcattggtcgccctccacccggagggcgtggatagaaatgctttaattggtcggcagaattgatagaaattgcatgtcgccctccacccggagggcgtggatagaaataacagagtgtataaagagttgtttaacggttttgtcgccctccacccggagggcgtggatagaaatagcgcttcgagttcttcggggttgtactcataatgtcgccctccacccggagggcgtggatagaaattggagggacgtgttggagatgcccagataggtcaaaggtcgccctccacccggagggcgtggatagaaatttgtaaaaatactgtggctgatctacgatctgagtcgccctccacccggagggcgtggatagaaatttataatggttgagggatcttttctgtaggcggtgtcgccttccacccggagggcgtggatagaaattgaaaaggtgtcaggaagaaaaccgctttgccacggtcgccctccatccggagggcgtggatagaaattcctatacggtgctggacgataaaatctacttccgtcgccctctacccggagggcgcgggtagaacgcaaatcgtaacacttgacttttggcgtgacatgcccccaagtctgcgaataaagacaaagatgtgccgagcatcaaaacggcggaacagctcgaaaagcgctttcatcggctgcgaaaagcggcggatgagggcgttcttttgccgttaaaaccggacattgcaggacagtataggacatcgacggacaactttctcaaaacctctttacagaacaaacgtttttagctataatgagatacagaaagggggcggcagcatgacggagaacaggccgcgcatggcgatctgctacgattttgacaaaacactttccccggacgacatgcagacgttcacgctcatcccgtcttttggcattgacaaagacaaattctgggcggaaacggacgcattcgcgcgggaaaacagcatggaaagcaacctttcgtggatgttcatgcttgttcgctattcacgctttctcggaaaatccttaaaacgcgagtattttcgggccatcggtgcgcaggtggagctgtaccgcggcgttacggattggtttgcgcgcacgacagcgtatgctgcgcagcgcggcattgagcttgaacactacatcatttcttcgggtcttaaagaaatcattgagggcagcgccatcgcgaagaatttcaaacgcatttatgcctcctcctacctctacaccacggacggcgtagcggagtggcccgcgcaggccatcaattacacgaacaagacgcagttcattttccgcattgcaaaaggctttttggaggagtacgacgagcgcgtaaacgacagcatgcccgaggaaaacctgcgcattccgtatgagaacatcgtctatatcggcgacagcgccacggacattccgtgcatgcggctcgtgaaaagcaaaggcggctactccgtcggcgtatacgacccggagaaaaataaccgcgccaaagtatacaagctgtataacgacaaccgattaaacttctacgcgcccgccgattatacagaacgaagcaatttatatcgctacatgcagcagatcatcgacgaagtcgccgcgcgggaacagattaaaagcgagcgcgaaattctgcgtcagcccgccgaagcctacaaaatgcgctccatgctcgaaaagctcgagaccggctatccggaaaagctgactccgcaagagattaccgagctgcaaaagctggaagcgatgatcaaatcgcgcactccgggagagatcgactgatggatgacgtaaagtactttccgtacggcgaaaaagagctcgcttatttacggaaaaaggacaagaagctctcggcggtcatcaaccgcgtggggcacattgagcgcgccgtggacgacgaccttttttccgccgtggtacaccacatcgtggggcaacagatttccacaaaggcgcaggcaaccgtttgggcgcgcgtgcagaacgccctcggcacggtcgatgccgaacacgttttgggctatggcgaagcaaatttgcagtcgctcggcatttcgttccgcaaggcggaatacatcacggacttcgcgaaaaaggtgcatacgggcgaatttgatttaatcagcatcggcgaaaagccggatgaagcggtcatcctcgagctcagcgcgctcaagggcatcggcgtgtggacagcggaaatgttgcttttattctgcctgcagcgcccgaatgtgttcagctacggcgacctcgccattttgcgcggcatgcgcatggtctaccgccacaaggagatcaaccgcgcacggttcgagcggtaccgcaaacgtttttcgccgtattgcagcatcgcaagtttatatttctgggcggtctccggcggcgcgctccccgaactcaccgaccccgccgcgccgaaaccgaagaaataaacgtacattttcgcacgcatagaaaaagatagtcttccaaagcgtttgtttcgcttagaaagactatcttttttatatcgtttttatcataacgaaattcgtgagccagacgccgtaacgctctacttgctgttctttaatggccgcatagtcgcgcttttggaagaagccttttgcagtcaaagatgcgtgcgttgtgacggcttttggagcgacaaactcagtccttcgggactttgacccagatgccgggagtcttttcggcttccataagggcgccccaggcgctgatgatggagagcgtctcactgtgtggggcagggatggtgccgtttttgaagaactcgacgagcgcctcaatgaagtgacggaagtaatcggagcaaatttccagtacggaattctccgtggagcgcgcaatgttcatcatgaacggcgagccctttgcgtagccggaaagcgttgcggtgcggccgtccgcaaagcgcagaacgccggtgtacacctcgtcgtttgtcaggtgcatgacttccgtcgcgggagcctgcatcatcatgaagatcggctccagctggtggatggcgtaatcctcaaaaccgttcggaccccatgcattgacacccttgatgttcgttttatccgctgcctgatactcctccgcaaaacgcagcgcggaggacgaccagcacggcgtgccgctctgctcggcaagatcgagcatacgctttgcagcgaagtgatccggcgcgaaggttttatccacatagcagcgcttgccggagcgcagcgcgaggtttgcgagttcttcgtgctttttcgggtcgcgcggggcgagcacgagcagaacgtcactcttttcgatgagctcctcctgcgtcatcatgcgggtgagaccgtatttttcgcaccatgcgtccgttgtgaggccgccctcggggctgtcgatttcagcccaggcgtacacggcttctacctcgccgtttgagtaatcgtgcagcatgtgaacgtagttattggcgtgccactcgtctaaatagtaatcgataaaaccgactttgatcatgcttttgactcctttaaactgaatttcaatacaactttccggcgtacttttccaccggtattcgcgttcattatagcacattccgccgttttgtaccgcagtttttgcgaaatttcgaaagttcatgaaaaaagcaaaccctttgtgtgaaatatgcaaaaagcgtcccgaatgctcggaacgctttttgcatatttggaaattcggtgtggttttgccgccttatctcgcgtttttcttgacgcgcaggcggttgatggcgcgggcaaggttcgcctgcgcggtgcggtattcgcgcacgctgcgcttttggaggatggcctccttcgcctcatcggcggcgcgctgtgcacgtttggcatcgatctcttccgggtactcggcggagtctacaagcacgaggatatcgttgccctcgaccttcaccatgccctcggaaacggcagcggtgcgccactccttacccggtgcgcggtaagagagcacgcccggcacaacggcggagatcatattgctgtgacccgccagaatgccgtactggccgaccgttgtgggcacgacaagcgactcgcactcgccttcgaaaaagaccttatcggcttcaagcaggtgcatctgaaatgtacgcatcagatcgcctccgcctctaactgcttcgctttcgcgatgacgtcctcgagcgtacctacgttatagaacgccgcctcggggtactggtccatttcgccgtctacgatggccttgaagccgcgcagcgtctctttgagcgggacgtaaacgcccggcacgctggagaacttttctgcgacgtgcatcggctgcgagaggaaacgctggatctttctcgcgcgctgcacggtgagctggtcttcgtcgctaagctcgtccataccgaggatggcgatgatgtcctgcagttcgctgtacttctggagggtctcctgcacttcacgcgcgatgcggtagtgctcctcgccgacaacgtcggcttcgaggatacgggaggtggactccagcggatcaacggcggggtaaatgccctgctcggcgatcttacggctcaaaacggtcgtagcgtcgaggtgggcgaacgttgtggccggggccgggtcggtaaggtcatcggcaggcacgtaaacggcctgaaccgaggtgacggagccgtcttttgtggaggtgatgcgctcctgcagctcgcccatttcgtttgcgagggtcggctgataaccgacggcggaaggcatacggccgagaagcgtggaaacctcactgcctgcctgcacgaaacggaagatgttatcgatgaagagcaggacgtccttgtgctcttcgtcacggaaatgctctgccatggtgaggccggagagggcgacacgcatacgcacgcccggggactcgttcatctggccgaagacgagcgccgttttatcgccgacaccgctttcacgcatttcacgccagaggtcgttaccctcacggctgcgctcgccgacgccggtaaacacggagtaaccgccgtgctccatggcgacgttatggatgagctcctggataaggacggtcttgccgacgcctgcgccgccaaacagaccgattttgccgcccttcgggtacggctccagaaggtcgatgaccttgatgccggtctcgaggatctcgacggccgggttctgctcgtcaaacgacggagcttttctgtaaatgcttttgtgcggctcggttgcgggaacggcttcgccgccgtcgatgggatcgccgagcacgttgaacatgcggccgagcgtgttttcgcccaccggcacttcgatggttttgcccggagcctcaacctgcataccgcgggaaaggccctcactgccggaaagcatgacgcagcggaccgtgttgtcacccacatgctgggcaacctccatcacataccgccgtccgtccacggtaagcgaaagggcttctctgattttcggcagaacgccggactcgaactgtacgtcgatgaccgggccggagatctgtacgatcttacctgtattcacgttgttcacgcttccttcctgtgtttttgacgctgtgccttcgcaccggcggagacctctgtaatctcctgcgtgatggcagcctgacgcacgcggttatactgcaaggaaagctctgcgaggagcttttccgcgttgctgttggcggaatccatcgccgtcatgcgggcattctgctcgctgcagaagctatcgatgagggcactgtaaataaagcccgaaacgtagctttgcatgatgttgttgagaaccgcctgcacggagggtacaaactcgaacggcgtggtgaccgccttttccaccgtatccgtctggaaataggcgcggtggaacggcagcagacgcgtgcagtgtgcagaggacgtgaggctgttctccatatcggtataaatgacaaaaatcttcttaaaatccccgcggtcgtagccctcgagcaggatgtcgcaaatttctctcgcacgctgcatggtggggttctgtgccgtatagaggaagctgtgctccatggggatattgtgctgcgtaaagaagtggcggccgtattcgcctacaacgtagagcttcgtgtcgggatgctcatcgagcatgtgcatggcttccttgatgacgttctggttgtatgcgcccgcgaggcccttatccgccgtgatgacgaggcacgcgtaggtgccctccagcggcggctcgccctcggggggatagaaatagcggctgtccacgtcgttctgggtacggaaaatacgcttgatctccgtgcgcagcgcctcgaaatacgggcgcgtgcggtccagatcgttgcgtgctttgcgcagctttgtggaagcgataaggtacatggcgttcgtgattttacgcgtatccttaacgctttcgattctggttttaatctcttttgtattagccatagcgaaaaccgcctttccgagcgcttacgcgttctgcgggttttccgccttgtacttttcgaggaattccttcgcgactttcaaaatctcttcgcggtcggggtcggaaagctgaccggtggtatcgacacggcggcagacatcgctcatattcttctcggcgtacttgataagctccgtgtggaaatgacccatatcgtcaagcgggacgtcctgcatgacgtggtgcagagcagagacgagcgtgatgacctgatcgtgctggctcatcggatggtattgcggctgacgcagcagacgcatgaggctctgaccgtaggtgagctgacgctttgtggtctcgtcaaggtcgctggagaactgggtgaagacttccatttcgcggtactgggcaaggtccagacggatgccgcccgctgcctttttcatggcctttgtctgggcgtcgccgccgacacgggaaaccgaaagaccgacgttgacagccggacgctggccggagaagaacaggtcgctctcaaggaagatctgaccgtctgtgatggaaataatgttcgtcgggatgtaagcggaaacgtcgcccgcctgcgtttcaacaatcggcaatgccgtcatgctgccgccgccgagtgcatcggaaagatgcgcggaacgctccaacaaacgggaatgcaggtagaaaacgtcacccggatacgcttcacgacccggggaacgctccaaaagcaggctcagtgcacggtacgcaatggcgtgctttgaaaggtcatcgtacacgatgaggacatctctgccctgatacatgaagtgctcgccgagtgcgcagccggcatacggtgcgatgtattgcaaggaagccgagtcactggcagatgcgttgactacgatggtgtaatccatggcgccgcggcgctttaaggtctccacaagctgtgcaacggagctggacttctgaccgatggcgacatagatgcaaacgacgttcttgcccttctggttcaaaatggtatcgagcgcgacggcggttttaccggtctggcggtcgccgatgataagctcacgctggccgcggccaatcgggaacatggaatcgatggcgagaaggccggtttccataggcgcgttgaccggctggcggtcgacaatgcccggtgcggggcactcgatggggcggtagccctcggcgctgatgtcacccttgccgtcgatcggcgtgccgagtgcatcgacaacacggccgaggaagccgtcgccgaccgggataccggcggtcttgccgcttctgcgcacaaggctgccctcggtgatctcggcatcgtcgccaaagaggacgcagccgatctcattgcggcgcaggtcctgcaccatgcccttaacgccggaggagaacaggagaatctcgccgtaggcggcatgttcaaggccactgacaacggcgatctcatcgccaacggtgagaaccgtaccggtctcttccgcttctgcggatggggtaaaatcttcaacagcttccttcatcagcggaatgacggaatcgctgccggactttaacgcctttagcttttcttcaaactggcgcagacggcttttgaggctccaatcgtacacatcggtgccgacggtaagcgtgaagccgttcagcattttatcttcttcaaaggtgagcggaatctcacagccataggtacgcagcaggaattccgcaaagcgcttttcctgttcggcatccgggcggcggctgccgcggagaacggctacggccttttcatctgcattacgcattcggctctcccctctctgcctgatcgaggaacgcgtcatacggatcgccgtctttataaacaagcttcttggtcgcttccatagcgagctcggtaagctccttctgtgcgtctgcgatcatcttatcatgtacacgggcggcatccttctgcgcatcggcgacgatcttatccgcctgtgcatgggcatcggaaagctgctgctgtacgctgcggtcgagctctttctgcgcttcggttctctttgcgctgatctcgccctcaacggacttgagctgctcctgataatccgccttgatcttttcggcggaatcgagttcactttgggccttctgtgccatttcggcataatgcgcttcgcgctttgccatgaagttcttgaccggcttgtacaaaaggaaatacaggccgccgaacaaaatgacgaaattcagtacatgcagcaaaatctgctgccaatcaatattcagtgggatgttcacgatctgcactctcctttacaggacgaagatgatgaggataacaacgagcagggcataaatgatggccgtctcgataaagacgaggccgagcatgagggtggtacggatcttgctttcagcctccggctgacgtgcgatgccctcaacagccttacctgcggagaggcccataccgactgcaccgccggcggctgcaataccgactgcaatagcggaagcaagtgccttaaggccagttgtgctgtctgcggtggtggctgcagcttctactgcggtttcagctgttgccgtggtggttgcggcatcgccgtttgttgcggcgaataccggaatggagatggcgaggatggcgatgactgccagcagaatgatggcaagcttctttaactttctctgttttgcgttcatgatattttccctccgtaggttaattttcagcttctgcttttacttttttctttttcggttcctgcttctcggaaacctcgccgaaatagagcgcgacgagcatcgtcaaaacataggcctgaatgagcgcgtgcagcagcgtgaacataacgcccacgatgaccggcagcacaaagctcagattcacataataatacacaagctccgtaacgagcaggccgcttaaaagtgcgccgaacagacggaagctcatggaaatcggcagcgagaactcctttaaagtgctgcccacgcctttgaagccgttatacgcgataccgccgcccagaatgacgaggtacgagaagcagcccatggcgatggcggcgttgacatcggacagcggcgccggaagcgtgatgggcgaaccctccgttgtgatagcctgaatgccgaacagctcaaagagcgtgccgatgaaaatgtacgcgccggccgtgaagatgtacgcaccgaggaagccgctacgccccgggctgttggacttagccatgccgtcaaacaggtctaccgcctgctcaaggagcatctggaactttccgggcaccatcttaaagcgcggaatgacgaaaatgcgcacgatgaccgcaaataccagcaagatgcccgagaccaccatggcggagatcagcgccgggttgacatctttgatgccgaagaggctgattctgttcgtctcatgcagaaccgcgtcacgcatggtcacctgaatcgtttcggtcttctgcaccgaaggaaccagaatgcttgcgacgagcagcaccacaatagcgcagatccacaaagccagctttgttttctttgctttcattgtttttccctttctttctcaaaattttgccttccatttcaatatcaccgggcaaaaattcccccttcagcgctgcgccccaaaagggcacacgaccgcatctttcgccgctgtgaaaagcagcaacaagacacggtcacaagagcacacgtttttgttgacattgaccaaatatcctgttacttttttgtaaactgtatttggaagcatctgtattatacgcacattaaatcgaattgtaaaatgttatattgacatatctactatttcatttttgatattttagtaagtcgtatagaatttcattatgccgtgcgctatttttctctttacaaataaagataagatggaacggcacgcgggaaaagtcaggttttttcaacttgacagaggctttccccttgctttatactggagaaaacagatggaaacggggagacaatatgcggacggtttataaaaacggcacggtttacacgggaaacggctttgtgacggattttgcggtggaaaacgggaaattctgctttgtgggcgagacggataaagccacggcagatgaagtagtcgatttaggcggaaaattcgtctgcgcggggtttaatgactcacacatgcatgtgctgaacctcggcaatgtactgacaatggcgaacctcggcgcgcacacgacgtctt

SEQ ID NO: 134 - DNA, 32759 bp, Unknown
  16S sequences of unknown bacteria
gggcattgtagaacattttttattctctttgccctcttttttttctcccattccacaatctttgacgtagagcgcaaaaataaccatcagcggcgatgccgtaataggagaatccgtttcctcagcaaaagataaaagcgaaaacaacgatgtaatatttaatagcgtatacggcggaggctataccgtaggcagcgggacccaaacattcggctccacaagcgtatctataggcggcaacgcaattgtaaacggcattgtaataggaggctcccacgcgggtcccacaggcacagcttatgtaggcaacaaggatgcctccgatttttccgcggtagtgtccacagtttcaatttccgaaaacgcggaagttcgcggcggatatgtattcggcggagcataccattcatggggcgacggagcaaaatcctccgacatttatggcagcacgcaagtatccgtaaccggcgggaagatttacaacgagactgaaggcaccggatacgtatttggcggcgggtattcgtccgacggcaacaacgcctcgcaggcatccatatcaaatgtctggggcaacacaaacgtaaatataagcggaggtgaagtcgggaacgtatacggaggaatgtatgtaaatgaagtttacgggtacggcagcgccatgggggatgtcaaaggaaatacaaacatctccataaccggcggaaacgtcggaaatgtgtttggcggcggactaacggaaaggcttagcggagacgaatcgctaacgataaagacttcggttctaggcaataccgatataaccatatccgacacatccgtttcaggcagcgtctatggaggaggaaacgggcaaaactctaccgttgaaggcgattccacaataactttaaccggaaatgcgtcggtcgccggcactataaacggaggaggattaaacggagcaaccgtaaacggagtgaaaaccctaaatataggttcctcaacatcggcatataccggcggacagactttgaagattgccgatttcgataaaataaaaatttctaacaactcctccgcaaaaattagcgccgatatttccggagtttccgcatcgtcctctcaaattataggaggcatcgtgtccggcaaggcagagtttgaaaattcgtcgtttagggaaaatgcttttgaggcctcggaaggctcgatatacgggggcgtattcgcatccgggcaaaccgtaaacaacagcgtttttgaatctaactccgcaaatgtcgtttccgaaacaggaaattatatggtttacggaacagttgcaagtatacgcaataccgattccgccaattttgtagaatgtaaattcgactccaacatcgcatacagcacctacagagtccaaggcggcgtgcttcaagtctttaacggggggaatttaaatgttgaaaattcatcttttataaacaattcctctaccgctgtaaacaaggctcgcggcggcgcgatagaaaactacaatgcaaacttgagcgtttccaacaccgttttcgaagggaacagcgttgcaagcacatcgctgagctcttacggtggagcaatttattcaagcgagtcatctgcggtaagcaacctaaacgatgtagttttttccggcaactccgctatatcaggctatggcggagccgtagctgctgaaggcaaatcattaataaatttcaacgcaactgacgacgcagtattttccggcaactacgccacaaacgccgaaggattgaaagacgattcccgcggaggatttttatatctttcagaaagcgcccaagcaaatttcgatatttctggaaataaatcgctaactataggcaacgggactgaaggctacgactcaatatcatcggacaactccgcagtatcaatttcaaagaacggtagcggaaacttaattgtaaacggatccatgcaatattataccggatccattactgtcaactcaggctatatgagcattaataaagcgcttggagcttcccaaatttcgatttcagaaggagcaaaactctcccttgccctatcggaaaacatgcctgagggaacaaaagtgtcaaaccaagggacgctctcgctgtcgcgcgggacgcttgccgacaacgcttccataacatttgccgaatactccggcatagatgcggaagctttcgggggaacatttaaagacggagtcttcacagccggcaagagcgccgagttatcgtctgcgcccataacggtgggaacgggagattccgacgttcaaagcgtggtatacaacaaagacgcgcaaagcctaactttggatttcaatattgcaaatatgggcgcgcaagaaatcgtaataaaatcaatttccgaatcgcaagacactcaaggaatatccggcacggtgcttgcagcatttgacattgacgctacttacgacgaatctggcgattggaccgtagttttaagcgcgggagtagatttgaccggaatagacacaaattcgctaaaagcttggcataaaagcgacggagggacatggcaggctgccgacgatatcctagtggaatactcggacggttttgcgaaatttgttgtcgacggattcagctcatgggcaatttccggagcagcaattcccgagccgtcagcttttgcaattttattcggcgccatatcaatattgtttgccggataccgcaaacaaagataaaattcttttttataaaaggccgcccgaaagaaaaacgggcggcttttttgttgttcgcttcaaatgcgccaatttagtaaaaatcatttacaagtcttaacaatttagttttaataaattcccataatgaagtctgagaattggaactcgcgcctcggcgtaatattggccgttgcgggaagcgctgttgggcttggaaattttctgaaatttccggggcaagtcgcaatgtacggaggggcgtcgtttatgatagcctacgtaatatcgttttttgtagtcggccttcccatagcaatggccgagtggaccatgggcagacacgggggggctaacggctaccattcacccgtaggcataatgggattcttcgggcgcactaaaaagatggcatacgttggcataacaagcgtattgctgacgctgatgatttattgctattacatttacatagaagcatggtgcttgggatatgcgctaaattttcttgctggagcgttaaatttttcaagcattgatgattcggcaaaattttttggagacttcataggcgcctccgagaatggagccgttttaaaaatttctttcagcggtgtcttcgcatttttcatattttcatttgcccttaatttctggctaatacataggggcgtatcgcgcggaatagaatttttctgtaaatacgccatgccgactcttataattatcgccttggtaatagtcgtaagaatgatgacgctttcggacgtttcgcccgaacatcccgaacgcacgataaaccagggactgggatttatgtggaatcccgtaaaaatagtgcaagaacggcgtgattcttctggagaatggattttcgaaaaacagttagttggcaatattgaaatagcaagagccgaaaaagaaattgctgccagcaaaacatcttccggagaacctgaaatacgcctacgaaaaatatcggttttcgagcaattgatgaatcctacaatatggatagctgccgcaggccaggttttttttagcttaaccgtagggtttggcgccataatgacatacgccagctacttgcgccgccgtgatgacatagttttaagcgcactttcgtcgtgcagtgcaaacgaattctgcgaagtctgtctcggaggactaataacagttccagccgcagttgcatttttgggaataagcggcgcaataggagcaggcttaagcctttttgaccttggattcaaggttttgccgatgtttttcacatctatgccattgggcgagttatttggatttttatttttcttcctgctatttttagctgcggtgactagttcgctttcaatgttgcagccaagcatggcgtttatagaggaagcaatgcgaataaaaaggaatttctccaccctgctccttggggtaataacattttttgtttccggtttcgtagtatacttctcaaaagacttaaaagcgatggataccttcgatttttggatgggacaagtggctatttatgtatttgcgatggtgcagattattatgtttgcctggtacttcggaataaagcgcggaataaggcttgcaaacgagggttccgaaataaagttgccccgtttttacggttttattttaaaatacataacccccagcgcactgctgttagtattcgcgttttggttggcttacgacgttttcggtatattgggagacggcaagatatcgccatatatattggatttaactgggggagaaggacgcgagcccaacatggttgcaagaatttgtataactataatgataatggtctacggattttttgctgcgatactttattattcaaaccgctatgacagacttgagaggataaagaaatgacacttgggggatggataacatttgcgatatcagcaggtggatttacatgtttttttgcatggtgcatgtataaagtatgcgcaggcggcaaagggatccatagccataaagatgacgaaaacttaaccgacagcctggaataaaaaagggaaaaaaatagattgaccgaaaagtaaaaagcgcctacttttggcaccttaaaaaacaaggagagatgacagagtggccgattgtgcctgactcgaaatcaggtgtgcgggaaaccgtaccgggggttcaaatccctctctctccgcgtttataactttcacactgcaagggtgttagacggttttatttaaaaagctgcaatgcgctaaaaatgggcgattgcggcttttttattgtctaacaccattgcagcaaaaaatgcccatttttttgaattttaaacccaagcttttttctaaaaaaggccgatcttgggaaaatgcgttagacaatttccggcaatttttgcgcttaaaaagcctttatttttagcctcaaaacaggcttaaaaagtgccctgaaaaacatcgctttttacccgtcttttcgatcattttttaaatgggtgttataaatcaccctctatctatgccaaatagcgccaattcgactcaaatagcctcttattttgaaagaaaacggcgaagggagagttgctattctttttgtataaacttttgagattgcgtctgtgacttgcgggcattctgcttttatcgcaatttcgtacggcacaaagtctccgctttcaaggcactttgcaagtatcctatgcaattcaaggtgtttttcctgcgagcatcttaacctgagcgtccccctcccataccttcccaaaaccgggaataaatccaaaaaatatacatggtgggtgtgatagtttttagcgcccaggctaattttatcaagtgccgtagtcccgtgaggtaaaagcaaccttttattaatttcgcattcaagaagaactttcttttagataatcgtccaagggattgttttcagggtttatatgcgtcctaaaagttccttacattatgagaaacttaaaatttcattaaaacacaattttcaaggattacatatccaaaaaactttatttatttcattcgaaaatgcaatatcagcaagctttgaatctctacctaaaatataatcgacttgtctccaaaatgcttgtctatggttgcggattttcaaatgcgccaattcgtgtgctatcagataatcttgatgagcttcaccgattagaattgactgccacttgaacgccaactccaccggataagagtgtttgcaataagcgctgcatcgatacccatattttataatgtgtaattttaccttagcttttaacatacgccttcgcgcaatggcaattagttttgcttttaaatgttcatgtgccaattttagcagaagtgagtgcgcctgggttaaattgcgagaataaaaaacaagctcaccagcaaaaaaattcttttcgtaatttacctctatatcattcttgcaaaatttgattttaaaagttcttccaaaaacaaaaatttcagtcctattataaaataagaaaaataggcttaaaaaattataacactgttttcttatccacgaacgaattttccggagctccgcagcttttacatcgtaaggagtattctgacatttccgccaaagcattaaaaaatcgggctctaaataaagcgttttctcaagccacggaaaatctttgagcgcacttgtgaactcggaaatttcccgtggttttttgaaaaacgcaatcgcttcttggaattggctatgcaacatcgtctaaatctatgtaatctacaaaatcacgccgtctactaaggaatgcactagcgtctcttgaaagttcccgttcacttaaaattttgtgtgtgttgatttcgtgcgaagaaatataggtcagtaaattgtataagtcccatactctagtgggagttataatttttccaaatatttcttcatggccgaagtcaaatccaccgttttgcgatctgcatccaccgagaagtttacttgatgaatataacagtctatcttttatttcagagaagccagtcaattcatacgctttgtctttatcgttaatatgtttgcgcagtaaattagtagccgcataaacctcctggatagaagcttgagaatccattgcttctatgcactttttaatatatctattttttctagagtttagaagctccgttgagatgtttaagcaatcagagagcttatttttatatgtccatattggagttctctctagcgacattgcgccatttgcgcaaaccaatcgtacatattcttcatctagggtaagtttgttgaaatcccatgtaaaaattaagttagacatatttagttcttcgcccttgaatttcacaatttcaggattcttattttttaaatgtatagaaatttcataaggattgtttgatatacttgtaatatcatcaattttatatttatttctatcgcaaaagtgttcaactgcttcaaataaagttatcggaggaataaattcttctgttgctttttggcaccgtacgattctcccattatcatcagcgaacaacaaaacgcttttatccatactttttgagagcaaaaaatttctcatcgaaataagttctcgaggactgccatttttcaatatggtttttttctgagtggcagaaaggcctataagtccatctaattgcatttgaacatagctatccatgacgatatcacagttatttatcgtataaacgtcttccccaatatgcgatatctctcctaatctaaaccgcttaacaggatagtttctgtttaatattttatttttttctatttgatattctttattttccattttctacctctctattcacttttttatcgaattcgtccgcaaaatttctgatggcgttacctacatttttttgcatttgctttatgtgtttgtcgtcttcaaacctctcggcgtcatagaatacattcccgccctgctccaagctgtagtagaggcgtactccgacatctccacgcctatgttttgaaaaaaccacatagcggtctgaatatatattttttgcgttttcaagcctcaattccatcatcgcggttatcatatgctttaagcggttcgagccaacaaacgctccgcttttggtgacttgttgaatcgtcaaaaacgtggtatgaacgcctcttgaattttcagctttattctggcgttttattatagaaagtatgcgactttccgcctctttcatttttatatcctcttcttctttgattatactttgcagctcataaaaggaatctattgccacaatgtcccagccctcgctcaatacgctataaactttatcccaattgtgtgtatttatagagcaatcgctttctacaaatagtatatttatatgttggaattctggatatcgacttacgtaaattgctaaatcaatttcattcatttcagcacttacaaaaagaatttttagttctggattttctttttgcaagtttgcaagcaggtctaatatgattgtagttttgcctactcctgggtctccaattaccatatagtttaccccacaaggcaatccataactgctcgataatacccaatccaacgcactaccagataaaaaatttttaaataaagatgcatcgaattttatatcgcacatccttactacttcatcaaacttacccatgtttattccttttaagacctattctacaaggctatcgcgacaaaatatgacataggactttctagtcttaaaaaaaaaccttagattatccatcttaggcttcattagtgtaaaaaaaacgtttctgaatactccatctatgaagctatattagtaaccgtaacagtagcttttcgcatatcatagggaaaagttgtattagctgcatataatttctccggaactttccagtaaggcgcttactttatctatcaattccctatatgaatatatcttaacaacacaatttgataaagttttatttaaaactgccttgcaggtagttcagactttgtccatgcagtcgtgaatataagcgccagttgcgggctgacatggggtagaagcggaattttagtccttaaaactatttgcaagttttatcacagaatatttctattgcaggcacatccacacgaggcagcacattttcaagccaatttaggaaagaaagatacactgttaccaagtgaaaaataaatttattttcacactgtttttagacagttctgattctcgagttatctttattgtcagttctataccaaattttgatttagtcttgcgccttatcttatgggatttgtatattcttcatattatgccctgcacacgaaacgcttaagagggatacttgcaataagtcacgtctcatacattttcttgcaaatttgataggtttacattttgagtttattcgataatttttgtctcgcctacatcataatacaattagaattctctctttttttctaacgcgccaagcaattgttcgttatactttggttctgtatttttagatatattggagactaaaatatctatatcttcatcgctaatgaaataagactgggctctagtaggagcgtcgttcgaattcggaggcattaagtaaagcatatctccgaaacccgccaaatattctgcatctggaaaatttaaaattaaacggctttcctttggagaagttactttaaaagcgattctactcggaaaattactaatcataagttcgcttaagacatcgtgagtaggacgatttgttgctacaattaaatgaattcccgcgcttttgccgagttgagccaagcgcactaaaagtatctcaatcttgcgtggattgatcatcataagatccgcgagttcgtcaatgatacacactataatcggtaagctttctcctgcgatttcgccgtttttaatctttttgttaaatcccccaatattaatgacgttctgttcttcgaattcttgaaaacggttcttcatttcattcaccagccaatcaagcgccctaataacatcattcacattatggattaccggcgccaacatatgtggcatattattataaacttgtaattccataaccttaggatcgatcatgacaaaacgaacctcttctggcgaataccttgatatgagagaataaatcatggaattaacccaaacactttttcctgcacctgtacgtccgccaataagtaagtgagacatacgatataaatctacgacaatcacttctccccctattttttcaccgattaaaattggaacttttgcctcactttccttatattcgggagattgcaatgcgtcctttaaataaataagttttctgacgctaggacgatttggcatttccaagtaaataatattatttgatacctttatcacgcgaactttcccaccaaaatccttccccaattcaaaagttaagcccgcggatatatcaaccgcattcaagccaccatgtggattatcaatgattttaacaagacaacgcgaaataagagctccatattcccaatcacttatttcaaccttataatgtctcaaggttaatgtcgcggaaagcttcgcgctcaattctttaaaataagtgacgtatgaatctgattcttttgtgtgtgtactcataatattattctttctttaatttgtttttataaaaaatttgtaatctcttcctttaaataaagtaatgtttttgttatttagatgatggttaaatgtatgattctttttcgcattcttcgggcgtctgatattttataatcagatttcaatatgctcgaaacaccgatattttctaataaatttcattggtagaacaatatcgtcaacattatgcttcatcattctgaaaaacatacatttgctcttcatataaatactataatcttctattctaataataaaatctgcgtaatcttctattgtagggcactccataaccaacaaattacgatctacttgcgccgtaattattactggtacttcaagttctatagccagtatttttagtttttttaaaatatctttagtttctaattcacgtgtttcaaactctttgcctcctctgaggagttgtaaataatctacagctattaaatccaactttttatttttggagcgcaatttttcatttagttttcgcgctttttcgtttatttcgtctacgctaaaattgcaagtatgatcaatatagatgtttgattttttaaattcttctgcgacgtagtttctttttgccaaacttcctttaagtatattattgtcatccagtagctcttttgacccaacttcttttgagcgcgagcgaatcatttccgcaagcatcgcctcactcttcaattctaaagaaaacaacaatacattcttcttttgatttttaaaaaataaagcgtcctctattatattcgttataaaagaagtttttcccactccagggcgaccgcctactatggtcaattcacctttataaaagccgtgtattttttctatatatttaaatcgtgtttttattgtgtttgttcttttcatattttacctatctattgctcttatgaaacttttaaagtttgttggtttttcttcggcaatgcttcgtaaactcggctgacatttccgctcaaattcttggactgattatgagtgattttatctgatatatacacggctttcatatttgtgatcgctctaaattttctaagggttatttttcaaacgccacaaatatataagaaaagcgcggcaatatatgtcgtgatttgcaataaaacttatcttctaaaactctttgattctcgaaatcctacatagtctttccggatcggcaatgaagagcgggcgagccgcagattgggatcgcttaggttgaaatattttgcaataaaatgcgggttgtggaaatctcggtgcgccactcaattggagtaaattgattggcataataaatctcatacccatcaaatcaacaaatctcaatcaaacttaaatagaacttattttgcggcgtttaatccggactaaataccaggcgtaacgcaccagttttcaaatatgtgcaatgattgcatcattcggcaaaaccattctacgttcaaagtataaaacctctttattatttgtaaaacgtatagaatgctcgaaaattcctttataaaaaatatctgcagcgcgacatgctggaaattaagcggtctatatttgtcatgactggaataaagacgtttaaaaatttaagagtgagacttattttgccgcagaagttagtacatttgttacatctatagagaacaatctctacaagataccataaagagaagtcgaaatatgttttacatactaaaatgtttttagcaaaacaacacatcggaaacagagaaattcagcaagattgctatttttgcacgcaaaacgaacactatggctttgccctagtcgcggacggccttggcggaataccgggaggtgacgtggcgagcaagacaatagcaaacgtaagtcaggaaattttaagcgggcaaattgtatccgcatgcaacgcgagtttcgtacttaaaaatattttcagaactgcgcattttaggataaaagatttaagagcaaaaggcgccatagcgggacattcgactttcgccgccctattatgtttggaaggaattgcgtatgttttacattgcggagattcgcgcgtttatcattttagaggtaaaaaattgttattcgctacaaaagaccactcgcttgcggaaagactaaagcatattaaaaaaacaggcaccgattttcccaacgcccccgcaaaaaacatactatacagatgccttggagatgacaacttggcccgcggcgaattgacctcttttagattcgcttcgaaagattggtttttaatatgcagtgatggatttaggggaaatatagcggaagagaaacttcacttgctctatgataaaacaaatttgactgctgaaaaattatttaatgaggctctgtcaaacggcgcccccgactgcgacaacataacattcatagctttatacccaaatgaatgataataagcgtaaactatatgctagaatcgaaaaactgttaaggcttgcaggcgataatagaacaaacgcacacgaagcaaatcttgcgagaaatatcgctctaaatctgctcagaaaaaacggcatcacattaagtacagacgaaaacgaaaccaccgaaaacgaacttatattgcgccaaaagtgggtatcaaacctaataaaatacccgaaacttgccgacatatgccctgtgtgggataaatttggaacttgggactgggcctatattttggaaaagcagcctcagtttgcagaacgttgcccgtgttttaataaattcgaccacaatcaatggagatttcttatagtttctcaagtatctttggctacatattgcaaaacatggggcgccttcgacgaacgagattggacgcgaatattacgcgcgcatccggaattatttcgctataagaatccatctttggagtaactcgacgcactaagtttttgtgcaacatatcagacttattttaattcgaaatgttatcgatcccccgattcataatatatgtttacgatttttcttccatttcatcaataggacaaaaaaaatttaaacactcactacaaaagcagattcatagattgatagtgcgcatatctcaaaatctctttttcaagacatattatgtcgtagtcggatgtttcaatttgggaatggaagcaacagttgagaaaatagaaaaattatttgaccgtttcaatgtttgggacttgttaggagaaaattatttggcaatgctcctcgcggatcgccccgaatatgcaaagcagaaacaattaaaaataaaaagtgttgcatataatccattgatagtaatggagtccaataaacatatttatttaaaaaaactcgaaaacgagaaaaggatgggcaactttccgtttaccgacgagtataagaggagactcgaagtggataattatccggaagccctttacatatataaatatatagacgggatattgttgtttacttcgagggaatggatgataatactatcaagagctcccaatttgtttgaattcgcagtaagcaaaggagctttaaatgtcttggatgactattcaaagtcgtttattttgcacaagcaaccatctcttggcgacaggctttgcgataagaataaatttgagttttccacaagccaagcaaaagaaaaaagttctttagaaatcgaatttgagaaaaagctcacagatgaaagacaaagagcgatagaggatataaacacaaaaatcttaaacaatgaaaaatccctaatacaaataacgccaagaatgtggactttggcgattgaaaacaacccgaccatatccgaatattgtgaaaaatattcaaacgcaaatggggataaaaaaacagggtattaggcctttgaccgcgaaaattggctaaaagtgctgctgcgacataaagaaatgagcaaaatcgccgtaaaatacaaagcctttaagttgtttaattcgggagattggtgtactttactatgtgaagattttgattttttctatccgattgcggaagagtacggcgcattgcagaaattttatgagaacgattggtatatgctcattaggcgtttcatataaaaatattccgatttatacgacatattttgtcgcattatttccgtaacatgtttttatttcaaacaaataggagaaaatcatgcctaggcaaaacaacaacaattctctcgcccgccaatgggaactactaaggattataccctcgcgaaggccggggattacatcattggaattgacgaaacaaatcgccgataaaggctatgtagttacaaagcggacagttgagcgtgacttgcgcgacctatcaacattgttcccgctaatggccgacgaagattccgcgccatttcgctggtattggcttaaggacatttcaagcgagtttggtggaatcgaagtcgccgacgcggtgtctcttgcgctcgccgagaatgtattgaaatcaatattgcccgtgccaatggtcaaaatgctaaattcaaagttcgagcttgcgcgcaaaaagcttgcagccttggaggcgttgcccatatctaaatggagttcaaaagttagatatattcccgaatcattgagtttcaaaccggtaaacatacgcgaagatattcttgagaaaattcaaagcgcgctagtagaatgccttcaaatagaggtaaaatacgatccgcttgggaaagcgtcaaagacttacattttaaacccttttgcgatggttcagcgcggcgtacgcacatatttaatagcgagcaactctgaatatggcgaagcgccaatgcaatatgccgtccaacgtttccgttccgtagaaattctagaaagcaagtccgatattccaaaggactttaatctagaaaattatatagcaagtggagccatggattttggttcagggagaattataaagctagaagccgcggtttctgatacgctcgcaagctatctaaatgaggcggctatttccgacgaccagaaaataagctataaaaacggcaaatggcagcttactgccagggtccgcgactcttggcaactttggttttggatacgctctcaaggcagcgacatcgttgtccaaaagccgaaaatcttaaggaatgagataattcaaagcttaaaggaaactcttaaaggctatgaataatttaagaaattttgcggcaatagattttgagacggccaatcacgagcgctgcagcgtatgcagtgtcggtattgcgatagttaaggatttaaaaatcaccgatacattttatagcctaataaaacccaatccggaatattatttatggcgttttagcgaaattcacggattgactttgaatgacacttcaaatgcgccgatttttccggaagtctgggctgaggtatcgcggagaatcgaagggttgccgcttgtcgcacataacgccgcgtttgatgaaagttgcctgatttccgcgcacaaatcatactccatggaatatcccaactataacttttattgtacctacagagagtgcagaaaatattttagaaaccttccccagaatctcaggccgaaaagcgtttcgctggattgtgtctcaagctttctggatatcgaattaaagcaccaccacaatgcgttgaacgacgctgtagcgtgcgcgggaatagccatcgccatataagctggtttgcgatttttaattttcccataatacaaattgaaaattttatcatttaaataacagcctaattatgaaaagaacattgattactctattacttcttgcaaacttccttgtgggatattgcgaaaatttgagctctctcacgtcaggggaaacgccgcctccaaaccaaaggaaatacgaacttattgctgatatagacgtatttcagtttaagggcgaaaaattgacgcccgcgcaacaaacaataaataaggtattaaaagatataaagacaaacatattaaaggattattacaacgaagttgaatacttttttgacgaagacctttcagaaattaaaaattataaaagcgaagtttctgtaaaatccagtgtaattcagaacaatgctaaaatattttcatgcgagattgaaacctaccaatatcaccacggggccaacggttgccattccaatgttatagggattaactatttaatcgacggagataaaattaaaaaactggaatttgccgatttgtttgagagtaaaaatgaatgcgcggagtttttgaaaaaagctcttgatgaattgagattgaaaacaaaatataaatctattggctccaaagagctttcaggagatgaattgaacgagatattaaatgtcatccagttttcaatcaagaaagacactgtaaaaataatattccccccctacactatcgcatgcggcgcgtgcggagtgttgtccatagaactaacgttccccaagaacgtcaaatatggcaccattaacttagaaactatgcccgataaatccccgactaaattatgaaagatatatttatgttggcggtggcggcatgctcgctaatttttgatatttttgacattccgtcatcgtcggaatatgaggaggactcgtatatggaaaatatagaaaaaaacgcctctttttatcctaaagaacatgtgaatttgctaaaatcaaatccaatacactacgaaaaatacaaagacgaactcgaggaaaacgaaagaaaaaaggcggagtgaaaactccgcctttgctgttaactttctttttttgcatccaaatatgatccgttgagtgcgcctatgtcttttagatctaccccatagattctaataaatgcatcgcgcaccaaactaaggccgctcgatgtcaatggatgggcggtagaaactacttgcacgctcatcccgcgttccaaacggattccatttaagcatccgctatttttgactgtaattctccataatgacatatataatttccctttctgtttaatttattttgagaggcgtattttaaggcacttgtgcgacattttgagacttccaagaaattttaattcaaaaaatcgtcttttggccaaatcgaccaaataaaagcgcataaccaagccaatcccgtcaacccaaaaatattcagtagaagaatgagccacctataagtgtgcttgcgcttaaatgctataaataccggcagaaaaaacagaaatatagagagtgcaaaaaataggaatataataaattcgcccattgccacatgattacaaaaaagcgcgacaaaacctgtcgcactttaaggagtttatttaattattgtcctaaggtagagtgcattttgcaccgcaatttgcattgtagggataagctatgcgtccgccgctaacagcgatccttcttaaggtgtatagaaatgtatgggagtaatattattcaaaatagagtacctgttaattgtttatatactttcgcgatttcctcaatcagttgttccagcttttcatggtcttcgaaatatagtaatgcaaaatcgccattgtaattgaagtcgcaatatttccaaatccaaccgtttccatccttccaaccgtccggtttaggcaattgaagttgttctttaccctcgttccaaattcctataaatagctttcctttcaagtttccttcaaaaacgcatcgcaaggatacgttttcatacttagtagactgaaaaattaagccttcctcggtttcatttcctgcaatggaattatttatattttccttttctatgttatatttcttttctaacccagattttatcttctcgaaaatttccttaattaaaccagcccttatattattataagcgttatagcattctgtaagagcgttgtaatgttctttatccttttttatgtagtctcttatttcattcatagccatgccttctggtttatttgttaattctctgattatttggatgtattgttctataacttctcttatgcgcggcaaagatacagcctctttttgggcattagcaagccaatctaagatgtcattagaatatgttatatgtttgtataatttaatgtcttcaaccgtttttactccttggggtttaagaaactttatttctctttgtgagattccaattccgggagaataatcttcattgcagtgactatcattatcaaattcatttgccaatgtaaggtatagcaacttcttatttttggttttactagtttcttttaaatattttatatatcttcctaactgttcctcttgcaattcagcgtatattttgttttcaatgagaatagtccagtccttgccgtccgttataaaaatatcgaatctcccatatccttgcacatatttttcaacttcaatagacgcgcttgcataattaaaatcttctatgcctatttttctcatgaataactcaagaaagatgtttccttgatagtgagatccacatgggtctaacaaatttgaaataaatctggaatgtgtggaaacctccatatgggaaattccaagtatattaaagatattgaaatcttccgcggtgattttctttcttttactttcaaattttataactccttgcaagtgttcaagcagttttatctgttcattctccattttcatctcctctatttattatttattcgttgccaaaataggcgtcggggtcgtatccatcgtctaactgctcccagtaatcctccgaaaaatttttgtgatccatatctataataatatcttctatgctttcggcaaaatccgggcactcccccatcagttcttcgatatccgatatggtaaaccctttgcttcttaaatcgaccatactatggatttcgtaggcttcgtcgggatgcgcaagcagatattcccggagtttccgcttgctcatattgcaaatcatttctggatctaacataacacaacatctatatttaaggtgtacttattttactattataactagacacatcatgtcaacctaaactttcatagtcggaagtatatcgcatgctactacgcttaaaaataagcggaattgatacaccgctgttttcgggaagatttactatgtctaagcgtattttatagttgcattccacttggttgcatttcacttcaaacaaatcgggagtaggaatttccttataaccaagcaacgcaacggtatctgcgtatttttttatttcgcttgcgcatattaggttatcgacttttggttcgtaaaaattttttctattcagcttcgcaagcagaattatcgggacttccaactcttccgagagagcctttagcgatgccattgcttcccttacctgatatacccattccaaagatttgcaggaaggctcaatgttttcaaggtaatctataagtataacgttaagaggtctttcatcactttgttttaagattatattgtttacggtgcgggtagttgcacatatatctttaaccgagtgcgcgccgtcgcgtatcagcagaggaagtttttctatagactgccttgctttcttaaacttaaccgcttctgcgccgactaagttttcaggtttaaatttccagaccgcgatttcgctcatggaacgcgccattaagtccagtacccatttagaagatttttctagggaaaatataagtgcggacattgaaggattattaagcaacgccgactcaataagatttagcgcaaatgttgactttcccgttccgggagctcccgcgagcacagtaattccttttcgaggcagtaaattaaaaatatatctgaggtcattccccgcagacaaagactcagaatccataatttgacttttgctattcatagagaaaattttattttcttttaactttaactcaataacaggacaaaatatgtcgcagagtgtaatgcgcaatgcgaagtcgtattatgtcgcagatttgcggacaatgtttggagtcaaatttttgataagagaaaaatcatgaatacagatttaaacgagttggaaaaaatatctaccgacgcttggattgcgatattaaagcaacacccggattatgcgaaagaatgtaatcagataaacgcatggtcaagatttacgcataaacagtggcttgaacttcttctcgcacagccgcaatttgaaggcaaatgcgaatgcttcaatgatttttctttctctctgctgcaaatcttatcggataaacacccgcaattcaaaaaatacatgctcaaagcccgcgttatgaagagaagcgttaaagcatggcggaatctacttttaaagaatccaaaatttgagcagatagcgtggcattgccccaaagggatagttgcgctcttatcattgaaacccgaacttgccaaattctacgattggaatatagattttttaaatgttgagtggacccaacttcttatgagccagccgcagtttgcggacaaatgcccatattttagagactttgacgcctttttaaattggttgccacttttgaagcgtcaaccctgcctgcgcggtatcgccgaaagatacagagaaggaaggatagcaatgcttgctgtttttcccgattatgttgaagcatattcagattgggatgaaatttttgattatgacaaatataaacttatcgaactgcgcccaaaattaattgaaaagttttcaactcttgacgacataaaaatgttcgcttgggaaggaattattataaaaaatccaagccttgtcgagagtgcaaaaaaatgcgcaaacggattagccgtacttttaaccataaattccgcaaataaaaaatttgtcaaagattggagtgtattttcaacacataattgggcaaaaatcctatcggagaatccaaagtattcaaaaaattttgaatctgtacgcaaatggaatgaactcaccgaggatgattggtttagactcctaatttcccagccgcaatttgcggtgaagtgcgacaagtttggcgaattgaataaacggaaaaaactcttattgcgagagcaaccgatattaaaaaaatattttccggaattgaatctctttcccgaaaagaaagaaatgcgaataacccgttttatttaatattgaaactatgaaaaaaaagcgtaattttgcaatttccggaaaatgttatcgcccttttgaaatagcgggcgtaagaggatgcctcgtgtgcgcccattataccggagcgcgggaacttattcaatgtaagcgttggatcaaagaactccaagagggtacttgcaaatttaacgaaaacaggcatgcttgccggagatttgagcttatggaggaattaaaaaacaaaaatatgacgattcttgaaaaggtttacgcgcgcagatttactgcgtcatacttaggagaggccataaaaaaatattataacgatccgaatgcaaagtttaattatgacaatatttctgcggaaaaactcgccaaaattatcgtatggtatcaaaagaaccgcggctcaaataatcggaaattacccgattcataacagacgacacatggggattggggatgggggcaaattcaaatccatgctttatattttcctcccagtcttcaagattctttactaatattttattgataaaattgtttaaattgattgatacagcagaacttctcgatattccggcggtgcagtggacgagcaattccttgccgtccctcgacgcgtttatcgcgaaatttaaaatatcgcgcgccatcctttcattaaaaataagcgaatcgtagattccgtcgacgggaattgcgtcgtcgaaatataaaattagcgatttttggcgatcatcgccaaaattgaagggctcaaatccaaaatcatttatgctaataacgcgcaaagagtcatttttacgtatatcattgatgtgtttcttgacaaatttttttgaacagttccaaatattcacgatccacctcctcagaatgaaacaagaaatcttttaatcgcaaatacatttcttaaagttatacactcaatattattgatatgattgacaactccatgcacaaatccgctttttaacggcttaaggccataaccaacatgcggctatgaccttagcccaaatgcttataagtaatataacttcctaaaaacacgcgtggcatgcagtatcctattaaaagaaattgcaattctgacaagccccttgcatgtttttaaatttgcttattgcgcatgtctgcaaactgcggctgaaattttaataacgagctccaatcctcagcggaaaacttttcccatttatcgcatttgtccgcaaactgtggccgatcgattaacaagttacaccaattataaacggtaaacctttcccatttatcgcatttgtccgcaaactgcggctgaaattttaacaacgagctccaatcctcagcggaaaacttttcccatttatcgcaatctcgagcaagttcaggtttctgcgtcaatatggctgcccatcctgatggatattgctttgctttttcttcaaactgcggctgatctaacaacttgtaccaattccaaacgttaaactcttcccacttatcgcaatctcgagcaagttcaggcgcatgcgtcaatatggcttcccatcctgatggatattgctttgctttttctgcaaactgcggcttatcaaacaactcgtaccaatcccaagcggaaaactcttcccacttgtcgcatttatctgcaaactgaggccgagattctaataaccagctccaatccacgggggaaaactcttcccatttatcgcaatctcgagcaagttcaggctcatgcgtcaatattgcagcccatcctgacggatattgctttgccttttctgcaaactgcggccgtttatataacaaccagctccaacttataggataaatcctattccataatgaatattcgtcaaattttgaagcaatgcttggatcttttttaagtagttcaactaattttgccgaattcaaaccttctaaaacttttcttttcatacaatacaatctcctttcctcttatcagtattttatgtttgtcttcatcaaaataaacgttagacatattcttgcaattaagaactttatttttcataaatttctttgcgcgaaaatatcatactcgcacgacagaataagtcgtaagctcgattttttaataaaataatcccaagattcgccaaaccacatagaaaacagctctgctgttttctatttcttccccttgccattttttgtatattttgaccatattaatagtgtaatgtgctttggttaagcgcaaaaccctattttacctttcttgggcgatagatcttttttaaactttaattcccgttttagcatttcaataaaatctctttcttcatactggatattatcatcaaactgaatttgttgatacacgtttttaaagtcgccagccgttagattatttaggccctccagttccttgatagtttctgctgccatttcattttctggatttaaaaagtaacttttaaacagcttctttctggcctctaaattaaggtaggtaaaagttattttcttttgaaatcttcgcatagcggcggaatctatactttcaataatgtttgtagaacatataaatatccccctgtagttctccatttggataagtatttcattcgtctgagacacctcccagcttcttacagaactttgcctgtcaacgaatagcgagtcggcctcgtctatcaccagtatggcgtcctcgcgttctgcgtcattaaaagcgtttgctatgtttttctctgtctcaccgacaaatgccgactgcaggtccgacatattttttaatattatttttttgtctaagacttgcgcgatatgtttcgcaagctccgtctttccgcttcccgacaccccctcaaatatcagattcataggacaatttgccgatttttctttaagcttattgtcgtaactttttaatacatatatgagcttttcatatggtatatccatattgataattgagggatcgaaatgtgtatcaggtttatatctgcgaacatttttaggcacgctgccgtttaataaagtgctctgcgcttttgctatgtcatctattatttccaacaattctccactttgtggcgcctgggcagcaatgtaggccaaatttaccgcagatagaatcccggcggtaggcaatgaatacttctgaagcctattatacaaatcttccgcatttattgcgcgcggaatcccggacgagtttaatagttctttcaaagaggttattttttgatttctggataggccgttaaactctacgctgtatgtaaaccgccgtaaaatagatttatctataaaatttatagagttcgttatccaaatgcttttcccttccatttggtcaaatatactatttatgcattctttatcgatgccgcttttttttcggaacgagtaatctgtcgagattatatcatcgcactcatctatgagtgcaactcttcccttcttatgcgatacgtactctgccattgaacatctataaaacctctcttcttgattgcattcgttgggaaagatcggggtcgcgatactattgccacttgcctttattattgactttgcgaactcggttttccctgatccaggttcaccgtatagcagaatctttacaggtttatctaattttaatagtcttaagattatatttttagatacatctgaaacattgaatgtttctatgttgtataagttatctgtttcaagatcttcctttatgattttcgttacaaaactctcatctaaaccaattatatattcttttatctcttttaaaacaagattcttattgtctaagatttgtagtgattttagctttgataaactcaataattcgtctataactattttacttgacgtatcaaccattccggaaatagcctttcggcgctctaattcgtcgagctccctaatataattctgcaacattttggattccgagattattattgaaactaaaattatgcggagttgtatatcgtttagggagaagaacgattttatatcactgtttcttttgctgagcagattaatagacgatagattaaaataatctacgagttcttgtaagacttttgtttttagagcttcagtcaaatcactctcgatttctttaataggcacgtttgccataaaggatatatcatagaagaaatctcgccagacgccattatatttatttactatcttcttaattgttttcttttttatttttttatttaaaagaaaatttttgataatctttttgacttcctcgggaaaggactttccagaatagccgtagtaacaagagatcatatctaaaaatttctcattcagaataaaatctccgcttcttatcaaattcgatacaaaaaaagttgaaattctttttgcatcgaacttgtcaggggattctccaatgtcttctaaattatttgtattcatattttttatccacgtgcaaaaatataatacaaatatgcgacataatatgtcgctgccatgtattactccggagatgctaatacgatatccaaatatccagccttaaattataaacccgcaataagtacaatatataaatagtattgccataaagcaggcaaatattcgactatccaacaaatcagccttgattataagtattgatacttgcaaataaaattttagaattggactaataattattgttgggcatattgctaatcacattataaaataagacaaaagtgttagacagaaaattgcgaatttggagatgtccgttgagcgtctatgttagtaaaatttttggaacaaaatgcgccttttttaaaaaattcaaaaaaattctttaatgtgcaataagatggatgccctacagacccgtttcttcttgcgaatggattttttgaaatgtcgcgcaagacactttttctctattgatggattccctgcaatattacgcattagaattaggttaactgaaacatcatttcaacacccatttatttctcatgcctgccggatggacttcttgtacaactacccacagatcttgagccgcaccacacgcatttgtcttgaccgtgcccatgcttatgaaccttgtatgggcttctagtacaactaccatatgcatggctaccacaatatacgcatttctctgaatcgcctatgtgcacatggatcttgataggacttctagtgcagctgccataggcgctggatccgcaatacttacacttgtccgtttcattttctgcacatagaaccgtagaaaataaaattgatgcaaatataaaagataaatatctcattttaaacttatattttattgtaacgttcatattcgttcattcgcaggtcacgaactaaagatttacgtatgtattccatgtagcttagaggaacgtaaggctgtccggcacgagttgaccctattgagtcaactacaactttcccgctataaatatatattttcaactttgcatgctgggaaccgtttagttgttcgactacaatagggttgccatcgtccaaaacattccaccttctctcccgcaatactttcattaagaccgaatgaatgtctgccttactcgcctgaatatcacctatgacaattttagggcttccattctcaccaaacattaggctattatccgtagtatttgtcgtacaaccgcacataagaagcattaaatacagaaacacgacttgaactattttattttttctcattttcttcaattaatcttattatatcttttgctctttgaatagaccattcgggctgttttgttgactcaagcgtttgattagcccaataaattgctaaatcagcgtcttgcatttcatagaagcatttcgccaaatttgcttttgcatagggagtgtctttatttatagaaattgcttgagcataaaacaatattgcgcaatcccagttaccctcctcctcgtaagttctgccaatcagattgaaaatagtatcggaaactgagtccaccaacgagcacaatccgtattctctaactttggcaaagttcggttgggaacttgaaaactctgcaagggcggcatcagcatatttatttttttttgtagaattctcaaaactaattgatgatttttttccgataatattttgactatcggtatttcactgccagtatcaacgcaaggaatgatagttcccgcagaagcagtcaatggaagctctatatcagatagaaacgcagcacatgatttatatcccctttttgatatttcaccgacaatttttttaaacacactatcaattcccacaaatgcttcagccgctgaaataagcccattatcatctatcttttcaacctgcaaggtaccaaagttttttaatatccacgattctggtactgattttaaaggaagtttctgatagcaggcctcaatcttacttgtctctggaaccaacctaactcctggatatcctaaaattttggcaacttcaaagcgcaacaatctattgtcttccagaccatcaataagacgctttgtgtcattttttaagtcaatagcggggaaattctccatattctcttccgggatttccaaaacacaacacgcacgcccgtcttttaaaacgagagatcttactatcttcgcattttttatagttcctgaaatataatcacaaagaaaattatccctaactttatccgctatggggccaagtttgtcaggcagtgagattttttgactaataacatatcttgcgaattcattctgagcacctaattcagctcttgtcattgcatttttttctgaaatgctgctgttcgaatatattcgcgcataagatacaatataaaaataattacctttatggtgtatttcgccaaatacttggctgctgggattgcccaaaagcattccagcaaccagtataaagaaattagaaatcttcactttctatactctgggttttgtatttactctgatcccctgaaagactttgtgtagatccagacctttgatgagtagaagatctgacggatgagccactctgtttttttgcgttagtgcgccctcccctgttggtagttgcgtcgcgcatttgttctctggatatatttgcagtatcagaagtttttatactccacatccggactacgccacaaattattgagtctgagcgaggatccgttatactccatgaacggatagtagaaataccagaaatcttaagagcgtctgcctgcgtctctattttctttttcatgctatcatctaatgccatctcaactgcattatcgagatactcctttgagttctccatcatttccttctctccggcgtacaccacggtttctcctgcaaagtttcttatgtattggtctgcctccaagacagctttttcataggccatatttttcgaggtagcgcttttacttcttgctttagattgcccgtatgaaaggattactatatttccatcttcatcagatgtcatttgtatccccatggacgaatatagttgcgataacttgagctttttaatccaatcgcgaattggttctccttttctgggcttcaccttcggaacatctcctctcccgttaattgctccagccagaagttttgtgttgtcggaataatacgcaactacaacaatctcaccgtcttgttcgaaaatcttggatgttataagggcccccacttgcgattttgcaatgctttttacaaaattcttataagagctctcattcattaaattctcgataatcggttcggctttttctgattccagcgtcacgccttctttttccagtacattatcaagcttcttgttagccagcgccactgccttatcgattattgtgggggaaattccagcttcagattctgcctctgctttaattctttctgctgactttggctcaatcagcacgtgactggcacgcgtcgatatttcttggctaaaatattttgcaacttctgatttcgcctcgagcatagctttgttgtaggcgtttatacggtaaagctggaaatttttatctgtcggcgccacatctattgtcgataatccaattacaacatatctgccgccggcgttcaatccctcgctccatccttttttggcgatatactcgtctgccgattttctggcgttgccgactgcttctgcaagagaatcaagctctgataagaagctaaggcttccggcatcattgccggaccggtcgctatgaggagctaaaacctccccctggtttccggcggcttgcgcaaacaaatatgctcccgaacatgttgcggcaatcaatgctattgcgattttttttaccatacaatatcctttttgttggacagtttttcttgtttcttttgagtagttttttccttaaatatcctgcacagtatttctttttctttgaatatttccgctactttttcccagtcgcccaatattcgcccgtcgctcgttttaccttttacgcggatgatttccagttcgccgcatttcgtttctttccttccaagcgactcccctgtatacggatcttttataaggtcacccatggcaaacatctcgtatttatcgccctcagacacactttctccgccttggtttaggaccacttcaccgtcctctacggctactccccgcagtgggtatatattgcccatcacctttttcaacgcctcacccgcaaatttattaaaaatttctactatgggagattctatgttcttggataactttacttttgtgtttattatattcgaaaattttatctggctagtagcaacgtctataaacctaatgcttacgctatagcccgcatcgtttacggggactttcaagccagataactccattttgacttcccttttagaatatgttaacgactctacaactccgacaacaatatagtcagcgccaagaacctgacctaacttacacatttcctcgaccggagtatctgcattggcaattgtagatttttcatccaagatttcatccgcatactccctgtctaagacggtgaatttccttgccgcaaccattttatctacaaatgcttgtgtgccaattctggacacatcgtcgccggagacatttacactatccacgccatatttatcttttgccgctttaaatgggaatacagcaattctaagcctatttgcgccggagccttgtttatagcgggcaatttttgcatttacaactgcttctttcaaaccgtcccctacatctgtcaccgatactatctcatacgatgccacaactccctttgtcgcagatgcaacccttttttggagcttttgactagaaaaagattcgttgtctgaaatgctttccactgcgtccaattggctctttgttgagattgcaagcccattagcttgggagacgcactctattattgctgactccaccgcagcgttttcgcttgcaccgcggcccacgccctttgtatccagatactctattttgccagcgccaaccgcaatagtcgcaaagcaggcgcagaaaaaaagaaacaatcgctttcttcacagcaatcctttacctcttaatttatctataatctcctcagcagcatctttggcacagttagcaagtgcatttttcttcgctaaggattggtctgagccaatacccttaattgtaataggccgcaacgaagtcacaatcttgggcaacttgtcttcgatattataaatttttgctgaaacagtagcggatacaactggcttgcccgtagcggcgtggatctccttggcacttagatccacagtgccgacaacaatatattttatggcaatttctggatcttttagctcgcgcataaccttacgccaagttgcaggttttatcgacgttcctttcccatagtcttcctgcattagattaattgattcaaagaatgagccatcggaaatattttccattccttttgaggaaaatacgtctgtaaggaaacctccaaattctcccctgctaatctcatctattctatattcttgaatatcgcttttatttattgtcgaaccgcccgtagtgctaacgtttatttgcgacgatgattcggatgccgaaacggtgccgtcagatgattcagcagaagcggaaccggatttttcgctttgagcttgcgacactttggtgacttttgaatcgaaagatgttgttgacgcaacttccctagctataaaaaacaccgctatattgttttttgccattgcggaattcttgtctccataggaatcgccgatatcgttttttacttttgcatcgtcaactattgcctcgattataacggagtacattctagaagccttgtccattttctctttggcaacattgtatcttattatatatcggtcagggtttgaaaggaactgggctcgcttttcttcaaatagttttctggttgcctcggggagagtatccgcgtaagccaatactgcgtttgatttagctttattaagcgcgtgaactctttcctcttcatcaggcgaagatttgaatatgccgtcagaatattggtaatcccctttgccaatgaccatcgattctgcatacatgaacacgggcaaaaacaaaacaatagatacaagtaaactcttaatcgctttcatattatctgcatttctcaattatttcagaaaatccgctaaatttcgcatctgtcttaagccgttcacctgcagattgcgtaagcattataagcacctctatatattcggcttcaaacggccagtttttctcttcgccagctatatatatggcagagttacccttcccgatagtcttgttgaacacgacttcatcctctatatccctgaccgacaccaagtaagacgccccaaaaaagtaagttcgtattcccctacgctcctccgcgattttcgacagaagcttcctaagtgatatatcgattttataagtggatcgcggtgcttgcaacaacagctgatttgttaatttatccgactctatatatccgtctgccataacataaaatatttcagaaccatcgtaagaataggggataacaggaattttaaaatttttgtagatatatgcgttgaacaagctggcaataaattccttggcttcatcctcgcggaaccccattttcagcacattatcgatagtttctggcaatatattaacctttgatacccctatcgatgatgaatgcacgcgtctggatttatattcgatattgtttcaatgaagaaatcgaatatattcaaattttgagaattcacaatgaaggcatcggctccatatattctctcaaagatagctcttatgtgggcctcatcggggcgattatcgcatatttctgaatatgatattataaacggatgcgaagctaaaatagattttgtcttgaagtcaaaaaacattacttccgcgacaataaatatttccagtttgaatttttcgaaccctgacagttttgaaatataatatttctcgaagtctacaacaa

SEQ ID NO: 135 - DNA, 13252 bp, Unknown
  16S sequences of unknown bacteria
ctcggcgacattgattattatatcagcttatcccctccctgtcaacaccttttttgaatttatttcgcacttttttcaaaaacctgcataaacggcttcatatcgcggaaaataagctatgaacaaatcccttttaccgctataaaggaggtcaaatccatgaaaaagcattccaaaccctctccccagcccgaacattgtgaagggaatctcacccgtcccggaactgcctcccagctccatggcgcctatgagttccaggctatcacccccaaccacaaggacgggcgcactgccccggatggcagcattcccctggatcaggtgatcgaagccaaggagttcgttgaggagaaccagaagtaaccccatttgacgcaaataaaaaagctgtgtcagagatgacacagcttttgttttttattcctgctctgcgggagtctggttgacagggtcaaaccggctgctctgcgccttcagacgctccacagccttgccggcccacttgccgcggcggaaccgcagcagacagatcaggccacggaaattgagatccaggcacatggcaatccagatgccggtcagccccatacccattaccacagagaggatataggacagcggaatgcggatgccccacatgcagccggcagccatatagaatgcccacttggaatcgccggcgccacggaacgaacccgaggacacagtggatgtagccagcatgggctgggcaaaggcctcgatcatcaggacgctggctcccagcgcaatcacttccatatcgctggagaaaatgcccatcagctgcttggggaacaggaacagcaccagcccgccgaacagcgcaatggcaatggcgaccttgatacaggtcttgccgtacatctgcgccttatggatgtcaccggcgcccaccgactgcccgaccagggtggtagcagcataggcaatgccttcgcccggcagataggagatggactcagcggtattggcgaggtggtgtgctgccagcggaagagtgcccagtccggtaaccagacgggtggaaaccacctgaccagaagccacgattgcgcgctcaaacgcaaccggggtaccgataccgatcatgcgcaggatgatgttcttctgcgggtgcaggcaggtgtgcagcggcaccttgagcggattctcccggatcataacggcactgaacatgaacagtcccacaaatgtgttggacacagcagtaccgaaagccgcgccggaaacgccccagcctgcgccccacatggtgaattcatgtccaaacagggacagggtccgggtatcatagataaagaggaaattcagaacacagttgatgaggttgccggagatattcagaatcatgggcgttttcatatcgccaagacttcgcatcgtgggcgaaaataccatcgccaggatggagaaaggtacacccatcagatagatgcgcacataatcctgtgccagcgggatcacttcgggggcgccgcccatccagatcggaatgaacggagcgatcatctgcagcaggattcctgccacaattcccacggaaatacaggtaaataccgctgttcgcactacattccgggctccttcgatgtcattggcgccggctcgctgggcaatctggaccgaaaagcctacgcccatggcgctgagcgtaccgccgatcagccagacacaggaggagttgattcccactgccgctgttgccgacgcacccagtacacctaccatcgctgtatccacataggttacagcggtgaacatgatctgttcaaggatcgccggaagcgaaagccttagcactgtttttaccggcgactcctgccgtccgataatactaatgtttttctcttgcatagttctccctcaacaataaaaattttttcaaatgaaagagtgcggccaaagaccacacccttcaatgcaggtattgagcgctcacaaagcaaatgctgtcaggaacgggtatgatccagaatatcccgtaccgtatcctcatcaccggtgagcatggcaatgattcctctataaagaaatgccgggtcattataaaaatgttcccggatctgatcgcagtcactctctttgggaacaaacagcgtcagactcatcaaatcactgccaatatcagtgatccgcagtgtgatattgtatccatcactgacctgttccaccctgacttcattgtcccgttcgatccgctgccggagataataatcctgcgcagccttcagggttgtttcccggatggctgccggcacatccttttcgaacatggtcgaagtcttgatgcccagatcggtaatataaaaacgctccactccgtcaatttcctttttggaaacaatatgtccggaatgcagcagccggctgatctcctgagagtattcaaaataattggcgatacccttggaacggagaacctcattgatctccgcaaaactcataccccgatggatatggtgcagcagataacagatcaggatcttgatctccagcccttccgtaagaccgcctgggcggacatcagccgtaaatgcgtttctgtccacggcattccctcctccctttccattctatcatacaacatattctgacaaatgaaaagtatttattcttcgtttacaaaacgaacttgaagaatttatgttttaactataaaatagtagcagaattatagcaaataatacagtcaggagggcggtattatgcagaaaaatatcaaaaaatatatgctggtcctcatggcagtcctgctcggagccctgctgaccgtatgtgccattccggtggcacaatggctcagtatcccggaaaaccgcagcctggtctggcagaaaatcgatgccctcggtccctggggcgctgtgatcttcctggtgatccagatcctccaggtggtgatcgcctttatccccggtgaaccggtggaactggcagccggacttctgtatggcacctggggcggcctgctgatctgcctgaccggcattctgctcggctcctccatgatctttgccgttgtgcgccggttcggacgcccgttggtacagcgcctggtggatgaggagtccatccagaaatatgccttcctcaccgatgcccgcaagctggacaccctgattttcctgatgttcctgatccccggcaccccaaaggacaccctcaactacctctgtcctctcactcccatcagtccggtgcggttcctggtgctgtccacctttgcacgcattccctcggtaatatcctccaccttcgccggagccaacttcgctgagggcaatctgctggcctcggtgatcgtgcttggaatcaccagcgcggtgggactgctgggcatccgttacgaacatgtgctcaccgattacctcaaccgctcggctgcccggttccgggagcggatgaacagcggaaaacaccagtaatctttattttgctcttgaattagaaaataatctattgtaaaatgaaagtgtgcagagatgccagccacagaaggagaattatactatggatattgtagaacgcatccgccagctttgcgcccggaatgacatcagcatcgctgccctggaacggcagcttaacttcggcaatggcaccatcggtcgatggagcaccgcctcccccactgtggaacgcctgggaaaggtggcagactacttcggggtcagcgtagattacctcaccggacgggaacagcaggaaactctggacaatctctatctgagctgcctgcggcgggcccagagccagggtatcgatccccgggatcttgagctggctgtcaatacaattctgcagctgagaaagcaggatggaataaagcatgagccaaatcagaaataaagcagaactctatcaggctgcggcagagctccgccgacagctctgcctgccggaatgctgtacctccggagtggtatttgaccgtattcagtcccagcccgggattcagattgcattcctccccttccagtccccggctctgcgaggaatgtgctcccctggcaagccagggcaggaggacattatcctgctgtccagccgcctcactgatcgggagcgtggattttatgccgcccatgagtggctccacctgtgctggcaccgggacgccagcaaatcccccttcctgtgcggggaataccgcttcccccagcaggacagcttcctggaatggcaggccaacgagggcgcagccgagatcctgatgccatggcgtcaggtggtggagctggtgctggaatgcccacctgatcccgacagccgggagagcctgatccggctcaggctgcggctggcagaccggttcggggtcagtgaccagatggcagcagtgcgcctggaaagcctccgttatgagattgcctgcgccctggagggtcagagcccggacaccatcgagctgctctcggtccgggaacagcagcgccggggcatccagacccaatccctggaggaaaaagcacggctcctctttgccagggaacaggagtaccaccggcggctccggaatatcgatatataaaacagaaagcacagtccaccgggctgtgctttttatatgcgaaaaagacacagaaactccttgctcccgcgcctgttctaagccgtgccgccatcagacctgacgagggccggctggtcaggcggttgctgtcagaacccgtccgaaaccatctctctgtactgtccattccggcggacagcagcagggttccggagcgattgctctgcgaaacttgcctgacaaggaaaaactgcagtcggatcgctgtgtccgctgcagtttttagtatagtataactatgtaaaggccaaatggtttacaggttaaatccgaatgaaatcagaactttcttctggaactgctgaagctgcgtcccgaagaggaggttctgaatcccgaggaaccagacgaccggctgggtgggtttttgggaatacgccgcaccgaaacgcttttgttgacaaagacatcctggcggacactcagatccacggtggtgttattccggacattgtaaaccgcgtcccggacaggggtgccgtaccgctttgccacgaatacatagaccaggatggtacaggcgcttcccgcaaccactgccgccacaagaaagacaatgggatagcctccaagcggctggtcgtccggcgctgtgtgggcaccggtgtactgtccgttctcgtattccccgcttacctcatggcgcttgatgacactggtggccttccccagcatggcatgcatactgtcggcatactcgccatcggccagctcatcatagcctgcatcgattaccgtatccagatcggtattcagcagcacatacttggtttcacccgaagcgcaggcaacaacgtcccgggtctccatattgatgtacaggatcacaccgctgcggttgctgccaaggccaaagccgttggcatcatagaagtcctgggcccggagctccggatcattgacgctgccgtcctgttcggtgagaatgactgcatccgcctgcacatccgcctggaactgtgcgatgcgcttctccagctctgcttcctccgcatcggtgaagatgtcagcgttatcgaaaacatgctgttccggctctgcgccccagaccggagtcagacagagggtcatcacaaacactgccgcaagggcagaaatcagacgcttcatatcaacagccctccgatcatcagaagaacagctgcaacacccaggccagccagcactgcatcgcgaagcagtttttttcggtcaagaggcagaatacctgccaccttgccggtctgtccattcatggaatagtagtactttttctggtcggctcctgtatagacaaaagcccagaccggaaacagcgcatactgatagtccttgcgcttgacatccgaatccagcgaggaattgtagaccgaatcatatcctgtcactgtgtcccgcagaagattctcggtatatttatggatgtcgtcctggaaaaccggctccagcgcatcggtctccagattccggatctccgcccggaagccggaaagatagggcatcttgaacggaattgcctccagaacccggtaaggcataacgccatccgccagttcccggccctcactgtccagtgcgcaatgggtcagatcctcaaaatgcagatcgccctggcgatggatgcggtaaacagaggtttcggtgtactcattgcggctgtcccgccagacacgaacccgattggcattggctgtgtagtttgccgatgtatcgcagtccagcacccagtagggatagtaaacccccatgaagtactcggtcttgccggtgtcgaagtatcccttgggcacatagcgctttttcgccacccactcatagaaccggcgctctgcctcttcccgggtgaatgcaaaggggatcacacggtcgggatggaactctccctgcaggcggccctccagcaccaccggactgtgacagtacaggcagctggtcgccgctgttgtttcggtggtgacgatctgagcgccgcagctcgggcaggtgtagagaactgctgtctcctctttcccctcttcctccgccggctcctgcacgatcgtctgctcgctgctctgggccggttcatacttctgcagctcctcctccgagaaggaagaaccgcagaaagaacactcaaacttctggctctccggtgaaaattccagcggagcgccgcagtttggacatttataggctacaactgccatatacggcctcctttattccactttggtaccgcagttcgggcagaatttagcattgggagacagcttttcgccgcagtttgtgcagaaccgtgctgtgggacgagccttgccgcaattcggacagaacttgccgccatggttcttggagccgcactcacaggtccagtcctctgccgatgcagccggggcctcctgcttgggggcatcagccggttcagcaggagcagccggacgggccgcggcctcccgctgagcctggttggcctgggaagcagcgccgacaaagctgccgccggcattcattccaaggcccatgcccataaaacctgccatactgccggcagagttggaaccagcagcctccagaccacgggcaaccgagccctggacatagccttcccggacattgggatcgctgagcatagcaccctggttgcgcatattgatgagcttctggctctcctccgagtaggacaggccagccagacccaccgataccacttccataccacgcaggtccttccagtcatcgtccagaatatcagccatgtaacgggagagctccatgttcttggaagtcacatgagagatccgcacaccgtcagccgacatctggttgatggctgcctggagcgcacccaggaattccgacagatactgctcattgatgtcggagatgtccacatgctccgcgttcttgggaatggcttcggtatagaacttgatggggtccactaccttgatggaataggtgccgaatgcccgcaggaacagttccgaattgtagaaggagtcaaagtagttgaccggattggtggtgccgaacttgatgcccttgatctcctgcagattgacataaaagaccttctgggcatagggggttgtgccgccaaagcgcacacggttaaaggattccttgaccgaatcccccagatcgccattgaagagcgatggctctgaggaattgttgacggtgtagtaaccctcctcggcagtataatcaacgattttgccgccgtctaccagcagcatgaactgattgggatatacatggatcaccgaaccgttggatacaacagcagaggtccgcttggtgttggagttgcgctctccctggcgcatctgcacaccggcagtaaatactgtacggtcactcatctgatccggttcgatcacttccagccactgatccgccagtgcgccgcttactgcgtctgttaccgcacgaatgattcccatatactgtcattcctttctatttatcaaattcatagatcttgtcaaaagaccaggcatagtgattgacttcctgtactgcggttccgcagaactcgcagaccttgctccccagtgaacggatgggggctccgcagttggggcaggtcatgctgaatgccgcatccagctgatgctcctgtgccgctccagcatcctgcacatagagcagttcaacattgtaccgggtctgcttttgctccgcttccccatcgccgatccgcagcatatatcctaccgcgctctggaacacaaccctgcattccccatcctgcttccggtagtcagccagttcggtctgatgcagccggacctccgaataggcatgcggtgtgccatccgcccgctggtgggtgagctcctggcgcacctgttccagcagtgccggggaccgttcgctgagccgctccggctgcttctgtgtgatcgccgtaaaataggaaagaagcagggtttccgctctggccttgaattccgaataggaaaactccgggaagtcctccgcgatctgcggcagaatcagacgggtcatgccgcagaccgaacagggcgtttccttgcgcatctcccgggctgcctccccgatcttcagcgcctgcaatattgcgctggtctggcgtgtccagttccggaacgccttaatcagcataatcagcaatgcagcaataaaagcaaaagccaacatttttacataatccaagcgatcacctgccgttctttcttcatatatccctattatacggtaatttactgctttcgtccataatgaaattggaagtccggatataaaaaagaaacccccgggaaaaccggaggtttctttcagagcaatttacttgatcaggccgaagtttactacaacagcagcaagtacgatggaaacgatggacagcagcttgatcagaatgttgatagccggaccggaagtatccttgaaggggtcaccaacggtatcgcctacaacagcagccttgtggttctcgctgcccttgccgcccaggttgccagcctcgatgtgcttcttggcgttatcccaagcaccaccggcgttggacatcataacagccagagcaaaaccagttacagtagaaccagccagcataccggttacacccttgacgcccaggatcagaccaactaccagaggagctactacagccaggattgccggaggaaccatttccttctgagcagacttggtgcagaggtctacgcagcttgcgtagtcaggctcagcagtaccttccatcaggccagggatctccttgaactgacggcgtacttccttaacaacgctctgtgcagcagtacctaccgactccatggtgaaggcagcaaatacgaagggcagcataccgccgatgaaagtaccaatcaggacaggcgggttcatgatgctcagatcgaagttgtaatcgggagaaatcagcttgacctgatcgatgtaggaagcgatcagagccagagcagtcagagctgcggaaccgatggcaaagcccttaccggtagcagcagtggtgttgcccagggagtccagagcatcggtacgctcacgaacttcctcacccaggccagccatctcggcaataccgccagcgttatcagcaacagggccgtaagcatcggtagccagagtgatacccagagtggacagcataccaacagcagacagagcaataccgaacagaccggcattgtagtcagccgcaccaccagatacatagaagctgatgattacggaaacgctgacgatgataacagggataaaggtagaaatcatacccagagacagaccgctgataataacggttgcgggaccggttacagaagtaccagccagcttctgggtgggcttgtaggtatccgaagtgtagtactcggtgaagtaaccgatcaggataccagcaaccagaccgctgatgattgcaccgtacaggccgatgtaatccatgcccagggtgaagtagatcagagcaaaagcaccgatagcaaccagaacaccagcgatgtaggtacctcttctcagagcgctgagcagctgcttctgggaagcgtcctcattggtcttaacgaagaaggaaccgatgatggaagcgaagataccgatggcagccagagccatgggcagagccataccggtgaagccgaaaccggcagatacagccagagcagcggcggacagacgagcgcccgagtaggactcgtacaggtcagcacccataccggcaacgtcgccgacgttatcaccaacattatcagcgataacagcggggttacgcgggtcatcttccggaatgccagcctctaccttaccaaccaggtcagcgccgacgtcggcagccttggtgaagataccaccgccaacacgggcaaacagagccatagcggaagcacccataccgaaggtaaccatagcggaagcgatcatctgagcctgctggtcaaccggcagagccgagtagtagaaccgcaggaagtagtaccacagagaggtttccagcatacccagacctactacagtaaagcccattacagcaccggcagagaaggctaccttcaggccggagttcaggctatgctgagcagcattggcagttctggcattggcattggtggcaatgcgcatgcccaggaatccggaaagaccggagaagaaaccgcctactacaaaggccacaggcacgaatacgttgaccagaccggcaaagaccagggcaaacagaaccacgcccatgattacgaagaagacagatacgcccttgtactgtctcttcaggtaagcgttggcaccgctgcggatcgaagctgcgatcttcttcatcagatctgtaccctcgctctgagccattactctccgggagagaatgaacgcataagcgagcgcagccacggcaccgatcggggccagaatcatcaaatcgaacattttttacgctccttacttatgtttactttcctgctgcaggacagaatccaccccactgcagaatctaacattcatatattaaacaattgtgtctttattgtcaatcaagttttgccgtaattgcacagagtgcattttttcttgtatattttggtcattttcccagaagtttttgttaatatgttgttcatatttctaatcccagttctgggaattttctgtggttaccggcttgtcctcccgattcgatctgtgttataatttttagttggaaatcggcgatttttgccgatcaggatcgaaattttccttcatggaggttcattgctatgaaaactattgtcatcggaatcgccggcggttccggatcgggtaaaaccactctggcccacaagctgaaagacgccctgggcgatgacattgtcctgctctgccacgacttttactacaaggcccatgatgatatgccgtttgaggaacggcagaagctcaatttcgaccatccggatgcattcgataccgacctgctgatcgaggatatccgtgccctcaagcgcggggaaagcatcctccaccccatctactcctttacagaacacacccgtcttccccagcgtgtccgggttgatccggcccgggtcgtgatcgtggaaggcatcctgatcttcgaaaaccagcagctccgggacgaaatggatatcaaggtattcgtggataccgacgcggatatccgcctgatccgctggctgctccgggatgtcaaggagcggggccgtaccctggattcggtggtcagccagtatatgaatactgtaaagcccatgcatgagcagtttgtggagcccagtaagaagaatgtggacatcatcattcccgagggcggactcaatgctgtagccctgcagatgctgctgcgccagatccagcacttcctgcgggaaaccgaatccgaatcggatgctatgtaaatgtttcgtgcttcatttgtaaacatttttcttgcgtatactcttttccccgaaaaaatgttacaatagccatatcaatattctgtatggaaacgggagtgtccctgatgaaaaagctgacggcagctgttcttgcagctgcgctgacccttggctgtgcttccacagcctttgccaatgaggcgattgatgatgccattgagctcaatcagtacaacttcgaagagaaggaagctgtatccggccggtttctgaacctgctggccagctaccccggtgaaactgccacctggcagactgaggattatgccttcaccttccgcagtgaagatgtgccggaagaactggacgaccgctcttctgtcaatctgcacatggagcgcatcaaggaccgcctctccatctatgacaaggccgtgggccgggatacccccaaatatgtattcaaagccgatgcggaatccttcaaggttccctttgaaatgaccatccgggaaagcaacttcatgccgggttccaccgtatacatttaccgtctggacagcagcacctgggatcagggcacccagaccaatgtattctccgccgtcaagaaggaggtggtcgttgcggagaatggcgacatctccttccccatgaccgaaggcggcacctatctggtatctgccaagccggtggtcagccatgagggcgaactggaggagatgctcttccaggtggaatatgaacagcgcggcgattacgacgagctgctcacctacctcaaggatgaccccaacggctacttcaccacctgctcctaccccaaccctgagatcttcgaggctctgaagctgggcctcgacctcgccaccaagaccggcgccgacctgatgctggccaccgaccccgacgccgaccgcgtgggtatcgccatgaagtgtccggacggcagctatgagctggtctccggcaacgagatgggcgctctgctgctggattacatctgcgctggccgcatcgagaagggtaccatgcccaaggaccccgtcgccgtcaagtccatcgtctccaccccgctggccgatgccatcgccgcccactacggcgtggagatgcgcagcgtgctgaccggcttcaaatggatcggcgaccagatcgcaaatctggaagctgccggtgaagtggaccgcttcatcttcggcttcgaggagagctacggctatctggccggtccttatgtccgtgataaggatgccatcatcggctccatgctcatctgcgagatggccgcttactaccgcagcatcggttcctccatcaaggagcgtctggaaga

SEQ ID NO: 136 - DNA, 2995 bp, Unknown
  16S sequences of unknown bacteria
taccaacgctgccgtcatgcccagaaccaacttggtatggatggggaattttttccagcgcttgtttctccatacatctcggatcacggtaaaccctaggcctcccaaaatgataagtgccattacggtcaggtttactatcgcatcacccgtgtaccccgtcaaagactgaaagtttcccaacgggtcaagccctgcgttacagaaagcagaaatggaaataaaaatactataaaataagccggtcttaagaccaaatttcggtacaaagctaaaagagagacatatggcgcccagcgtctctatcagtatggtaatcagcaccacgttttgtatcaagcgcaccataccttgcaacgaatcctgattcatcgcctcttgaatcagcatccgctctttgagcgtaatacgctttcggatcatcataaacacaatggtaaccatcgtcataaagcccaggccgccgagctgaatcagacataaaatgacgaaatggccaacatgcgaataagccgtgccggtatccaccgtaaccagccccgttacacatacggaagtggtcgccgtaaacatcccattgagcaagcctacgctttccccagtagaagagcaaatcggaagcgacaacaaaagccctccaataaaaatagctagaaaaaatccccatacgattttttggacaggcttcattttcttccatggatacatcttcgcaattttttctcccaacgaaggtccccccaaattgaaactgtgctggcaaaactcataaaatcgttgaaaataaaaactgccgcgcaccttccgttggaaaagctacaacggtgctattgtaaaaggagaactccggcccggtttccctgcggcacatgccacgttctgcttaatgctgctcccgtcaaggcctgacatgattcacaggatgacattgcacaggacccgaccgtcaacattcccagttgcaacgcgtgccattgccacttagccgaaagaaggattccagccccgctacagcggatttcgggtttagggcaccgctactgccccgcctggcgcgacattctttataactttttgataacttctgccaaagcataccacttggtattggtttcgtcaatggaagagtctgttaaatttttattatttcatcaagttgccccaggattctgcatacgccaactggtttagcggctttctgggccgttgggcaggcgcctcgtccggtacgcccagcggcgtgatcgctacgatacgaatatgatacggaactcctagcagctttttcacaggctgctccggaaacgcccccacccagcaggttcccagccccagagcggcggccgccagcgttacctgcgtcagcgtattgccaatatccgtcatataatacggttttccctctctgttgccgcttttttccggatcagcgcataccaccaaaaaataatctgcattttcgtaggcgttccctttcgggttcccgcccgtggcttgctttaacgcctgaatctgctgtctatcatgtagtatcacataggtccaaggctgctgatttttccaggatggcgcattctgcgccgcctccagcaccaaacgaagctgctcttccgaaacaggctcgtgtttatattgccggatgctgcgccgctccctcatggtctgtaagcaatccatcctcatcatccgctccttttccaacgatcttttgtctcattatagcttgtgtcatacaaaaaagtcaaaagccttgcgtatcttcctatgagtttgctataatgatgccactgtattcgaagggtggcctctataaaatgaaaaaacgtatgatacagctcatggcgttggcccttgtggcccttggcgtagtgtccggctgcagcgccaaagcccaactgcccacggagatcggctcctttgccgtggtggatgtgtccatggtggatacgtacgatactttgcaggcagaaagcggtcaaaagctctgcatcattgccatgaagcccaacgacgccattcaggaggataaatacaaaagctatttctgctcggatgacggttccagcgtcgccaaaatcaccattgccggcacggaatacaactgtatggccgtcgcggtgcaaggaatgccaaacgataaatcggtagaatataccctcgtgtttgaagtgccggaaagtgcgtctacggcgggtagtctttcgcttaccgcgcccaacctgacgccggtagaaattaaatattgatttggaatgcaaaaaacggccaaatggccgtttttttatgccgtttttctctttattgccaaggcaatgagatacagtaccgctatcgccgcaatgggaatccaggcattgacccagcacaatacatgtttcctcagcgcccatttggcaaacaggatcgccacccagatcactgtaaacagcacaatggccccaacgctgcgcagcctctgctttttctccgaaaaaccaaaggtatgttggttcagcatacggctcagcgcccaggcaaagcccaggatcaaaacgctggaaatgataaatccctgcgtgatcggcattttgatcgcaaaatccagcaatccctgtgcagtgcctgtataaaacagctctatcaacaccagggccaaaagtccaattaggcatccttccaggctttctatccgcctttccgctgccgttttctttgctcctaggtggatatatacatcgcataccccgatcaggtccttgccaagcgcctgctctaccgtctgcccctgccgctgtgctcggtataatttctctgccagctttcggcaaatggaaaatacctcttcctttttcaattcggaattttttatgtatgcctccatcgccttcatcacatcgcggtgctcccctgtcagcttttggcaggtctggcggtatgcagccttttgtcgttgtttgttgcttgccatgtagatctccttcgattgcgcagcttttctgtttatctattgtatccc

SEQ ID NO: 137 - DNA, 2637 bp, Unknown
  16S sequences of unknown bacteria
gcgaaaaatgcagagggctttgtgaaaatcacagagcttaaaccaagtcatagaacaagggtagctgcttcaatttgtgaagagtgcaaaacagttatatttaagtattaagcagttacaattcaataaagaaattatgagacagtcttacgaaatcaaacgtaaggctgttattttttcgagaaatgaggaaaccgatggctggtataaaaataagagatacaagaaaaggtacaatcaagaccataaataaggcagcagttgccacagagcgaatgaagaaagcctatgtgatgacgaaagataaggcagaacattccgccaatgcttcgaatgaggggaattcgtcagactcttgcagaactaagacatattccgtgggtagttctgttgtttacggttacagcattcacacatattaaaaaaagatggctgctcggttgagcagtcatcgagtacagtattaattctgatataaattgaatttatgaaaacatttacaattcagagtgtgaattcaaatatatttctttaatattttccggcaggttattgggaattattgctgacaatcggttttcatttccgtctttgatagcctcactgtaataccaacatttgaaatttaacatatcaagcgttttattcaacttggtaatctctgcttctacttgctttttttgcttttcaaacaactcttttcttttggcatatgttgaacttccttccatacaccaagacataaattgcttaatgtcttttatttgtaaccctgattttttcaagcattcaatcacacgcaatacctcaatttcattttcgctaaattgtctaattcccgatgcgcgatttagttcaggaaacagaccttctttatcatagtaacgcaaagtagataccggtaaatcaaacatttcagatacttgaccaatcgtaaacataatttttcctccaaaaaaataaaaaccctcttgacttaaagttaggtttaggtgatattatcagtatagcagagattaaaaaataatcaatagcaaatttcaaaatttaggaggttgaaatttatggcagtaaaacaaacagccggtagaagagaattaggagaatttgctccgaaatttgccgaattaaatgatgatgtattatttggcgaggtttggagcagagaagacaagttatcccttagagaccgttcgcttgttacagttacttctttaatgtcgcaaggtttaattgattttgcttttcgttatcatttggaaagtgctaagaaaaacggaattaccaaagaagaaattacggagattttaacgcataacgctttttatgcaggatggccaaaagcttgggctgcatttcgtatggcaaaagaagtttggaatgaaaagaacgaggaaaatgaagataaagcgataaaaaaacacgcttcgtcaatgatatttccgattggtgagccgaacgacagctttgcaccttatttcacaggcaaaagctaccttgcacctatttccacggaacaggtcggaattttcaatgtaacctttgagccgaaatgcagaaataattggcatattcatcattctgaaaatggtggcggacaaattttgatttgtgtagccggaaaaggatattatcaagaatggggcaagaaagctatagaaatgctgccaggcgatgttgtaaatattcctgcgaatgtgaagcattggcatggagcttcggctgataattatttttctcatttagctattgaagttccgggagaaaacacatcaaatgaatggctggaagctgtgtcagatgatgaatattttaacgcaataaatccttaaggggagaacttaattatgagtaaaaaaattttaattctgtcaggcagtcctcgaaaaggcggcaactctgacattttgtgtgatgaatttgccaaaggagcaacataagccggtcgtaatattgaaaaaatctgtgtacattatgcgattttataataaaaaaacaggtttgccctaaaactttggacaaacctgttttttgataagttgaatatttctaatttaaggtatccttgggccaagattttttagcgctgcataagaaatgacaaagtttgcaagccagcctgccggtacagcaagccaaacaaccatatttgcaattaaaaacggtcgcatatttccgattccacgaagaacaccatctgttgccattttgatgcccataaatatgaaaaagtagccgagccatttcatataatcaccggacacttgatacgctaattccgttccgtctttgcctaagaaaagcgaagaaatttgagtgtgcatcgtttcaataattacaaatgcaagaacggcaaagcatacatctaacagtaaagcggcacggtagcctttcttaatacggtcggtttttcctgcgccgagattttgcaaaacaaagggtgacaccgcattcccgatggatacaaatatcagagagaaaacattttctactctcattgtcgccgcatagcctgcgagtgcttgcgtgccaaaaggatttacaaccgcctgcacaatcatcataccgattgatactgttgactgttgaaggatagacggaacggcgattttaagcattgtacgcagttcttttttg

SEQ ID NO: 138 - DNA, 2427 bp, Unknown
  16S sequences of unknown bacteria
ccgcccgcctttcgggcggacagaaacagcgcatcgccattgcgggcgtactcgccttaaagccgaaaatcatgatcctcgacgaatccaccgccatgctcgatccccgcggtcggaaagaagtgatggacgtggtgcttcgcctgaataaaaaagagcatatcaccgtccttctcatcacgcattttcccgaggaagcgctgcttgccgatcgggcggtcgtcatgaatcgcggggagatcgtcatgcacggcgcgcccgcggagatcctttgccgggaggaggatttggaaacgttcaatctcgcgcttccccgtcccgtcgccctctgccgcgccctgcgaaagggaggattggcgattgaggacgcgcttacgcccgaacggatcgcggaggaaatatccgccgctttgccggaggaaaagctccccgcgccgccttcggacggggaagaagggacagggacggagaaacggcaggtcgattccctgctcggcgagggcagggtggcgtgcgaaaatctgacgtatacctataacgcgggctctccgttttcctcgcaggctttaaagggggtcgatatccgcatcgacacgggcgaatttttcggcgtcatcgggcacacggggagcggtaaatcgactttcgtacagcatttgaacgccctccttaaagtgccttccgccgaaaaaaaatataggccgaaaaaactcaaaaagggacagacgccccctccgaaaatccgattggaggtaggcgggtacgacttgacggataaaaagacaaactttcgggaactgagaggcaaggtcggcatggtctttcagtatcccgaataccagctctttgccgaaacggtgtttgcggacgtggcgttcggcttgaagaacttttcgccctccccgctcaccgcggaggacacgaagagagccgtccgcgaagccctcgaaatggtgggattggactatgacgaaatcagggatcgctccccgttcgagctgtcgggcggacaaaagcgccgggtggcgatcgcgggcgtcatcgtcacgaagccgcagattctcgtcctggacgagcccgcggcggggctggatcctctcggaaaacgagaaattatgcaacttttacacaaaattcacaaagaatggtgtaaaactgtcataattgtgtcgcatgatatggatgagatcagtgaaaactgtacgcgcgcggcggttttttccgaaggaaaagtcgtggcggaggacgttcccgcgcgtttgttctcgcggcctgagcagctcgcttccctcggtctggacgttccctttacggcaaagatcgcggcagcgttgaaggagcggggcgtgcatatttattccgatttcacctcggaaaacttcgtcgaaaaagtgctggaatacgcggcgctttgcaaagcctttgcgggggcgggagaaacggagaagggaggtggcgcgaatgcgtgacgtttctttcggacaatattatcccgccgattccgtcgtgcatcggtgcgacccgcggaccaagctcctctttctaatcgtctatatcgcggcggtttttacggcgaaaaatttttacggcctggcggcgtgcgcgctcgtgttcgttttggtggccgcgctgtcgcgggtgccgatagggagcgttctccgctcggtgaaggcgatcgtctttcttttgatcttcaccgccgtgctcaacctgtttttctattcgggcgaaacgatcctttggcagtggaaatttctcaaattcacgaaagagggaatcttttatacgattttcctgtcggcgcgcctgtttttgctcgtcatgggctcggcgatcctcacgctgacgactacgcccgtatctttaacggacggcatcgaaagtctgctgttccccttgaaactcatccgttttcccgtgcacgaactcgcgctcatcatgtccatcgccctccgcttcatccccatcttaacggacgaaacggggcggatcatgaacgcgcagaaggcgcgcggcgcggatttcgaatcgggcggactcatcaggcggatcaaggcggtgatccccgtgttgattcctcttctcatcagcgctttccgccgggcggatgaactcggcgacgcgatggacgcgaggtgctattcgggcagcaaggtgcggacgaaatataaaaaactgacctttgccctgcgcgatttgtgggcgtttctcctgtgcggcgcgctgctggcgggcgtcattctgctccgcgtctatttctccaacgtcatttagggaggcttgccatgcgatacgttttgaagatcgcctacgacggcacggggtacgcgggctggcaaaggcagaaaaacgcgctctccgtgcaggaggctttggaggacggaatgcggcgggcgctcggcgccgattgccgggtcacggcgagcg

SEQ ID NO: 139 - DNA, 12810 bp, Unknown
  16S sequences of unknown bacteria
ccaacgacgtggccggcgacggcaccaccaccgccaccctgctggcccaggccatgatccacgagggtcagcgcaacctggccgccggcgccaatcccattgtgatgcgcaagggcatggccaaggccgttgacgctgcggtggaggctatgaaggccacggccaagaaggtgtccggcaccgacgatatcgcccgcgtgggcactgtctcttccggcgatgaaaccatcggcaagctgatcgccgaggccatggaaaaggtcagccacgacggcgtgatcaccgtggaagagtccaagaccgctgagacctacagcgaaatcgtggaaggcatgatgtttgatcgcggttatgtgacgccctacatggtcactgacacggacaagatggaagccgttatggatgacgcctatatcatgatcaccgatcagaagatcagcgtaatccaggatctggtgcccctgctggaaggtatcatgaagagcggccgcaagctggttatcatcgcagaggatatcgagggcgaggctctgtccaccctgatcgtcaaccgcctgcgcggcacgctgaacgtggtggcggtcaaggcgcccggcttcggcgaccgccgcaaggaaatgctgcaggatatcgccatcctgaccggcggcaccgtgatctctcccgatgtgggttatgagctgaaagacgcttccatggaactgctgggtcatgcccgccaggtaaaagtggacaaagagaacaccatcattgtcggcggcgccggcgataaggctgccattgatggccgcgtcaagcagatccgtgctcagatcgagaccaccacgtccgattatgacaaggaaaagctgcaggagcgcctggccaagctggctggcggtgtggccgttatcaaggtcggcgcagccaccgaaacggaaatgaaggaaaagaaactgcgcattgaggatgctctgaacgctacccgtgcggcagtggaagaaggtattgtccccggcggcggcaccatctttgccgatgccattcctgctgtggaagcgctgatgaacggtgtggaaggcgatgaaaagaccggcatgaagatcgttgccaaggcgctggaagctcccattaagcagattgcagccaacgcgggcctggatggttctgtgatcctggaaaacattaagtcgcatgtcaaagaacagagcacctacggctttgacgcttacaaagaagtgtattgcgatatgatcgaggccggtatcgtcgatcccgttaaggttacccgcagcgccctgcagaacgctgcttccgtggcgtctatggtgctgaccaccgaagctgttgtggctgataagcccgagcctcctgctccggctcctgcagctccggacatgggcggcatgggcggtatgtattgatcggcgcagcagccttctggaaccgctggaatttaggatggaatgcggtcggtccataccaaatttatatcccaatcagcgcttgacaggtaaaaatgaagccgccgttccaattggaacggcggctttttgctgcccggtaaatcgaggggcgcggcatacaccgtatttgcttgttttggagcgtccgttttgatggcgcccattatcggcagagacaaacgaagaagcgaaaccggacgtgcaccgaacggccgcagggggaagcggcaaaatttggtgcacgtccggtttatgcgtcaggacagatcctcatcctgtttttgctgaatcatgcggtatccaacgccgatgtgggtctggatatattgagggtggcgcggatcagcttctacctttttgcgcagcgtagccataaacacccgcagggaaggagtatccgaagcggtgggactaccccagatctcattgagaatataattgtgagtcagcactttgccggtgtgcttggccagcagacacaggagcttgtattcaataggcgtcaggtgaatctctacgccgtcgcggtaggtgcagccggcagcgtagtcgattttcaatccgccgttttcgtaaacgctggctgcctcgctggtgcgttcattgtcatagcgcacgcggcgcagagcgacccgtacccgcgccaacagctcctccacggaaaaaggtttggtgaggtagtcatctgcgccggcatccagcgcagccaccttgtcgctgtcctcactgcgggcagacacaacaatgatgggtaaattgctccatccacggatttttttgatgatctccacgccgtccatgtcgggcaggcccagatccagcagcattacgtccggacggtagctgagggcgtccatcacggcgccggcgccggtcttggcccggtgatattgatagtgttgggtttccagtgtggtagcgatcagattgctgatggcggtgtcatcttccacgactaaaatttgcggtttattcataaggcgttacctccgaagcatgcagcgtaaatacaaaagcggtgccgtggggcggattgtccagcgcggcgatggtcccgccatgggctgttacaatggaacggcacaggctcagccccagccccagaccgcggcggccatccccacgggcattgttggcggtgtagaacatatcgaacagcttttcccgagcctcggcggggatgccggggccgtcgtcggcgatccgcacctgtacccacgcaccctggcgttcggctgacacgaggatgcgggagccttccggtgtgtatttaatagcgttattcacgatgttgatcaccacttgcacgatcaggcgggcatccatatctgccatgatcagatcgtctttcagttccacggagatctgatgctgcccggcgttgcgatccaaatgggccagcgcttcggcgaacacctcgtccagcagttcaggatggatgttcagtttgatggaaccgttttccatgcgtgtgatggagagcaggttttccaccagattgatcagccacatggaatcatcgtaaatcgaagcgtacagggccttctttttgctggcggagagtacggcgccgttttccatcaggatgcctgcgttgccggaaatactggtcaggggcgtgcgcaggtcgtgagaaatggcgcgcagaaggttggcccgcagggcttcctgatgggctgtttcttccacctgctgtttggcacggaccatttgttctttttccagcgccaagccgcattcatccaaaatagccaccatcagatttttttcaaaagcgtcaggcgcatggctgggatcaatggccacgcccgccacggccaatacctgcttggaaccgcgcactgccatatacaaacatttggagctgggcagggtattggtggtggcgccggcatgtttgttgtttttacgcacccattcggctactgcctgttcctcatgggtcaggtaaggggacatatcggcggcagaagaggatgggaagcacattgcgctgcccagcgtaccattttcctgcagggggtacagaagcaggtttcgttccagcagtttgctcagctgcgcggctgtcaccgaaagaatggcgtcggggccttcggcagtctggagctttcggctggtttccagcaatatttccgtgcgataggccttattggcgctcagaatggcctgccctttgatgcgggtagtcagggagctgaccagcagagccacgataaacatgatgccgaaagtgaccagatatcccggatcactcatcagtgtgaaatacggatgcgtgaagaaaaagttgaagatcaggacagaaagcagggaagaaaccagactgtaactgcggcccgttgttgccatggaaacggccagaacacccagaatgtaaatcataatgatattatttacattgaatccaagccaccagaagaaataacctgccacggtacacagagcaagaatgcccagcattttcaggctgtcctgccaggaaaatcgctcctgtgcggcgtgcagccgctttcggcgccgggaaaccggagcggactggtccggaataatgtagatatccagatcgggtgccagatcgttgaggcgatcgatcagatttttgcgggaagggaataggccgcgacgccctgggctgcggcccaggacaattttggaaatcccgctgacatgggcgtactctgcaatctgaatggcggggtcatctccataaacggtagtgatacgcgcgccgagctgttcggccagatgcagattggcccgcaggcgcgcccggtcggcttcgctttgcgtggcaaactgcggcgtttccacaaacaatgcagtgaaagcgccgtggaaagcttccgccatgcgggcggcggtgcggattactttggcgttggagggcgcgccggaaaggcagatgagaatgtgctcgccaattttgggtctggaaccatcttcatcctcggtgttgcgctccaaacgatccgcggtgcggcgcagcgcaatttcacgcagggcagccagatttttgtcggtaaaaaaatgtcctatggcttgagcggcctgaggcccccggtaaatttttcctgcacgcagccgctccaacagatcagcaggctccaagtcggtgacttcaacctggtcggcagaatcgaatacggagtccgggatgcgctcagctacagtgatacctgtgatggaggctaccacgtcgttcaggctttcgagatgctggacgttaacggtcgtataaacgctgatccctgcacgcagcaactcctgcacgtcctgataccgcttggcatggcggcagccaggcgcattggtgtgggccagttcatccaccagaatcagctggggcttgcgcgcgagcgcgccgtccaaatcgaactcatgcagttcaatgcctttgtatggaacgcctttcgtggggagctgctccagcccatccagcaaagccatggtttctgggcgggtatgaggctcgatatagccggccactacgtcaagaccggcttctttagcccgatgtgcggcttccagcatggcgtaggttttgccgacgccggcggcatagccaaagaaaattttcagccttcctctgggcgaggattcctttttctgtatggttttcagcagagcgtccgaatttggccgcggcagttccggcatagcggcacctcacaattctttcttgttttttctcagtatagcacagttcatatcagtatgacattgctgttttctttttgacgttaagatatcattaagacaaggcttaatgccgccttaatacgacagatggtttcttaatgggatcctcatctgagacgtggtacaataattttgattttgaaattctctgaaattcccttttgcggccgggtgaacatgcggccgcgcacaagcgggaggcttgtcatgtcctttttcaaacgcgtccggattacgccggcgcaaactattcttttgggctttttctttttaatcctgggcgggacgctgctgctgatgcttccctgcgccaccagtggccccggcggcgcaccgtttctggacgcgctgttcaccgccacgtctgccacctgcgtcaccgggctggtgatccatgacacggccctgtattgggcgccctttgggcaggtggtccttttgctgctgattcagatcggcggcatgggagtggtcactatggcggtagcgatttttatgttttctggtcgaaaaatcagcctgaaacaacgctgggttatgcaggagtccatttctgcgccccaggtaggcgggatcgtccgcatgacgggctttatcctgaaagcggccctgcttctggagggaaccggcacgctgcttctggcgctgcgtttttgcccgcagttcggtctggggaagggattgtggtatgcgctgttccatgctgtctccgccttttgcaatgcagggtttgacttgatggccacggaagaggtgtcctatccgtctttgacgggctatgcgggggatccgctggtgagccttacgattgcgggcctgattgtgctgggcgggatcggatttcttacctggcatgacttccggatgcatggcatccattggagtcgttaccgcctgcagagcaaactggttctctgcaccacggcggctctgctgctcgccggctttttgttttttgtgctgtatgagttccggcaggcgcagtggcaggggctgagcgcgggagagcgtgtgctgagcgcggtgtttcagtcggtcagtccgcgtacggcaggtttcaatacggtggatttgacacagctcagtccgcctgggcagatgatcatgatccttttgatgctggccggcggcgcgcccggctccacagcgggcggctttaaggttactacgctggccattctgcttctggggatccgggcggtattttaccgcgggggcagtacgcagtgtctggggcgccgtttttcagaagatgtgctgcaccgggcaagcgcactttttgtgctgtatctgctgctgtttctggctggcggcattctgatctgcgccattgacggcatccccatgatggctgcgctgtttgaaacggcttcggccattggaaccgtaggactgtcactggctggtacggcggaactctccgtgcccagccggctgattctcatgtgcctcatgtactttggccgggtgggcggcctgacgctgatctatgccgtctcgaccaatggaaagaatacagcacagtatcctgttgaacaagtgactgtcggataaagaaaggaaaattttcatgaaatctgttttactgatcgggctgggccgtttcggccggcatatggcccaaaaactgcaggaactgcatcatgaggtgcttgctgttgacaaagaggaacagcgggtcaatgacgcgttgccgtatgtgaccaacgcccagattggcgacgccaccaacgaagcctttattgcgtcgctgggcgtgcgcaattttgatttatgtgtggtggctatcggggatgattttcaaagctctctggaagccacagcgttgctgaaagaaaacggggcgccctttgtggtgtcccgggcagcccgcgatgttcacgcgaagttcctgctgcgcaatggcgcggacgacgtcatttatccggagcggcagatggcttcctgggcggcggtgcgctacagcagcggccatatttttgattatgtggagctgacgccggaatattctatttttgaaacggccgtgcctgaaagctgggtggggaaaacggtggtggacctggaggttcggcagaaataccgcatcaatattctggctatccagcgcggcggtaaattggagccgcttccaggaccgggccactgttttcaggcccacgaaacgatgtttatactgggagacaaccgggatatgaaaaaatttttaaggctgtcataaatgcaccggcggcgccttttggcgccgccggtctttttgcggagccggccggttatttgtcatccaggggaaagagcagcttcagggccagtttttctgctgggccgcctctggcaaaatcaaagcgttgctcgcggccctcccgatccagcaggcggaatgtattttgtctttgctccatgtgaaatcccagctgtgccagcgcagtgcgcagcgtcaactcccattccagcagatacaaagggccatcgcggtaataggaggaccagagccagtcgaattccagactttgacggccttccgtcaaaaactgtgtccagagttgtgtctggtgtgccgcgcccaagcagagcaaaagatccagggaagaaacgcgttgccaggtaagatagccgaacagactgcctggagtggggaggagcagtcctccggttcgcaggatttcctctgctggcccggatacggcgcagcataccgggcggctggaaaggctgagggccagggcggtcatgttctgtgccagcgctgcgtctggccattgagcttgcagcgccaacccctgcaggtgatcaaattcacggccggaggctgaacggcggcgggccatcagtaccgtatcttgctggaaaaagtccatttcggccgtttcccggtgctctgtggtgccaaacagacgcaggggcgtttgggcggcaaaaacgccggcttgttccaccacatcctgccaaagataggaaacgttccgatacagaagcgtcgttgccgccgcattgctctccagcaggaccggagtcgtttcaaaaaaacagttaaaagcccgaacagcggagagatatgccaatggagccgggcgcggccccgttgcgggaaccgcgcccaaacactcttctgagatggtgcgtgtcaaagagcacatcacggcgtctccaaaataccgtccagcatcagatttactttcagcacattgaccgtaggctcgcccaggaatccaagaacgcggccttttgtgcatgcctggattacccggcgcacatcgtcctcagaaataccgcgggcctgtgcaatgcggtgcacctgatattctgctgcttcgggagagatagccgggtcaaggccgctgcccgaacaggttaccaggtcggcgggaatcggcacatcggccatgtccggatctgctgcgtgcagtgcctccacgcgctctgcgaccagcgcttcatattccgggctggcggggctgagattggaagctgtggcgtacatcacaggctcgccattttcgtcggtgaaggaattcacatccagattcatcacgcggccccacatatggccgggactggtgaactgctggcccagcagttcggaaccgtaagtcttgccatccacctcaatcacactgccgttggcttggtaggggaacagcacctggccgacgccggtcagcactgccgtatacacgatgccgcacagaactgccatcagcagcagcattccgccggcctttaatattacttctttcatttcttgcatctccttcggaaacagccggggagggcccggcaaacatatcgtctgattttccgctttgcgggaaccgaaccgggggcggggatcccgccggcgcgatgggagccgcgccgtacgggaacgctgcctccggaccggttgtgcgatcatatcaggcccagcagaggcgtgacgatgaggtcgatgatcttaatcgccacaaacggcacgatgatgccgcccagaccatagaccagcaaattgtggcgcagcagtttgcctgccggtacctcacggtacttgacgcctctgagcgccaggggaatcaacgctacaatgatcagggcattgtagatcagcgcggacagaatggcgctggaggggctggtcagatgcatgatattcagaacgcccagtccgggatacagccccatgaacagcgccggaataatggcgaaatatttggcgatgtcgttggcgatggaaaacgtggtcagactgccgcgggtcatcagcagctgtttgccgatgcggacgatctcgatcagtttagtgggactggaatccaagtccaccatgttgccggcttctttggcggcctgcgtgccggagttcatggccacggccacatcggcctgggccagagcgggagcgtcgttggtaccgtcgccggtcatggccaccagatggccttcggcctggaatttgcggatcatgctaagcttggcttccggagtggcttcggagaggaaatcatccacaccggcctccgcagcgatagcggcggcggttaccgggttgtcgccggtgatcatgatggtgcggatacccatggcgcgcaggtcggcaaacttttccttcacgccgtccttgataatatctttcaaatagatcacgcccaggacgcggtgatcctttgccaccaccagcggcgtgccgccttcgcgtgcgacccggttcaccagtgcggcgcagttggagccgtaggtgccgccggcggcttcaatgtaggttttcactgcgtctgcagcgcctttgcggatctcgccggcatcacagtccacgccgctcatacgggtttgagcggtaaaggggataaagaccgcgtggctgtcggccaggttccgctcccggattccgaagcgctctttggccagcaccacaatggaacggccttccggcgtttcgtcgggcagggaactgagctgcgccgcatcggccagttcctgttccgtgcatccgtccaccggcagaaacgccacagcctggcgattgcccagagtgatggtaccggttttgtccagcagcaggacgtccacgtcgccggcggcctcaatggcgcgcccgctcatagccagcacattggcctgattcaaacggctcatgccggcaatgccgatggccgaaagcagtgcgccgatggtggtaggagccaaacagatcagcagcgccaccagagatacgatggaagtgggattggccatgcctagctggttggccgagaagagagaataggcgtacagtgatgcggtgaccagcacaaagatgatcgacagcgccaccagaagaatttgaagcgcgatttcattgggagttttcttgcggttggcgccctccaccatggcgatcatctgatcgaggaaactgtggcctgcttcctgggtcacgcggatgaccaggaagtcggagagaaccgtggtgcctccggtgacagcggaacgatcgccgcccgcttcccggatcaccggggcagattcgccggtaatggcactttcgtccacactggcggcgccttcgatgacttcgccatcggccgggatctgctcaccagcggagacaataaaaatatcgcctttgttcaaagaagcgccggaaatatcctgtacactgctgtggtcggacggatcggacagcttgtgagcgatcacatcccgtttggaagcgcgcagtgcgtcggcctgagctttgccacggccttctgcaatggcctcggcaaaattggagaacaaacttgtcagccacaggatcacagcgatcgccagaatgaaaccgctgccggtcaagccgtcggaaatgccgcacagcgacagcacgaaaagaatggaagtcagaatcgcggaaagatagaccagaaacataacggggttctggatctgctgacggggcgcgagctttacgaaggaatcgcggatggcgcgccccaccatagcctgatccacgaaggattgctttttatttgacatttctattacacctgccttaaccaattccaatcatttgggtaaattccgcgatggggccaagggccagagcggggagataactcagcgcgccgatgatgagcacgacgaggatcagtaagaatacgaacatggcattgctggtggacagagtaccagcgctggccgccacctttttcttggccgccatggaaccggcaattacaatagccgccgtcataggtacaaagcggacaaacagcatcaccaagccgatggaggtgttgaggaaaggcgtgtcgcagcccatgccggcgaaagcggagccgttgttgccggctgcggaagcatagttatacagcacctccgacagaccgtgggcgccgctgttgttcagagcatctgcggtcgaaggcagcagtgttgcaataccggagccgaccagaagggcaatgggagtggccagacacagcagaatggccatgcgcatttcgcgggattcgatctttttgcccagatattccggtgtgcggcccaccatcagaccggcgataaatacggccagaagcacaaagccgatcataccgtacaggccgcagcccacaccgccgaaaacgatttcgcccagcatcatcaacagcatggggatcatgccgccgatgggggtatagctgtcgtgcatggagttgacagaaccgttggaagcggctgtggtaaacgcagcccatgtggaagaggtggcgatgccgaagcgcgtttccttgccttccatattgccgatcatctgcacagcgccgtcctgtgcaagctgaggcgtaccggcctgctcacaggaagcgacgacaccgagtgcaaccaccagcatgataaacatggccaggaaaattgcgatgccctggcgcttatccttgacgcacttgccgaaagagaagcacagtgccacagggatcagcagaagcagcgtcatctcaaacagattggtcagtgcgttggggttttcaaagggatgtgccgagttggtgcccacgataccgccgccattggtgccggcctgcttgggagcgacctggctggcctggggatacaggggcaaatactgctgagtaacaatcttggcctctggcacgacttcgccgtctaccatgacagcgtcggtttccgggtcgatctctgcatcagaaagcacctcatagccgtctgcggtctgcaccacagcaatgggctcgagaatgtccacggttttgccgccacccagggactggggtacgcccagggcaatcagtgcgatggtgacgacaatgcagaggggcatcattacgtacagcgtggcacggaccagatcggcccagaagttgccgatgcctttttcgcgaactttcatcaagccgcggatcagggcaaacagcactgcaatgccgcaggcggcggaaacaaagttctgtaccgtaaggcccagggactgggacaggttggacagagcgaattcgccggagtatgtctgccagtttgtgttggtgacaaagctggaggcggtgttgaaagccagatgccagctcagaccctccatgccttggggattccagggaagaacgccctgcagcatcaggatggcgaacaggaaaatcaatcccgccaggttgaatgcaagagcgcagaacaaatatttcttccaccccatgttttcattttcattgatgtggagcaatttatagattccatt

SEQ ID NO: 140 - DNA, 32759 bp, Unknown
  16S sequences of unknown bacteria
gtccgcttcatatcggctgcacgaaaatagccaatccagccacggataaacacttttatctcccgcatcacgccgcggacattgcgtccgcgattgcgctttgtaagaagcttcagctttggacttcgtgttgttttgcacattcatccagattccacctcacgatggacacacttgccttcggctaacgcttcctgctgcctagcgcgttgtggtctttctccacttagttgttgcctatgccgagcgcgccaaaccaggtcaggctgccatgatatctcacggcagcctgaccttttatattattcattccgtctcttcccggtcggtcacgatcatgtcgatatcgttcttcgtacataccacataaacgcgcttcaacccgaatttcgagctgtcgcagaggaagtattttttctttgagcgccgtatgagcacccgtcttaactgtgtctcctcctccgagtaatcggtcacgacgtcgtcgcagtatccgtttgatgagaagaaaagcgcgtcgaagtttatcatactgacctcggctatcgcttcctcgccgacgagcgttccgctgcggtgcacgagcctcccgccgattatatgcgtctcgatccccttctcgtcaagcagctgtgcgagaattattccgttcgtgtagacgatcaccccgtggcattcggacatatacctcgccatataaaggcaggtcgacgacgcgtctatgaatatcgtcgttccgtcctcaatgagggcgacagcctttttcgctgtcttcgccttctcgagatggttctgcgacatgcggttgttgatcggcaccggaatgtgcatatcgccgttcttcatctccgcgccgccatagttcctgatgatcagaccagagcgctcgagatcagcgaggtcgcgccgtatggtcgacggactcatgaacgtcttgcgcgagatatattccactgtcgcgtaaccgctgtcacttatgatggacattatctcgtcgagtctttcttcccttcccaatccgctttaccgcctctcaatttttcagaccgccgaccggacgcggcgtcatctgtaaccgttctttttcagcacctcagacacatatgtcggatggttcgacgtgaagagctctccgccatactccgccccgcgcaggatctgctcctcagtcacggctccggcgccgacccacggatgaataccctcggcgatgaccgcgtcgtaggtctccttcggtgagatcggattgtcagatgtgtagaacaggcacgcgcagtagagtattttcgacgccttttcgctgttgttcccgagtatcgaatacggatgataaccgtgcagacggtactttccgccatacttttcattgatgtagagaagaaggtcgccctcaaaactgtttatgtacagcctatcgggagttattccgtattcctcatagagagatattatcctgtccgcgctctctttcgctaactcatctcccttttcgcgtatgtaatccttgaactcaaaattgaactgcatgttcttgtcgcgcttcgtgagctcgaggaactcgcggaaggtcggtatccgtgtgcccctgaacttctcgctgtacttcactccgaaatcgagcttcttcagttccgcgagggtcatgtccgacaccattccggtcccgtccgacgtgcggtcgaccgtcgcgtcgtggataacgacgatctcgtgatccttcgtcattctgaggtcgagctcgatcatgtcgacgtcaatcccgtaggcgtcggtgaacgccggcatagtgttctcaggcgcgttttcaacattgccgcggtgagcggcgacttcgattcttcttttcattgttcgtcatcctttcattaatcagatcaggcttgcgaccgatcagctacgataatttcccgaactgctccggaaaacgcgaagcgaaaaaatccggaagctcgtctatcccgcggatatacccgtccggcttcagccccgccgccagaaaatcctccgcggcaaaggtagttccgaccgccaccgtaaaagcgccggaagtaagtcccgccttgacgccgtttatcgtgtcgtcgaacgcgacgcaatccccgatcggcactccgagccttctcgcgccctcgagatacacatacggaaaaggcttcgcctgcgggacgtcgacagccgtcagtacagcgccgaaatcgctctccttgtacccgagcgcgcgcagattgtgcactagctttccgggtgtggcgctcgtacagatcgcgcagccgagaccatgctctttcacgaaccggatcgcctcacccgcgccggggcactgatacgctgaagtaatattctccccgtatacctcatagacgcgctcacgcatctccgggacgtacctgactccctgacgctcggcggcgccgccgatatagacctcgtcgccggtgcccataagctcgcgcaggtcgtcgtcgctgacgatggcgccgaactccgcgagggcttttttcgtacactcgcgcatcagctcctcgctgtcgatcagaacgccgtccatgtcgaataagactgctttaatcataaatacacctcagatcacatactctgaaaatattatatccgaaccgcgcggttttgtcaataccatgcgttcaaaatgagcaaatgagcaaaacgcgcagaaaatccagcggaaaatgacaatacaaaaaacagcccgggcgggctgttttctgtcattcgggaagtctgtccgagaacattatcgtgcatagaccgggagcgcgcaattccgacggcttcttcagcgcgccggatgcgacgagccgctcgatcacatacatcgagatctccgggcaggaattgtagagctcggcgacctttcgcatctgctccggatagcgcgggacgacaagacgcttcagcttttcggcaagctcatcgagaagcgcccgctcattctcatccggttcgggaatggcgctccagagctgacttttctcgatccacgtcgcgggacgggaacagattatgttcacctcgtcatccgcggtgagatagcccttctcacggagcctcatgtacttttcgatgtcctccggagacttcgttatcctgccggtcatgaactcgtagaggtattcgtagtcctgccacctgttgtccgcccagtcgatctttcttgtgtcatagaaggtagtgagctgccacgaccagaccgggtacttgttagtgtcgcgccgcatcggaccgcaggacgagtagagccgcatatcgaacggcaggtcgtaatgcttctcgaccaacgcgctggcgatatagcatcctccgtctggacgcttcaccttcagtctgtcatatgccgcgtcatcgaacgatttgttgaacttctcgcgcatagcgacggcgatgccgagccagtcaagaaggctgtcatcctttccgggaatgtagatatccgagcggtcaagacctttcagagcctcgaacacgcggtcaggatatgtcttcgcgacctctttcgcacacgccgtgtaaagctcatgcacctttatgtcaatttccggcgaagggtcttcaatcagcacgtttgtgagatacttctcgcctattttgtcaaggaagccgttctcctcgagagtgtcaacctcgtcctcaatccataccgggctggtgccgagctcgtcggctatctcactgatgctgcgcggcttgtgatacgccgcccaggcgatattctgcgcgagctttgatttcagatagtattcggtcgctccgttctttccggggcgtccgtcgtggctcagacatatgagtgtgatcggggctatgccaaggttacctgtgtttcgcattttcgtcattccttcccgaagctcgtcccgcgccgccgagagatgccactttaccgttccgaccggcaatgagagctctttcgcgatgtcggcgagcttcatgttcctgtagtagtggaggatgaggatctttctccgcagccttgacaggtaggcgatttcgagccgcagctttgactttgtctcggcgtcgagcagcttctcggtgaaatcgtccgcctccggctcgttgtcggagatcacaaacggcgctctcgccatctcgtctgtgaatctggcgcggacgttcatcgcgatcttccagatatagccggcgacattcggaatgttttcctgtttcagaagcgaggaataaacctcgagagttatcctcgaagccagctcctcggcgcgctcgatggagccggtcttcgacagagcgaagccgtagatcttgtttgtgtaatcgcagataatgcggtcggctgactccttggtcatacacctcatcctttcgtcggacgcttttcgcgtcttcatacatatagtggcgaaaaaatcgggaaggttggcaaattacgcaaaatcacgttttttcggaatatccgtgtctcagagcgcgttgtactcctcgtctgtcaccggctcgcaccattcgttgtgacagttctctccgggcgcttcgagcgctatatgactgaaccagctgtccttcttcgcgccgtgccagtgcttcaccacggcgggaatcataactacgctgccctcgtgaaggctcacgggcgtcttgcccgcttcctgataccagccctctccggcggtgcatatgagcagctgtccaccgccgttcgtcgcgtgatggatatgccagttgttgcggcagccgggctagaaggtgacgttcgcggcgaaaagcccgctcttcgggtcggtcaggggattcagaaacgagtccccgatgaagaacctggcgtaagcagtgttcgcggcaccggttccgaaaatattcgccttttcaaacgcttctttgttttcgtatttcattttcataatccctttctcattgaaattacagactttatatcttatccagacagccccgctgtcaaacgccttgacgctgtcgagcttcagtttcgtcaccgggcggttctccggaagaccgtcgaacacggcgctcattccgccgcgtccgtcgataccggcgccgatcagcacgctgacctcatcgagaagccccgcggtgaggaatccggcgtttatgtgcccgccgccgacgaccgccatccttctgacgtcgaaactctccgcgagaatcataacggtgcggcgaaggtcgatcctgtcctctccgcaggcaatccatgagattccgctgtcatcgagatacgcgatgtattctcggctgaccttttcggacatgacgatgagcggcgggcgctcgctgttgctgttatcccaaaggagtgttccgcgggtatccatgacgacttcatagccgtcggcatcgacagccttcgagaacgattccttcccaagcggagtcatagtcccggcgtgaaactctcccgggagcgccatctcgagagcggcggtgaccctgccgctgaccctcgtcggagcgtcgagcgaatcgagagtttcatagtattcctgcactccgggaagattttcggtcatggcgcagtcgatgcgtccgtcgaccgaagtcatcatgtggcatacgatgtatggtttcttcatttttcttttgtcctttctgtcggtatcatttccggtggttcttgacaaattccgacgggatacggatgttccgcgaaagcgatatagagtggctcagggtgatcggctgcatgaaaaaagctggaatgccgctgaaggagatacgccggtatatagatctcgtgctgaaaggcgacgacacgatagacgagcggctcgatatgttcaggcgtcagcgcgaggcgctcgaggctcggatggaggaactgcggcacacgattgagacggtcgactacaagtgctggtactacgagacagcgaaatcagcgggcacgaccgacgcgccgcgcgacatggacgacaaggatgtcccggagaaattccggaagatcagagatgagctgcggagcgtgaaaaacggctgatcagcgaccgcgagccggacggctcagagagccttcttcgggcagttcttaacgcattccatgcagaggatgcattcggtaccgttcttccggtttctcgtattgtcggtcgggtcgacgtccatcgggcagaccttccggcacttgccgcaggagacacacttcgacttgtcgcacttgacgcggaacagcgcgaaacggctcatcggcttcagaaaaacggttatcgggcagatatatttgcagaaggcgcggttgtcgtgaaacgcgaaggcgagagcgatcccgacggcgtaataagcgatattcccgacgatgaacgcgatgaacattatcctctcgatgttcccgaccttcgcgagaaagagagcggaaacgaatatcagtgacgcggcaaatgtgatataccgtatccacccgatcctcctgcgcggtctttccggcgtcttgtacggcagaaaatcgagcaccatagcggtccagcaggcatacccgcaccatccgcgcccgaacacaagcggtccgaaaatcttcgcgaccgcgtaatgtatggtagccgcctcaaaaacgccggtgaacaggtaataccagaacccctcgatctgcatattctccccgcagatgagcccgaggtaaacgagcatatagctgccgacgagaagctgcacgacacgccgcgcgtggcggtaattgcgcatatacagataaattccgagtgatatcgacagacctatgtagctgaaattgaagaggtagaaaatattcgattttgtcagccagagcgtgacggcgaccgtctcaaaaagcgtcaggattatcaggagcgggagtagttttttcattttcatttgattgtctccttcggtaggcggatcatgatgtgcggacataataaaagatccgttcgtcaaacattttagcacaaatatgttatgttgtcaagaataataacatgaaaacggaacttttgattttaatgggaatccctttgaaagtttatattgacatttacaattctgtctgatataatatacccgtataaattttatggaggacaacacgatgcagataaccttcacacctggcaggaaattgtttcgtatacttcttcacggtatggagtacgccttcgcggtaaactcacatggcgagctcataagccttcactggggcgctcctatgaactcggacgacgactatgagctcctgatgcccgaccttaacaccacctggcggacacgaggatgcaactcaggcgaatatcgcttcggtgctccgttcgactatgccgctccggcgatacgggtaagattcccagacggctcggaaactctgcggcttgaatacaggtcgcacgagataacctcagattcgctgatcatcacactctcagacagcttctacaagctcgatgtaaaactcatatacagaacctatggtgatctcccgctcatctcgcgccatgccgttatcgaaaaccacaccgacggaaaggtcatcttaagatcggccatgtccgcgacccttgaactcccgctcggagaagactacaggctgactcacttcgccggcgagtggggagccgagtatcagccgcacaggcagatggtcgggcagggaggcatatcactcgaaacctcgtatctcacaaacgcggcttcacatataatgccgttcttcgcgctcgacgctggcggacgctccaccgagacatttggcgaggtctatttcggtgcgctcatgtacagcggagatttccggattctttccgaaactatgcacacgcagatcatgaagcgcaccagcctgacgctcggagtgaacgaccgcaccgctgagattccgctcgaacccggtgaaagtttcgagacaccggcggctatagtcggcttctccgaccgcggattcgagaaaatgagcgagatactctacgactggcagtttgaccacatcctgccgcgaggaacaaacgacaaggctcacaccatacgaccggtcatctacaacacatggtatccttacgagttcagtatagatgagcaaaaactgatcgacttcatcccgaaggcgaaatacataggcgcggaactctacgtcatcgacgacggttggatgaaggggcgcaccgacgataagcacggactcggggactgggttatcgaccccgtaagattcccgcgcgggctcggttatatcgccgacaaggttcacgaagccgggctcatgttcggtctgtgggtagagccggaaatggtgaatccggactccgacctctatcgcgcgcatcccgactgggtcctgtctgagccgaaccgcgaccggacgctctcgagaactcagtgcgtgcttgatatgtcgcgcgacgatataacagactgggctatagactggctcgacaagttgataatcgacgccaagctcgactacctcaagtgggacatgaaccgtgagcagaccgagatcggccccgacagtctcgagcgcggcgtcgccgtgaaatacatgaaaaacatcgagcggatctggaagcacctgaacgagaggttccccgacttgctgctcgaaaactgcgcgtcgggcggcggccgcgccgactacggaatgctcccttacgccgaccgtgtgaatcgttccgataacgccgacccaattgatgtcatgctcctgcacgagggatactccacgctcttcgtgccgaagttagccggcggcgcgggcaatgtctcgccctcgccgaaccatgtgaataagcggtcggcgccgcttgatttcagagtaaacagcggaatgaccggctcgatgagcgtcggtgtcaacctgctcaaatgcgacgatgatgaacttgacaggctccgtgacgctgtggaccgcttcaaggcactccgaccgggtttgcaggacgcttacgtctaccgcatagcctcggctcacgagcacccttattctgtattgcagtatgtaaagcgcgacaagtcggaattcacgctcttcgctttcggtcacggtatgcggcagtgggacaaacagtcgctgcgtttcagaatgcgcgggctcgcgccggataagctctacgtctcggagtcgggagtgacggtcagcggagccgcgctgatgaacggcggaataacgctcggtatgtacggagactattacagccatgtcgagacatggaaagctatgaactgatactcaatcacccaggataataagaaatccgaggtcatttccgcgattttttccgcgaaagtgacctcagattatttttatattctcacatacgccccaagcatcggcgccgcacccgcatcatacgtgagccagccgccctcaatcgcccgctcgacataatacccgcggtcaatgagcgccgcgaatctcatgagattcagtacatggtcgtcatccctgagcgacttcggaagatcgtcggtcagtattgcgagtgagcgcttctgagcatccgagatgagttctgtcagctcgtctctgatttttccgagcctttcgcgctctgccttgtcgagctttgccgcgatgccggctttatcacggaataccacgacgcgcgggatatatctgccgccgtcccggcgtatgtatccgtactccgcgagcttcgcgaggtcgttcacgtcgcattcgtccgcttttccctcgcagaccatctgcaaagcctcgccgagcctgaacgtcaggttcggaacatatccgcgctccttctcgagcgaatagtacctgaactgctggaacgtcaccttcttttccggcgcgcccggctcattcagaccgcatccatgctttccgaccataatcggttctctgaagccgacgctctgataaccgatgatgtcccactccccgttctgagggcgctttgtccagacaaattccggcgccgtcctgaccctgtagccgatattgtcaatcgcctccggaagcagcgtccaccccgcgtcctcccgcgttatatatccgccgtagggatcgagcccccgcttttcgcaggcgtcaagataaccgtcgatcatctccataaagagcggagccgctttttccgccgcctccgacgatattttgtgaacgttctcctgcgccgcgcggctgattatcgggaaggtcgtctcgtatctgcttccggtctttttcaggaaggtctctcctgtcaggtattcaagctcatcctccatatacggcagggctataccgagcgcgagcgcgatatcctccgccgtcatcgggtttccgtagacctcgagaaatatgttctgataaagtctgtgctgcatgacgctccacggctgcccctcatccccgccgcgggagcagttcgtggtgaacgacacctcgtccggtctgtagcttctcgttccgaattcctttgccatgttcattccctctttcaatatattacgggcgcggaagagtctcgccttgactgtcccctccggaaccccgagagaccgcgctatctcacggacactcctgtcctcgatatagtacgcgacaatgacctcgcggtagtccccggagatgaacgcgagctcacgtctcagaagagacagctcctcactgtggataagcccgaggtccaccgccccgtcgtcggcgggttcagcgacggtcaggtcgacatccgcggtgtgttcgacccttatccgctttctctccgcccagacgctgtagcggtttctcgcgacacgccagacccatgccgggaaattctccggtcggctccctctctcaaggctcgtcagcaccgaaaggcatatgtccgcggacagatcctccgcctcatggctgttcccggtctttttcaggcagaaatagaacagctttccggtgaactcccgtataaacctgtcggcgtattcctttttatcggtcactgcgcgtcactcctctcgcccttgcacacatatagtgcggggtaaacatgatcggttgcaaaatatttcaaaaaaagagcgttcagacccttctgggaaagaacgccctgcgccgaggtcggaaaacctctcacgcgatatttcacatatactttgcctttatgtagtcgcggctgatcttaaggctgtcgaacgggtcgcccgggcaggtatcctgctcgacaacgtagtgcttcacgccgatcttctccgcgacctcgattatcccgtcgaagttgatgttgccctgaccgatctcggtgatgaactgcgagcccgccatgcccatgtccttgaggtgcagtatgtcgatgcgcccggcgagcttctccatccacgcgcgcacgtctccgccgccgtgctgaacccagtatgtatcaagcacgaaagaagtcgtcttcgggtcgagaccgtcggcaagaacatccatcatccgctttccgccgaccttcgagaactcaaaggagtggttatggtaagtgaacttgaagccgtacttgttgatcttcgacgcaaactcgttcgcctgcccgacgaatttctcaagcgcctcaaggctctcgcgcgcccatcccggcattccgccgatgccgatgttcttcgtgccgaggaggtcgtgctcctccatagccttgtccggatcggcaatgagctcttcaaagccgcagtgcgtgccgcagatcgacagtccggtctccttcgctatctccgcgaacttcttcgcgccgacgaagaagccggcggtctgaccctcgtcatagccgagttccttcagcttcagaaagctctcgcggatagaatcctcatccttcatagcgtcgcgtatcgtgtaaagctgaacgccgagtttctttatcatattttttcctccgtaatcacgcggtatatctaccgcttgctttttgttattataacattaatcgacagaaatgtcaacaggttcagtcaaaataaattgtctttcctgtcttcgccgactcatatacggcgttcactatccggacgctctttatcgcctcgagcgggagtatctgcggatccttgtggtcgagcaccgcgtcgactatattctcgaccatcgacgcgtgaccggtgacgagcatcggatccttcttctcggcgatgcggtttcctccgccgtacttttcgagcatttcctcctcttcctcatcctcgtcctccgagtccttcagtctccagcgcttcagaatgtcggcgtcagcctcgatcgttcctccggtgccgtagagctgtatgtcggtgctgatgcccggataagcgcaggtcgtgctgacaaatgtcgcgatggcgcccgacttgaaggttatcaccgacgccgtcagatcctccgtctctatcttgtgctcgtatatacccattgcggaatgcacgctcgcgacgtcgcccatcagccactgcatgaggtcgaccgtgtgaacagcctgattcataagcgaaccgccgccgtccatagcccacgttccgtgccagccgttgtcgtagtagtgctggtcgcggtaccacttgacggcgaaggttccgagaacctgctttccgagacgtcctgagtcgacagcctcctttatcggcttcatgaccgcgttgttgcggttctggtggacgattccgacggtcattccggtgcggacgcgcgcctcctcgattctctcagccgcctcgacagttatgtcaataggcttctcgcagaggacgttcttgcccgcctccatcgccttaacggcgtaattcgcgtgcatggcgctcgggaggcatatcgagacgatgtcgatgtccgggttcttcatcatttcgtcgaaatccgtatacgtgagcgtcccgggataacgcccgacaaccttgtccattttttcctgtatgaggtcgcagaccgcgataagctcgcacctgtcatacgccgccgcggcgtcgacgtgcgcctttccgatgccgagtccgacaaccgcgtaaccgatctttccgtttttcattgtgtactctcctgactatacgaaccttgtccggcaggacactgtccgttattttatatctattataattataatacccgcggcggaaattgtaaaccccgtcgggtttttttgcgcgaaaaactatatctttttccggatatgtggcaaaaagcgaaacattccgcatctttattatagcaggtatatatgaatattccatgaatctgacgaataaacggcggaatccggatgagtttttttaatttctgactcttgacaaccgtgccggacagtggtataatatctgtacaatccaaaacatttgaaacgatacacgccgcgggcagatacgacacaaatggtatccgccgcggcagtttctttttttcacctgatggtccgcggcgcggaccttttgttttttcgcggcgtgtcaggaaaggaaaaaaatcatggaaaccacaaagcaaaacgactttttagagcgggaaaagcccgggaaactcatggcgaggtacgctgttccctgcataatttcgcttctcgtcgcggcgctgtacaacatcgtcgaccagatattcatagctaacgcgccatatctcggctcatacggaaactcggcgaacacagtcgtttacccgctgacagtcgtcgcgctcgccttcgccgtacttatcggcgacggatgctgcgcgtatgtcagcataagcctcggcgccgggcgcggtgaggacgccgaaaagagcgtcacgaacgcgataatcctcagcctggcgttgagcgccgtgctgaccgccgtctatctcatcttccctgacgccataatcacggctttcggcggaagggttaacgacgagaccttcaggtgcgcgaaggaatacttcttctggatctcacttggtataccgttctatgtcttcggacaggcgatgaacccgatcatccgctcggacggaagcccgcgcttcgcgatggcgtgcacgctcgccggggctctggtcaacgtcatcctcgacccggtcttcatctacccgatgaaaatgggcatggcgggcgctgctgtcgcgacgatcctcggtcagatactcaccgccgccctctcggtctggtacctcgcgcacatgaagactataaagctgacaaaaaagagcttcaccctgaaaaaaccgctctacagccgcttcctgccgctcggcatcacgagcttcatcgcgcagatcgcgcttgttctctctatggcggcgttccagaacgtctgcatgaaatacggcgccatggatgaaatcttcggtcttccggaatactcgcagattcctatggcggtcatgggaatcgtcatgaaattctatcagatagcgatctccgccgcgataggcatggcagccgggtgcataccggtcgtcggctacaacataggcgccgggagaaaagaccgcgcgaaggctatattcacgagacttctggtatgcgaggcggtgatcgggtttatcgggcttatcttcgcggagttcttcccgcgcgggctcatcggcatattcggcgccaggaacgagagcgcgtattacacggatttcgcggtgaagagcttccggacatatctctgtctgctcccgctctcgactgtcaacaagggctcgttcatataccttcaggcgctcgggaagccggttgagtcgacgctcatctcgctgctgcgcgaggtcgtgttcggtgtgtccctgccgattataatgcctgtattcatggggcttgacggaattctctggtcattcccggcgtctgacctgctgacctttgtcatcgcggtgttcatcatcgcgcggacttacagagagctcgacggtgcgaaaagttcttcatctatgtaaaaatcacatataaagtcatctgaaattcggctcaaatgattgacttttccgtgtgattgtgatataattatttgtactgtgtcttcacggtacagataaaaaacaaggaatgggaataatcaggaaaaatgaaaaaaagaattccggcaataattctcctcgcggcgatgctcctctcgatgggctcctgcggcagcggcggcaatggaaacaacaccgacactacagcggcaaatgacacgacaaccgacgcggcggcgacaaccgactatatcgacacgctcggcgagaaggatttcggcggcaaaacctacacgataatcgccgcgccgaacaaccttatctcgatactcaatatgcagtcgggcgaaatcaccggtgaggtcctcaacgacgagcagtacaaccgcgacaaggcggtcgagaagagatacaacgtcgtcatcgactaccccgccgccgacccggacaacaccgacaagatggtgacaaacgcggggctcgccggcgacttcatcggaaacatctatatcgacgcgctctgcgaaggaacgagcggaatgtcctccgtgttcactcagggcagcctcatgaacctgctcgacctgccctacctccagctcgataaggagtggtggagcagcctcacctataaaaatcttcagtacaacggcaaaatgttctacacatccggcgacctcgcgatcaactccttcatcggcgcgggctgcgtctatatgaacaccaacctcgctgaaaagtacggcgtcgacgagaacgcgctctacaaaaaggtctacgacggcacgtggacgatagatgaactatacagcatcacgaaggacatggatctcgacctcaacaacgacggcaagatggactgcgtcaacgacttctacggtctcgtccttgagtcgaacacgctgacctcgaacctcctgctcacatcctgcggcgtgcacctctgcgacaccgacccggacaccggaaacctcaccgtaaacctcggcgtccagaacgtggtgtctataatcgacaagctcgcaaatgagttccagctgatcgacaacgcgggcgacaacacgaacctcttcgacaaaaacttcaagctcgacaagtcgctcttcgcgatacactatgtcgagtcgtcgctccgccgcttccgtgacatggagagcgactatgtcatctacccgatgccgaaatacagcgctgagcaggaaagctacgtctccttcctcaacccgtgggtgaaggcgttcatcgccgctccgattgttcaggaggacaaggagatgaccggcttcatcaccgaggtgctcgagtacatgacggtccgcgacgtcagaccggctgtcatcgacatcaccctcaagggcaaggcactcagaaacgatgacagcatcgcgatgctcgatctgatctttgacacgacctacattgatttcaacggcatctacaacttcgggaactccctcggagtggtcaacaacgcgatattcaacgataagccctacgcgtcctcttacgcgaagatcgagtcgaagatgaacggcgcgctcgacgatttcatgtcgatgttcgaataatatatccgtataaagtggctgccgcgcgacgcgcggcggtctcttttcttatgccggaaaaaatacgtaaaattttctccttaaatttcgctccggtgctgtacaaaccgggaaaaatatgctataatatagaaaacgacaaggaaaggacgccggacaatgcctgagatcccacaaatagaggtcggagacatactcgagatgaagaagaaccacccctgctcgccgaagagcacgcgcttccgtgtgctgcgggtcgggagcgacatacgcatagtctgtgaaaactgcgggcgggacctcacgatcccgcgcatcaagctcgagaagaacataaagaagataatccgccccgaaaaagcggacgcgcagccgtaacgcgctacggaactttttgccgttccgcgcgtcaaatattaaagcaaaaaacgggcgccgtttccatgacggctccgcccatgacgaaaggagacatccgtcacgctccgccgtggcgaatctgatatggacaacgagataaccgttcccggaggttccccctcgccctccggcattaataaaaacgaaccggcgcgacgggtgatatccggcgtgcgggactttttcgcgcgggtgacggcgccatttgccgggatggggcacctctggatggcgttcatcctgccagttctcataatggcgctcatatatgtcgcgatggaggtctggccgttcggcaagagctccgtactcgtactcgatctcaacggacaatatgtatattacttcgaggcactgagagacatcctgcacggcgagcaggggatactgtattccttcgaacgggcgctcggcggggaatttctcggtatcttcgcgtactatctcgcgagcccgttctcgttcattgtcgcgctgtttccggaaggaatgatcactgaggcgctgtatgtcatactgctcctcaaatgcggtctctccggaatgaatatgtgcttctacctgcacaagtcacacccggtgtcgaagatatccgaggtcatcttctcggtgatgtacgcgctgacctcctacgcggtcgtcatgcagcacaacacgatgtggatcgactgcctgctcttccttccgctcatcttcctcggcgtcgagtcgctcatcaaatataaaaaattccggctctacacgataaccctcaccgtcgccgtgctctcgaactattatatcggctacatggtctgcatcgcgaccgcggcgtatttcttcttctactactgtctctgcacgtcgtccgagcgcaacccgctcggcgagagagcgcacttcataaagacgctcgggcgcatggcggtcttctccgccctcgcggtcggcatggcgtcgataatgatacttcccgcgtactactcgctgaccttcggaaagaccaccttctcgaacccgaatttcagcttcgcgcagaagttcgattttctcgaccttctctcgaaaatgttccccggctcatatgacacagtcagacccgagggctggccgttcgtcttctccggaacgctgacgacgatactcctgccagtgttcttcatgatacggcagatcacgccgagacagaagatcgcctacggcgcgctgatgggcttctttgtgttcagcttcaactcgacgacgatagacctcgtctggcacgggttccagagaccgaactggctcaactaccgctacagcttcatcttctgctttgtcatcatagtcatggcataccggacattcgagtatatacgtgagatcgacataaagctcgttctcggtgtcggagctgtcctcggactcctcatctgcgtgattcagaaactcgactacgagaacacgccagacctcacctcggtctggttctctatcgcgatcatcgcggcgtacatgatactcctcgccggatgcaaccacaactggctagacgggtcgattaagaccatactctgcgtcttcgtcgtcctcgagatgttctgcaacggtctcgccgagtgcgtctctctcgactcggacgtacactacagctcccgcgcgtcatacgtcaatttcatgaagaagtggagcccgatcgcggagtggatgaacgagaccgacacctcgttctaccgcgccgagaaaaccgagcaccgcaagactaacgacaatttcgcgctgaacatccgcggtctgtcgaactcgacctcgacgctgaacaccgcgcagatcaaatttctcgagcagatgggctactcgtcgaaatcccactggtcgaaatacctcggcggcacgccggtcgcggacagccttctcgggataaaatatataatgaccctcgacacgaaggagatgaacgacgtctacggcgagccgatataccacgatgagaaaaacgagactgtcatctacaagaacgattacgcgcagtcgctcggctacatggtgaattcctccgtcgcggaatacgacatggaaaaagaggaatcgcccttcgaccgcatgaacgaccttgtcacaaagatgctcggaagcgacgagaagatcgagctcttcaaggcatacaagaacctgaagccgacgaccgagaacgtcgacctcgcctatgtcaccgggcacaagaaatactccaagaacaacacctcccgcgccggaaagatcatattcaccttcactccggtgaatgaccgcgagatattcgtctacttcccgagcgactaccgccgcgacgcgaagctcaaggtgaacggcgccgacgtctccgagtacttcacgaacgagacctgccgcatagtctcgctcggaaagcgtcccgccggcgaggagctgatcgtgtcgctctcgctcgagaaggacgacctgtatatcgcgaacggaaccgactatttctggtacctcgacgacgagctcttcgaggagatcatgcctgagcttcagaaacagggattcgatatcacctccttcacagattcgacctttgacggtaagataaccgcgaccgaggagcgctcgacattccttctgacgataccgtatgacaagggctggcacatctatatcgacggcgttgagaccgaatcctatgagacgctcggcgctctcaccgctgtcgacctcgagcctggcgagcacacggtccggatggtatactggccgtggtgcgtgaaatacggacttataatctcgctctcatccctcacggtgttcctcatcgttctggcagcggacttcgtgatccgcagaaggagaccggtgatagagttccgcgccggggcgagagttccggacgacatctatttcgacatggacgacgccctgccggatccggacgacattcccgagaaccctgacgatgacacagacggcgcggcggaaacgccaacgcccgaatgcaaggatcagaccccgtcggagcataaatcggaaaactgaatatggcggcggacgcttcagacaggagcgtccgcttttctgtacgcgaacgcgaaattacacactgagttcattgtttcttcgctgaatatataaaactcacgcgctcacgacaccaaactccggtgcgtgtccacaaatcagcaaaatccacaatcagacggttagtcttgactaacttgctgtgatgtcctacaaaccttgattttttgccggaaaacccttgacaaaccggctcggttggaatataatattatacggttagcaggtgctaattttagcggaagctaatctattttgaagccatatggttagcgcgagctaatcatgggctcctgagaaaggaagaaaaaagaaatgatgccgcttatcctcggaacccctgaggaaacctacataatcaagaagatcggcggttcgcccgagacgaagaagcatcttgaaaacctcggcttcgtcgtcggcggaaacgtcagcgtcgtatgcgagatcggcgggaacctcatcgtgaacgtgaaggaagcccgtgtcgccgtcagcaaagagatggcgcagaaaataatgatataatttatttctataattaaggaggcagaacgcaaaatgaaaactctcaagcaggcaaagataggcgagaccgtaaaggtcgtgaagctccacggcgagggcgctatcaagcgcagaataatggacatgggcatcacgcgcggaactgaaatatacatccgcaaggtcgcaccgctcggagacccgattgaagtcaccgtccgcggctacgagctctcgctccgcaaggcggacgccgacatgatcgagatagaataacaatattccaagtcagaaagcgggatcggcaggcagagccctgagccgcccattcacaatgagcttaagccatccggttagcaagaactaacggaatggcagacgaaatttcatgaaagaaggatttgaaatggatatccgcatagccctcgcgggcaacccgaactgtggcaaaaccacactgttcaacgcgcttaccggttcgaatcagttcgtcggtaactggcccggcgtaacggtcgaaaaaaaggaaggtaagctgaaaaagcacgagggagtcatcatcaccgacctccccggcatctattcgctctccccgtacacacttgaggaggtcgtcgcgagaaattacctcatcggagagcgtcccgacgctatactcaatatcatcgacggtacgaacctcgagagaaacctctacctcacgactcagctcgttgagctcggcattccggtcgtcatcgcgataaacatgatggatatcgtccgcaagagaggcgataaaatcaacattcaggagctctcccgcgagctcggatgcaagatcgtcgagatctccgctcttaaggaagaaggcatcatggaggcagcagacgccgctatagacgccgcgaagaacacgaagaccatcccgcagcacagcttctccggaccggtcgagcacacgatcgcgcacatcgaggaggctgccctccacaatctacccgaagagcgtcaacgctggtacgcgataaagatcttcgagcgcgacgacaaggccatatctcagctgaagctcgacaagtcggttctcgaccacatcgagaacgacataaaggcggtcgaggaagagctcgacgacgactccgagtcgatcatcaccaacgagagatacatatatatcgcctcgataatcaaggcgtgctacaagaagaaggacgccgggaagctctcgacctccgataagatcgaccgtgtcgtcaccaaccgctggctcggtctcccgatcttcatcgtcgtcatgttcctcgtttactacatctcgatgatgactgtcggttccgcggctacagattgggcgaacgacggactgttcggagacggctggcacctgttcggcatcggctccggcgcttatgaggaagccgacggcgagtacagcgactctctcaacgcgatcaacgctttcgtcggggttgaccccgaggccgacgatttcgacgcggctgccgctcttgacgagatcaaagcttatgtccccgagtcggacaacgccaccggcactgtcactgttgaggatgaagagaccctcgcacagaccgacatgaccgtctactattcgaccgttcccgctgacgccagcgaggatgacacgataatgacctcctacaccgacgccgtcagctactttgagacgaacggcttcgacgctcccgacccggccgacttcggtgtctgggtacccggtataccggtactcataggaaacggtcttgaggcggcaaacgctcccgaatggctctccggacttatccttgacggtatcgtcgccggtgtcggcgcggtgctcggcttcgtcccgcagatgctcgtcctgttcctcctgcttgcggctcttgaggcgtgcggctacatggcccgtatcgcgttcgtccttgaccgtatcttcagaaagttcggtctctccggcaaatccttcattcctatgctcatcggcaccggctgcggcgttcccggcatcatggcatcccgtaccatcgagaacgagcgcgaccgccgtatgaccatcatgaccaccaccttcatcccctgcggcgctaaggtgccgttcatctcgatgatcgcgggcgctatcttcggcaactccgcgtgggtcgcgacgagcgcttacttcatcggtatggctgctatcatcatctcgggtatcatgctcaagaaaacgaagatgttctccggcgagccggctccgttcgtcatggagctcccgccgtaccacgttccgacggtcccgaacgttctccgttcgatgtgggagcgcggctggtccttcatcaagaaggcaggtacgatcatccttctgtccaccatattcgtctggttcaccacttacttcggcttcacgcctgacggcttccgtatgctgtccgaagatgagatcgatatgtccatcctcgctgctatcggcggtgctatcgcgtggatcttcagacctctcggctggggcaactggcaggctgctgtcgcgtccatcaccggtcttgtcgcaaaggagaacatcgtcggtacgctcggcatcctctacggcggcggagacggctcggtataccagaacatcgcggcagccttcaccagtgtcaccgcatactccttcctcgttttcaacctgctctgcgctccgtgcttcgcggctatcggcgctatcaagcgtgagatgaacagcgcgaagtggacatggttcgctatcggttatcagtgcggcttcgcgtatgttatcgcgctcatggtcaaccagttcggcggactcttcaccggaagcgtcaacgtgatcggtctcatcgtcgcgatcgcgctgctcgcgggcatgatctatatgctcttcagaccgtacaaggaagcaaccagacttaccaccacagtaaaagtaaactgattgccggcggtacatcacggaatacacaacgggaggcgtcagaaccggcgtctcccggtttttatcttccgaaaggagtgtgaaaccttgaccggacagaaaagcacagacggcgacatacgcctgacctcttcaaacatcaaatacctgatcaccctcctgcgtctcggcggcgactccggaagcgtccgcgggaccgacatcgccgcaagtctcgggataacgaagcccagcgcgcatacgatgctcgtcagtctcgcgaaaatggagctcgtcaggaaggaccactacggcggggcgaccttcactccgaacggactgactctcgccgagaaatatctttcctgttatgaggcgcttgacgccgagatcggcgggctgttcccggacgagggacaggctctgtcgccgatctgcgcgctgctcgccgagatgcctgaggaaagcctcgactcgataatcccggacactgccggaaaggcagggcagtgatcatgcgcaccgcgtcagatatcatattctcggcgctgatcacggcggcgataatcaccgcgttaagttttatcaggaaagcagctcgcgggctgcttgaaaaaatagtcaagaaaaactgataccgcaaaacaccagaaagaaggatattaaaatgctccgtataacctgcaagatagacggcatgatgtgcggaatgtgcgaatcccacatcaatgacgcaataagaaagaatttcgacataaagaaagtctcctcctcccacacaaagggcgagacaatcatctcgagcgaaaaggacatagacgacgcgaagctgaagagtgtcattgacgagaccggatacgagctgaagagcgttgagcgctccgacattgagcaaaaaggcggtttcttcgggctcttcggaaagaagaaatgaatcaccgccacacgttgatacctccgtgcgccgccggggacgtatgtcccgggtcggaaaacgacgcggaatgcgtaatcagccgtatagaggacgccgacggcggaatcgtgaccctgcgcgcgttccgcgtgtttccggggatcaccctgatctaccgtgacgtcgacacgcgcgggcgcatcgttccgccggagcggagcgggaccgtgtttacaattgagcactgtcttgaggggcagatcgggttcgagaccgggagcggcgtatgctgtctctcaccgggcgacctctcgatcctcagcgcctcggacatacgcggcgtatactttcccggtgagagctgccacgggatatctatcgagatcgataccgcggaaactccacggtgcctctcctgctttctcgaggacgtgaaggtcgacccggcgggtctgatgcgcgggttcaccgagaacggcgggagctacacggcgcgctcggacgccgcgatcgcgcatatattctccgagctttacagcgtgcccgaaagcatccggcgcgggtatttcaaggtcaagatactcgagctcttgctctttctctcgaccgtgccgtccctctccgacagtatacacccgagagccgcgacgcggtcacaggcagcgatggcggacagcatgagcgcgtatatctcggagcacctcgatgagcgcgtgacgatagatatgctgtcgcgtgagttccatgtctccccgacgcagataaagacagggttcagagccgtctacggcgtctccttcggcaggttcgccagagacatgaagatgcgcgcggcggcgggactgctgcgctcgaccgaacacaccgtgctcgagatcgccggaatggtcgggtacgacaacgcgtcgaaattcgcgaaggcgttccgcgactcgaccgggatgtctccgaacgagtaccgctcggcggatgttccgaccggcgcgtaacccgtccgtatggagtggatttccgtccgtatggagttgaacccaaccgtccgatatgctataatatcagtacaagaacgctcgcgggagtgagcgttcggtttatccccacaggttagcaactgctaactcaaggaaaaggagttaacaaatgagtgttgtgataataggcggcaacgagtgcatgacccgccgctacaaggatatctgcgaggaatatgactgcgacgcgaaggtatacgcgaaaatgagcgacggaatccgcgggataggctccccggaccttatcgtcctcttcacggcgacaatgtcgcacaagatgctgcacgctgttatacgcgagacgaaggggcaggacgtccgcatagcgcgcagccagtcgagctcggtctcggctctgaagaatctgcttgaagagcacaccggatgtctgaggaactgatagtcgacttcgcgtcgccgaccctcgccgggataaagaccgggagcctattctcgggagagtgcggcgggaaagaggagctctccgaattcgccgcgcggatgaaccgccgcctgacgccgcacgggctcaggctgatgccgctcaggttcaacgagaagcgcgcgctgatgtatatctaccgcccggaaaggctccgtgaggatctcgacgacccgctggcgaaggaaatactcggcgcgctcggatacccgcttgagagcggcggacgctgcatcgcgaagctcgcgaaaagagtgcgcgaaaacaagacttttccgcacgagatcggacttttcctcggatatccgtcagaggatgtcaaaggcttcatctccggcgagaaaccgaaatgcacaggcatgtggaaagtctacggcgacatcgactccgcgaagtcaaaatttgacgcctaccgtaactgcacgcgcatcatgcgcgaatactaccgcaggacaaaatcgatggataaactcatcatgggttgttcataatacccgtcggaagtgaccgacaaaatttttataataatctaagaaagggaataccaattatgaaaacagcagttgtatactggagcggaacaggaaacaccgaaacgatggcgaacgccgtcgcggagggagcgaagaagaagggcgcggaggtcactctcatgacgtccgctgaattcgacgcgtcgatgatcgacaatttcgacacgatagctttcggctgcccggcaatgggagctgaggtcctcgaggaagaggaattcgagccgatgttctccgcctgcgagccgaagctggatggcaagaagatagcgctcttcggttcctacggctggggagacggcgagtggatgagaaactgggaggagacctgcaaggctgacggcgcgatcctcgcctgcgacagcgtcatctgcaacgacgctccggatgacaacggaatcgccgagtgcgaagctctcggcgccgctctcgcgtaaaagacaaaaataagtccggacgatatccgcccgggcttttttcttgctccacacttccggtcatatgtcagaattgtaaatattacgtattatacttgaaatctgccgcgcaaaatgatataattattggtaaagggaatcaatgaaagaaggaaagcaaaatgagattcgatctgagagaaactgcggcggaccacaccgtaatctgtgcccaccgcggaatatggggaggaaacatcccatgcaacaacataaaagcctacgacatagccctctcgcagggagcggacatggtcgaaatagacgtgaccagagccgcagacggcgagctgttcatcttccatcccggcatggaaccggctcatctcgggaagagcgtcgacatacggaaaatgaactcggacgagatccgcgagctccgttatgtgaactacgacaacgtcccgacgacaacagggctgaacacgcttgatgaagtgctcgaacacctgaagggccgctgcttcataaacgtcgacaagttcggcgacaatccggcggagatcatagcgaagctcgcgcggcacgacatgaaggaccagatagtcctcaaatgcgcgccggacgaggcgagcctctctgtcatcgagaagtacgcgtcggatatccagtttctgccggtaatatggaaggacaacggcacgcacgagatgcttaaaaaccgggatataaactacgtcggcgcggagcttcttttcaggaacgaaaacgaggacgtcggaagagccgactaccgcgaactgctacaccgcgatagaaagctctgctggataaacacgatagtttacgactacagagcggtcatctcagccggacataccgacgacgcggcgctctgcggcgacccggcctccggctggggctggagcgcggacaactttgatataatccagaccgactgggtcctcgcgcttaaggactacctgaaaaagaccggaagaaaatgagtcggaaaaatatcccgaggggagcgtcccttcgggatattttgtatggaaacactgaataactcgggttttcgcgaaagcagccttaaatcagtgtttccttatatctcgcatatatacatcccgccggcggtgggttcgtccgggcggggctttttcgccttcgcggttgttatgtacatggtgttcccgtggacgcagcaggcggtgacgtcctttacaggaaggaaaatcgtatccatgatctttccgtccggcgaataaacgcagacacgcccgccgccgtcgcactccgcgacgcaaatacgcccgtcggaaaggacgcacattccgtccggcagcccgccgtcagtcaccgtgtgaaagacacggcgctcgctgacgtccccggtcgcgtggtcgtaatcgtaggcgtagatgttcgccgacggcgtgtcgataaaatagaagactttgccgtcgggtgagaagcccatgccgttcgccgttgtggcgccggtgataatcttcttcaaggtaccgcccgggaatatcgaaaaacagccgctcatgccggtcatgggctctgagtcgcccttcgttccgacgagtatacgcccctcggggtcgatacagccgtcgttgtacctgaacctcgtatcggtctcaggatgagctataagagtgagctcgccattatccgggtcaaaggcgtaaacgccgtccttaagcgccgcggcgagtcttccgtctggcatcagagctatccagccgacgagcgacggcatcgtgtaggttccgcacgagtggtcctccggagatatcgcgaagatacgtccctttcgtatctcgatcgcccagacgacgtttctcttttcgtcatagcacggattctcgagcagcaccgcgctgttgtaatagaataattccgcttgtttctccattttataaaatctccgtttgccggtccgcgccattcgcggggtgtctcaccggctggtgcgacgcgatgtacctctcgagtatcgacgccgtttcggcacagatatcgccgcacgggcgttttctgtaatattcgctcgtccgctccgacgggcgaagcgggtccgtctccgcctcacggataccgagcagctcacggcagattatcgttccatgctccgcgcggaatgacgacgctatatcctgtacgacggcgtagactctcgctttgccgtcgcgcttctcctcatctgtcgacgggtcttcaccgccatacagctgcgctacgacgaacagagcgccggacaatgtcccgcaaacctcgcgcatacgccccatcccgccgccgaacggctgagacagcctgagcacgagtgtttcaggaagcccgatgacatcggcgtaagcgcccgcgaccgactgagcgcagttgtagccggagagaaacagctccttcgcgcgtcttccgcgccctgttatctcagtcatctgtccttcgccggtcggttgcgcttctttatgccgcggacatctcggagcatcttcaggctgtcacggaagacattgaccttgctcgcgcggtggtttatgaccttgaccggcatctcgcgtatcacggcgcccatattcttcgcctttataagtgcctcgaaatcgaacgcgaagccgtccacctcacaggtgctgaatatcttccgcgcggtctcccgtctgaagcacttgaatccgcactgcgagtcgctgagcctgaaccccgccgcgagcgcgaggcactttatatacgtcttcgacgcgatcttccggagcagcgtgtagccctcgtagccgttctttgagaggtttctcgacccgattatgatatcagcctccgggtccttctcaaagcgctccacagcctccgcgacgacatcgagaccgtacgcgaggtcgcagtcggtgaagattacgatattcccttcggcggcgaggacgccggtgcgtatcgcgcagccctttccgcggttcttttcgtatccgaccgtccgtatatgatcgtcgccgaaggactcaaccttagcgcggcacccgtcgatgctgccgtcgtccgagaagatcacctcgtaatcatatccgtcccggttcccgaaggtcttcttcatatattccgaaaccgtccgcagtgtcgcgtcgattattccggattcattgtacattggtatgcagagtgaaattttcatctgattttacctttcatgaaggtcaatattattttttccggtagacgaatatatcgaaatccgccgtcacgtcaagcgagtctatcgcgtcgagcttcgacatatcctccttcgacgtgcggaacgcgtacggagtcataagaaacagcgcgtgcagagcctcgctcccgcaattaaaggaatagctcagctcctccgccgacacctcttcgaatccctccggaaggtcgcgtctgccatcgttttcgtacgcctcagcgtagaccgcccttttcagctcatagaggtgtcttctcccggcggcgccgacaatcaggtatccgccgggtctcagcaccctcgcgaactcgttctcggcaatcggagcaaaaagacttattacggcgtcggcgcacctgtcgacgaccggcatctcaaatacgctcgaaacggcgaaggacgcgccgctgccgctcttcttcgccctcttcgcggcgtgatcgcaggcgtgctttgacaggtcgaaacctatgacgtccacggttcttccggaagctctgagcgacaccgcgaggcggtcggcatagtatccctctccgcacccggcgtcgatgacgacggcgttttttaccgtctcaagcgcccttgacaccgtcgagtttatcacgtccgaaaatcgctcatagcttcccccgtcaaggaaggaagtgcgcgagcggaccatgtccctgtcgtcgccggaggtgccggacgccctcgtgagcgtcacgtatccgctcctcgcgatgtcaaagcagtgacgcttcgggcagaaaaggctgttcccctctctcgtcatcccgccgccgcagaccggacagcgcagtatatcttctcccgccatattacttctccacctttatgagcttcgcgtggagcgcgtagcgcccggtgctcgtgaagctgttcgtgcaggtcgagagcgttattatgtggtcgctccccgtgaacttcatgttcttgttgtacagcgactgctcctgcatcttttcacagaaggacacgaagtccgcgtcgtcctgaaaacgcatcctgaaatactggaaggtcgagatcgtctcgaatatcgcgaacggctcataggtatagatcccgtcgagcgtgtatatcgtgatgttcgtcgaattgaagaagtcctcgtcgaggaacttcgtcacgttgttgaacatcgtgccgttgttcatgttgtgcccatagaggaccgtgttgcggttgtactccatgttcttgtacgcgcggtagtcggcgaagatcgagccgcacgccatgtactcgtttgtgtaggcgtgatcgaggtagtaatcgttgtcctccccctgcacgatcgggagctgtatcttcgtgtccgggacatagatatagccgtatacgtccgggttcgtcgtctggagatactgtatgttcgccttcatccgctcgaagtcggcgttgtagctgccggtgccgtattcctcctcgagctcgctgccgtcggaagaaagcccggtgtaatagtcggctgtcggagcgctctgtctcgattgcagcgccatcgccaccgcgtggccgctgccgagggttccgtcgaacatattgtccgcgatcgagctgtagaggtcgtcgccgcgcttgtagtcgacaaagctcctgacaagcgtcccgccgctccacagaaacactccgacgcaggcgaccgtgatcgtcttgcgtattatctcgcctatcagctcggacgccgacattttcttcttttccggcgcgggcgcgatatcgtccggcgtgaggtcgttcagcgagcgcaggaagtccgccgactccgagcgctcgaccggagtcagctcatatatatcgtcgccggtctcgaccgcggtcttcttttttccgaagacatcagccagagcggcgcgtatcctgtcttttatatcattaaaattcaaaaaaacgtcctccgttaattacttatacggaataattataacccaaccggcggagaattgcaagggtttcggcgaatctttccggatattgttacagatagataatattttgccggtaaatatcacctccggacgcgaaaaaacacgtgaccctcacgcgccggcgcgatcatcacgtgtcgtattttcagatcagaatgccgccacaagcgagaggagcggcacaatgagcgccttgtcgccgcggacgcgcaccttgtccgttttccgctcaatgaacgcgtccagcttctcgagcgccatcgtaacagcctcttcaccaagtccgctcttttcggatatttcgccgatacccgtgaagctgtcatccgaaccgcaggtaagattgaaggccgccgccatcacgcgcagcgcgtcctcatccgcaaagagtctcagaatacgagcggtatcctttatctggctgtcacaggtgaaacgagatctgttgtccgagaagatcaccgtcccgccattcatcgcggttgatatctccggcgtgcctaccgaggacataccccactcgccgcgctccgcgtgatctattgcgctctccggatcgaatccgggattgccctcatcagccatcaggcgcgagataagcgacgcgtgggtcacgaacgccagtttcagcgcgcactcataggcttcttttccggagagagcgccgagcgtttttctgaccgccacgacggcgtccgcgggctcatcttccttcacgtcatgaccaaagagctcgtctgtcgtgacgccgaaatagtccgctatctccggtatcagggatatatccgggcagcactgtgaagactcccattttgagaccgcctgattcgtcacgccgagcgcccttgcgagctcctcctgcgttatgttctttctctttctgagctccgctattttttcgtttatcatgtttctccattcctttccgatgatatgagaacaactccctcatctgattcaattatatcagataagagagttgaaatcaataacggtgtggtttgagccgaaaattcattttccaaccgtaggttggatggacaatcagtcgaccttcgcgagatatgccttctgatcgtcgctcagaacgtcaa

SEQ ID NO: 141 - DNA, 21165 bp, Unknown
  16S sequences of unknown bacteria
cgatacttaattgctttgtttgccatttttcttcccctgtgacattatgtactgcctgataatatctacggtagctccacttgtctgttagatacgactgattgtaaatatatcatagtacagcaagatgaaggagtcaagaaatcgccgtgttaatcacaattcatcccaccacttatagaagtaggggatttcttgctcacggcgtgttaaatatcattcgtccctattctttctaaaaaacatactataacttatcgatttcttctgctgacagtcctgaggtttcagcaataatttctatagaaacacctctgtcttttaatgcccttgctatctcaatctctcgctccgctctaccggaagcctctccttcagttctgccctgttcaagaccctgttcaagactttgtttttgggcctgttccagacccttctcaaggccttccttcaggtctctttcatatttcttttcatacttattttcgtaaaagagcctcatctcatcttcaaccgacatcatatgctttatctcctcatcgtcctgaaactctctgaccctcgcatctatcttttcgatgaagtcatcttctcctgcaacctcacctgtcttaagatattcaaacagcggtctgaacctttcaggcactttccccgtactgcagctggcgttaaggataaccgtatacctctcgtcattaagcggtataccgtacttctcatcaaacattctgaatgagtagacaggctcgtcaatcttcatttcatcatacatacatataaatattatgtatgacggtttgagctcattgtaatccctaccttttttaagtttgttcacgtcaagcgcagcgccgtaataacggctgcgcttaggaagattctccctgttctccacctgcatttcaatatcgtaccagccacgttcatcttcaaaaagtacatcaagtcttatcgactttgactccatacccgttataactgtgacctctgaaacggaaacttcccgtttgtggactatttaagaaacagttctgatacaacattttcaaaaatcacgaaagagccataaacattgatatttcaatgttaaacgcctcttttttattctgaaactgtcgaactcgggatactacaataaacatcgatgtacaagtcaagtgttttttgaaattcagcaatgtttttttgcaaaaaacaaccggtttgactttcggtcgtctgtccctttatttttatctctttcacacgctcattttttcccttaaaaacgccagagcctttgaatgtatcacctttgcatttatgtacgacatacccatcatttccgcaatggctttgagggtataaccgttgtagtaatgcaggataatcaggtctctgtctctgggtttcatatattcaagcgcatctgcaaggtcgtcaagcacatcggggctgtacattgtttcggtattctctgccataacatccgtaagctctgtatgagttttacgggatctgaaatagtttataaccgtgttctttgttatggtataaatccatgtggataaggaggcctttgtttcatcgtatctgtcaagatttttataaaccttgagaaacacgtctgccacaatgtcctccgcttcgtgtccgcttatgcctttgcccgccacatatgccgatactttgttcttaaattcaagatatattttttccctgtccattaatgcaatctcactcattttcattcctgtcagccttatagttatcggtttctcccgcggcagatacaaagtcaagcatatcatcaggcagctcagcgccgtatctgctgtttgtctcctgcacaagcttctcaatgcgggcatttccgacaaagctctgcaaatcaaacaaaccttttaatttctgttctatcataattcctcacttaccggcgccagattacgccattcccccattatttccgttattctcctgtgatatccgctctcaaagaacatacactttgacggatcgcaccccagcttatcatctgtcagcaccagcgccacagctctgcagccgccagcgcagtatctgaaatatctgcaggaagcgcatttgctgtttaccgatttcagctcccccgccgttgtacacacctctgagagatatctgctttctctcagcagactctgcaggccctctgttttgacattgccaagatgctcgtttcttctttcgtattcgcccgaaagctggtgacagggatagacacttccgtctgcccctaccgcaaccatccctctgtttccacggcataccgggatactgtcgcggtattcgccctctgcgcactcaacgggcctcatccgaaagcttcttctctgcggaaacaggtctgcaaactgccatatgtcaagtgacatattctttattttttctttgtactctgaaacaaggtcaagcatggcatcgaaatactctgaaaggttcagggtatattccccgccgttttgcacccatctgggagcctctgtagttctgattatacgcagctccgcaacacccagcttctccatcagcagcgctgtcggcatcatactttcgagatttttcctgtgtacattggtctgcaccttgactctgaagccgttttccacgcaaagcttaattgcgcgaagagcatccgcctcagctcctgccctgtttctcagccagtcatgatggcctgtgccgtcaaaggaaatcttaatcaggggatagcagtctatgtccttaaatctgtcaagagcctcctgatttaaaagggatccgttggtattaagctcctcaacgtacattcctctctcatatattccctctataatttcaaaaaaatttctgtgaagcataggctctccgcctgttattgtaaaggcattgatcccgcacagctttgcttcgtccagaagacttaatgcttcctcaaaggaaaactcgctcataagaggagcattgtccgccgcattgaagcagtgaaggcagttgtagttgcatttgcccgtaagcatcagattgagcgcagggaaataccggttatcgcaatatctcggtctgctccactgtgaaacagcctctccatcctttgcttctcttatcattcccgatgccagaaacttctctgcaagctcctctgagcctgcaggagcttcggtcgctccgtcacaggcagagagaaattcatattcagcttcagtaagccctgcggcattacgcatatgcctgatatagtaggcgtacggtaccatatgccacgaacgcagagcgatgttttcattaagtatgtatttcatggcttcagatccgtttcgtttaaatcgatgttgttttcaacgctgtaaacccggattttctcgcaggttaccataacgctctcctgattgaaaaagcagcacaaatcggaagccacttcgtcaacaagacactgctctgcattaatcagactcaccgccagacttgtttcatcgacaaactgtccgttgtgatggaaatatccgccctgctgcaaaaccagcgaaaacgacatattatagtttctgcacacattgctgacaagcgatgaggctttttcaaagcttactttctgctcatattcgtttctgtcagccagacccacatatatggtatatctctctgctttttctttacgcattgtcatctaaagctctcccgccctgtttttatttctgtcatatcgttttcctttcagcgtatctgctaaaacttaatgcccggtacaagtattacctttcccgcgctgactttttccgggtcacgaatattgttgagtctgataagctcttcctctgtggtggaaaacttcgccgctacgcttttaaggctgtcgtcccctgccattgagtatctgacgcaaacggaactgtctaattttactcctcctgacacattttgaagttcgtctaaatcaagttcttttttaatatctgtcatatcattttgttcctttctgtaattttatcagcagcccggcatcggtaccgtaatctgcaatcctgcgtagaagtcctccggtcctgagatattgttaaggctcttaaggtcctccaccgacatatagaagtgctttgcaacgctttcaagcgtatctccgctctgcactatatagcggaaatatctctgatatgctccgcctgccgccttttcgagttcttcaaggttgagttcttttttagtatctgccatattgctctcctcctcattattcttttgtctgtttatacacttagaaatgcaaaaggtatattgttcttaatctatttgtcaagcctctgtctttcaacaagctccgcaaatctgccgttctttgcaataagctcctcgtaggtgccgtcctctgcaattctgccgttttcaagatatattatacggtcacagcttctgattgtcgagagtctgtgagctatgacaattctggtgcatttaaggttatccaggctttcggatacttttttctgcgttatattgtcaagagcgctggtggcctcgtcgaacataaggattttaggctttggcgcaatggcgcgggctatcataagtctctgcctctgtccgccggaaactccgccgcttccctctgaaatgactgtgtgcatacccataggcatacggcgaatatcctctgctattcccgaaagctccgccgcctcccatgcttcatctaatgtaagccacggggcagaaatcgtaatgtttgaatatatgtctcccgaaaacagcttgctgtcctgcataacaacgcctattctgcgtcgcagagattttaaatcaagctttgatatgtctctgccgtcatagtatatggctcctttctgcgccttttcaaagcccagcatcagcctcataagcgttgacttgccgcagcctgtgctgcctacaatggcaacatactgccccggtctgattttaattgacaggttatctataacgttcggcatactgtcgctgtatctgaaagaaacattgttaagctctatgccgcccgaaactctctctacaaccctcttgccctctgcaatttcaggctccgcctctaaaacgggctttgccatatccagcacaggcctgatgcctgcaacggtcatcgtcatggatgcaagggacataaacgctcccgaaaccataccgtaggccgccgtaaaagcataatagtccgcaaccgacactccgcctgctgccgcaaaatagtacattattatggttcctgcaagagaaattgcaagatttaaagccgaattaatcttcagaaacaacggcggattatatgtaagctttgcctcctgcgcataaagctttgcccacttggcaaaggcacgtttttctgagcctgaaatcttgattttctgaactcccgatatgagagaataactcagaccgctttcctttgcggcaaattccatgcgcttttttgagtttttcatatgcacaaacatagttacaattgaacatatcaccgttgcggcaataaccgtaagcgccggaactaccagcataggcgcatatttaaaaatctgcgaaatatatacaagcgaaaacacagaggtaagtcctgtggaaagcactgtggaaacaagcatgctgcaaagcgaatttatatgctgggctcttgacgaaagttctcctgcactgtaatccttgaagaaaccggcagggagagatagaactctcatcatagacgccgcctgcaccgcaaggtctgttttggtgcttactctcgccagcagaagcgttttgatgcctccggcaataatggagcttgccgaaacgcacaccataaacacagcaagcgatataaggacgcgcacactgccgctgtcaaggacatctgaaaacatcaggtttgtaagcttcggtgtaagcaggcctataagcgttactgcaagagttgcaattcccaccataacaaaatccgatactgaaagcgtatgaactatgtatctcataagatctgaaatccctagctttctcagcggaaacgagttataaaaggcaatagcctcctcttcaaacaaatcctgattttttctgtttatcttaatatatctgccgctgcctgcatcataatatgtataacctgccattcccgcaggaataagggcaacaggcagaccgtcggattttctgacagcaagcattgctcctatggcatctttgtaccagcccttatcaagaattactgttcttctcataatcccgtgaggtctgagaagatattcaagctgttcatttaagtcctcaatattttcgggaagctcggaagctctgacgtgatagaatttcagaatttcctctatagcgtcctttgatttctgaaaatcatttaaagcggcgtacactttgcttcctgtaacagctcccgcaatatctgcaaaagcctcttcaaagaggcgatcatcatttaattttctctgtctgatctgttcgtcaaaccagcccatagtctacctcctcagtcatttgaaacaagcttcgtataagctccgcctctggcataaagctcctcgtggctgccgcgttctaccaccctgccgttatccattactattatctcgtcacagtcgcgtattgtcgaaagcctgtgagcaacaactatgcaggtgatgcctctgtccctgatagcgtttacaacctcgtattccgtcttggcatcaagggcgcttgtggcctcatcaagaataattatcgtcggatcctgacacagcactcttgcgatttccatacgctgcctctgaccgccggaaaaatccttgccgccctcggttatcttatagttgtagccgccgtcacgctgcattatatcctcgtgaagactggcatctcttgccgccataatcatctcaaaatcctctattgaagagtcccacatcttgatattgtttgctatggtatcctcaaacagaattatatcctggtctacaacagcaagggagcctgtaaacacgcttctgtctatttcatccattggctttccgtcaaagagaatttccccgctccacggcttgtaaagtcccgatatgagtttggaaatcgtcgatttgccgcagcccgaagctcctacaaatgcaactcttgagcccggtttaagactcatagagaagttttctataagggggtctgcaagacgtgaatatccaaaagtgacattcctaagctcaacgcttccggaaagcttgtcatatccggcgttttcatctaaggtttcatcgaattcaacatcgcacgggtattccataacgtcttctactctttccatttcggtacgcatttcctgcaatgtctgtcccgctgaaataagggagtttgcaggtcccgtaaaggaggttaaaaagccctgaaacgccataatcatacctaccgtaaactgcccctgcatggtaagccatacgcctattacaaccacaacagtccctgtaagctctgaaacaaatgcaggcagaagtccgagatactgattaagctttgcgaattttactttctgggtgtttacgctggcctgatatcccgaccatttttcaaaatatccgttttcggcgccgcttgccttgattgtttctatcatttcaattccggctactgtagcgcctgcgagcttgcccgcatcacgcatctgaacccttgttatattgactctcttttttgaaatgacatctgaaataacaaggtttacaaggattgacataatgcctacgactgtaaggataaggctgtatcttatcattacgacaaggtaaaatatcatcattgcagcctgaagcaccagcggtgcaaaggtgttaaccagattgcccgcaatagatgcgttggaggcgtgtctctgctgtatgtctcccgccattctctgggagaaaaattcaataggcatacgcagaactttccacataaagaccgagcttcctgtgaccgcaagtctgccgttaatgcgaagtgaccatacggtctgtatcagacttacgataatctgcagcgccgacagcaccgacagcgctataataaagggaatcagccagtcggggtcctgtcccgtcagaattctgtccataaatattcttgaaaatgccggatttataattcctatcagtgaggatatcactgtcgtggcaattacaaatgccaccgcagtccctgcgcctttgagtcttttgcgcgcaaagctgacaacgcttttgggcttgccgccgggctcaaaatcctctcccggttcaaacataaggcatatacctgtaaaagccttgtcgaatgctttcatagatacagtgtagctgccctttgcaggatcgtttaatacagctttatctcccttaaatccgcataaaacgagaaaatgattgaaattccagtgtattatgcagggaaatctgccgctttttttgagctcctccggctcatagcggtagccctttgcaatcagtccgtagtttctggcagccttgagcatattcttggcattggagccgtccctggaaacaccgcagtcggcgcgcacctgctcaagaggtatccatctgccgtaatatgcaagaatcatagtcagcgatgcggctccgcactcaagcgcctccatctgcattacaacaggcacctttgcgacaccgccggcaaccggttttttgattatattcctcttactcatatactacctcagttcaatacaaatgacataggcgaaattctttcggttactatagatgactcatatataccggcggggatatcgcctgataccgcagcctgatatatccactgaccctcggtgaagcctcctatatgaagcacatacgggtcaaaatctctgccaatctgtacgggcttttgtgaaattgatattattttgtattccgcctcctcaacagtaacttccatatctacatttacgttttttatttcttcttcatcaagataaaggttaacgctttctccatcagatacaaccggagccgatactcttgtttcaatggttccgaatattccccatacgcacgctcctataagcagcactattatcgcccccagaataatccatacggacggatttgaaactctgatatagtctccaagctgctccggcgaggatatccgctctatactcttttttctgaaaatgctgttatccattttttttctccatatatttctttatacgcagaatgttctgcccctctttgtattcatatgttatatcgtccacactttttttgaccataaatatcccaaggcctccgatttcccgctcctctaagtctttcgtcacatcggggtccggttttttgagcgggttatacgggactccgctgtctataaaggtgattatcaccgccggctcttctgtaacctcaacgctgacggtcgcatcacctgtatcttttccgtaggcataatgagctatatttccaaacagctcatcaatggcaacgtctatctgtatcattgtctttggcgggcaaccggcagcctcaagctgactgtttacaaacgcaacggctttttctatattttcggcagcagccggcagggtcagttctttcatctatctgtcctccattttctttgtgtattcaagacacagcatagttatatcgtcaaactgcggtgcatcgcccacaaacctgtcaatgtcagtcttaaccgcatcaagaacagcctcaggggtatcgtctttcactttatttaaaacgtccgaaagtctttccattccgtaaagctgattagcggagtctgtcgcttctgtaacgccgtcggtatactggaacagcttatctcccggctcaagggtcatacttcccgccttgtagcgcatgccctccatacctgcaaggacaaagcccggctttatcttgtaggcttcgaagctgcttcccttatatatataaggcatttcatgccctgcgtttacgaagttaaactcgcctgtcacaaggtccagcactccctcaaaggcagttatgaaaagtccctcgctgttggattcgcagagaagatcattaacctcggagaatacctctcccagatctctgtccggctgggtgtgatcttttatgagagtcttgcctattaccataaacagcgccgccggaactcctttgcccgaaacgtctgccataactatggcaaggtggcgttcatccaccataaagaaatcgtaaaagtcccctccgacctcctttgcaggagtcatggttgcatagacttcaaattcatctctttcagggaatgcagggaatatgcaaggcagcatcgaggactgaatgtgacgcgccacgtcaagctctgctcctatacgttctttttccgctgtaacttttgtgaggttttctatgtattcatttatgtctgtttccattttgagaatacttcctgcaagggattctatttcgtcccttgtttttattcccgataaagcctccgatattctgttgtcattgctggtaaagcttccggcctctgccgcaattgtatttatcggctttataactcttctgaacaggtaaatcatatatactgcaattacaacaattattaccgccacagtaaccagtattgcgtttaatatgtactgctgcagcgaggatttaagtgcagtcataggtatctccaccgaaatcattgcaaaaacaccgtcgtgatttgtcaccggaagtattcctgccgtattgtagccgtaatccccttttgaaacaaaatagcttgaggatatacaccccgtatcttttatatctgccagttcatctatatattccggattaaagctgccgctgtcacccagttcataggaatattcaggtacagtatagctgtcaaacatatataaaagcggattccagttcttacggtcaccgttatagctttgaagctcttccttgtcgagtacaaatgcaagcacatcgtttgctcccatagcttctctcagactgtcaaaggccgatgagatttccttgtacctgtcgctttctaatgcagcctttatttcctcttcacttacggtaccgtttttatacccctccgcaagctctgcatattgcgccagctcaccgtttttgaagtatgaaaacgctgtttccgcaatatcataggctgttgcgttatactgcttttctatgctgtttttatactggttgtagccgataaacgagcttatcccgcatatcagaatacccagtatcacaaagcctattgtaagtttaaatgcaagcttggatatacgatgtttcattctgtctcctccggattatataataactgtcagtgtattaacgcccagagcgctctggtagtcaatgttctttgcaagtcctgttatcattcttattcccatatattcatcgctttcgtcctgagccgcgagaggattgtatttctcaccgcctgagcgtattctaagcacgccggcatcatcaccgttcagtactctaacgtctatgctgcctcctgctttaagggatttttccgaaattatcatcattatctcctctgctgcaaggcttatcaccatagctgtctttggaggcatatcgtttgcctcgcagaattcctgtattttttcactggcctcgcagattttatcctgctctgcttctacggacatggctatgcttctgccgcttttttcgaggctgtcgtcaatgagataaaacggattgagcttcattttctccgccttgattgaacccgccgaaagacacagcatcgctgttgcaatctcagccgccggaaagaacagccataccataaggttaagttctccgaacatatagcagaagcctactgcaaatatacatactctgaaaagaaacgaaatattcgcaagccatacattgcccgttgcattgtaataatatgaaaaaacattgtttattgtggcaaatacaaggcttgcggcaaaacagcatatagccgccgcagagtctgcattacttccgaatataccccctatgccgcctgcaaatactataaggagcgcggcaactgcagcagacagcaggcttccgcacagaagctgcgtatgcagcagctttttgattgctgccgaatctctttcacccgcaaatatacccatcatagctcccgaggcctgaggcactccgttctgaatacacatcgaaaattccgctatgctgtttacgaccgcaaagactgccgtaaactcgcctgctccgaatatccagagcactttgttaagcgcaaatatgcggaccgcggataatatattattaaaggacatcataaccccgtatcttgcaatccctacaaattcatccctgcgcggaaatgaaaatccgatgcaaaaatcaccgctatccgcagcaagatatataaatccgagaatgcaggcagccgctgttgcagtgacgcttgcccatgctgctcctgcaattccaaagtcacatacaaacaggaatatgtagtcaagaacaatatttattgccgtcataatcagcattattctcatagcctgcacgtttctgccctcaagtcgcagataaaagtacggaatatacagcataaccttaaaaattccgcctataagtgtaatctgtatatatgtacgcacataatcactgttttcgcctgatgacagaagctctgccaaaggctgtgaaaatgcaagaagtatcagacagacagctgcagacataacacttcccagcaaaacggcgcacctgaaaattctgatgctgtcctgtttccggttttctcctactgccattgccgaaagctgcgccgcgcccgatgccacaagcgctcccagcgcgcacaggattaaatatacgggaaagctctggtttacgccggcaagacctgcatctcccagtcttctgcccaccagaataccgtcaaacagcacgtttacggttcctcccagaactgctataatgttcggaaaaagtgcgcacagataaagtttatttataaatgaaagatcattttctctcacgctttgccacctcttgtttcagcttttcatactgctcctgtgtaagaaacagctttggtttattgtgtcctttttcattgaaaagcgctctggatatgaagccgttttcaagacaggttacaataggtcttcccagcattttgagctctctgatatcctcatagtctgccgatacggctttgagcttatcgtcaaggacttccgaaagctgcttctcgtctgcctttgtttcggcaaaaatatgaaatcttgccggaataacagaataatccgcggcagcgcagaaatcgtctatatccgatgtttcctccgaggccctgctcaccgcatcattcattgacgccgtatctattttttctcctgcaatgttgagaatatcgcccttacggccaatcacctcgaacaatggagcctgctctttaaatcctgtaattttaatcagatcgcctgttttgtagcggtaaagacccgaaaaggtagttaccacaggctcataaatcctgcctgtgtcaagctgtttaattgtcacagtctccgaagagtcctcaggcagaaattcaaagtaggcgcagtctgaacaaagcgcatattccgctttgtccatctccggcgcagctcccgccattacctcagaggacgcataaccaaaatagtaaatcggtatatcccctgtatattttttgagcatacgtgtctgcatggcaaagcagcggccgcctattccgctgatatatttgagatttttccatatttcagaagcggtaaagctgccgcccccgctgctgaaaatattctcaagctctttaattctccctgcatctaaagcggggattctgtttatctcctcttttatgtcctccggcagctccgcagatattcggcccctctttatatcatccagcagcatgctatggtttttttcaagatatctgaaaagcagcagcacatcatacagaaatattgactgtatcgcactgagatcctcatatgcaagcataattctcagcttgacataaggcacgtcagttaccctgcctgaaaaaagcagtttctttcctcccaggtattcctgcaggtttcctatgctgtcaatatacctgtaatgcgccgaagaaagcagtgtttcccctctgctgccaaagggacgaaaaacactggtatgtatcatttttttatcatctgcgcctgtaatcgctgtagggatatcaataatatgtgaggaataacgaaaaagagcctcctctgtcagcggaaatctcttgactctgcccttggttcccgatgacagtataaagtttctgattggatatgcagtaagtatattgtcctcgccgctgtatgtcctctgtatatattcttcaaagtcatcatattcaccaagcggcactgcctttgaaaattcctccgccgatgaaatatccgcaaagccaaagcgcctgccgaactctgtttctttgttgtctcttaaaatcctgcgaagattgttttcatttgtatcgcaggcataggaaaagcctgaaaagagctgttttattctgttatccgcattgttagtcttttcaggcattgcaggcctccgcttttaataattattttctgtttgtaagcaaagtttatcacaaaatgacagttttcgcaacagtatgctcacttacaggctgctgcccggtaagtaaaaacgcgccggcgttcatacctttatttagttactttaaccctaactccaattccgccgtagattttaatttctccaagcagattaccgcttgtatacgttatgtatctgcccttgcatttgtatgagtaaactcctttgggcagtggatatacataagcgctgcccttttttatccctgtaatcttaccgtagctgtttacagtcgcaacttcttcatttgaagatacccattttacactcagaggaagcagtgtgcttccgtcaatgcttttcataagtcttttgaaattgctgaaagtctgctttcccttgtaggtaaatgtgtacttctctacagttttgagatacaccgtatcatctgctgcaactttaacagccgcaggtgccgcagtgtagagctgaaattttacagagtctgcaatggcgcttgcgcttaataccgataagcctaacacaaatattattgttaatactgctattcttgtttttcttttcattttttcctcctgtaaaaaacgccggcacgcaaaaaaggcatagaaaaaaccgcatatgcggtttttctataccttttctatgctactattttagcacaccccgtttttacagtcaattccttttttaaaatttatttactctttcaaatttcaacattttcagaggacttgacaaagctaaaaaagaacaaaaataatttaatccctgctatactatgtattattctgctgcaaaataaaagaggcggtaaaaaccgcctccgtaagctttcgtatttgattactttaatactacttctgctccaacttcttctaactgagtcttgatagcttctgcttctgccttttcgatgccttccttgatgtttgaaggagctccgtctactaattccttagcttcctttaatcctaagccggtaagttctcttacagccttgataaccttgatcttttcgccgcctgctgcgtttaatactactgtgaattcagtctgttcttcttctgctgcgccgcctgctgcaccgcctgcaactgctactggagctgctgctgatacgccgaattcttcttcacaagctttaactaattcatttaattctaatactgacatagcttttatagcttcgattatctgattcttatccattttataatctcctttttctttatttataatttaaagttttttcttttaattattcagcttttgcatctgcgattgcctggaatgtacgaacaacctttgatacaggggactgaatgcttcccataaatttagcaatgagaacttctcttgacggaatgtttgcaactgtctggatagcatccttgtcgaagtattcaccttctactacgccacccttgaattccatcttcttgtattctttaatagcatcgtttaatactcttgcaggagcagtagcatcatcatagctgattgctattgcgcttggtccttcaagaacttcagcaagcggttcatatacagtgcctgcaatagctctcttcataagagtgttcttgtaaactgtataatcaacatctgcctcacgaagcttttttctcatagcgttggcttcttcaactgttgttccgatatagtctataactacagctgactgagccttgtctaatttcgctttaatctcgtcaattattacctgttttgcctgtttagcttctactgacattttaaaattttcctccttccacggaaattttgtggtacgaatataaaaagccctgcgcagtgtgcaaggccaatatttatatattgtacctcggcgggtttattaagccttagcccccgctgtctacggtttagtttccttatttatttacctttagcctaaagtaatcttctgaggatttactttgattccagggcccatagtgcttgttactgtaacacttcttaaatactggcccttcgcagccgccggctttgcctttaagatagcttccataagtgctgtgaagttctgattgagcttctcgcctccgaatgaaacctttcctataggtgtgtgaatgatgtttgtcttgtcaagtctgtactcaaccttaccggctttagtttcttcgattgccttggcaacgtccattgttactgtacctgacttagggtttggcattaagcctttaggtcctaagattttaccaagtctgccgacaacacccatcatgtcaggagtagcgatgataacatcaaaatcgaaccagttttcgtttttgattttttctgccatttcttctgctccgacaaaatcagctcctgcttcttcagcttcctgagccttaggtcctttggcgaatactaaaaccttcttagttttaccagttccgttaggaagtacgatggcacctctaacctgctggtctgcgtgtcttccgtcaacacccagcttgatatgaacttctacagtttcatcaaactttgcaggtgctgctttaacaacaagatctaatgctgcatcagcatcatataattcctgtctgtcaaaaagctttcttgcttcctgatactttttacctcttttaggcatttgttacctcctcgtggtactaacgatcttgcgatctcccatcttaaattattcttctactaatatacccatgcttcttgcagtacccttgatcatttctgttgctgattcaagatttgctgcgtttaagtcaggcatctttgtctgggcgatttcctgtgcctgtgctaaagtgattttaccaaccttgttcttgttaggttctcccgaagccttgtcaagacctgctgcttttttgataagtacagctgccggcggtgttttacagatgaatgagaatgatctgtctgcgtatactgtgataactacaggtataatcattccaggctgatcctgagtcttagcattgaactgcttacagaagtccatgatgttaacacctttctgacctaaagccggacctaccggtggtgcaggatttgctccgcctgcaggaatctgcaatttgatatagccatcaatcttctttgccattttggttctcctttctcctgctcaaagcgcagggactagtatattaaaattatgctgttaactaaagtttgtcaacctgtccgaattccagttctacaggtgtgtctcttccgaacatggatatcctggctctgagaacctgcttgtcaggagtgatttcttcaaccacacccataaagccctcaaacggcccgctgatgactctgatgctgtcgccaacctccacgtccaaatcaatgaatactttttcgatgcccattcttgcaacttcctcgttggatagcggaataggctctgaaccgtgacctacaaagcctgtaacaccctgtgtgtttctgacaaggtaccacgattcgtttgtaactatcatctttacgataacatagccggggaacatttttctcgttttaactttgcgttgtccgtttttaatttctactctgtcttcggttggtacaacaatatcaagaataagatcctgcattcccctgttctcgacgatcttttcaatattcatttttactttgttttcgtgaccggaataagtatgaacaacataccattttgccactccatcgcctctaaggccctcgccctcaagaggagacgctaaatttctatctaaatcagacattgtctacctgtacctccgctctctaattactaaagttcaatatttaaaactgcttttagtaatgccaggaatcctgaatctatagcccagaatgccagcgcaaagaaagcacaagtaagtacaacaacagcagtataagagccaagttctttctttgtaggccatactacctttttcatctcgattctgatgcccttgaagtaatcctttacggatgtcttctttttgttgggctgctgtgccgcaaggtttctttttttggtttccttgcctatgttcttagcgttttcttttgccatctctaatacctctaactatttagtttccttgtgaagagtgtgctttttgcagaacgggcaatacttgttcatttcgatacgatcagggtcgttctttttgttcttgatagtattgtagtttctctgcttgcattcaccacacgctaatgtaactttaactctcattgtttctgtcctccgttaactgaaaattagagctgtattacaagctctttcgaatttttatcataaagtcgccatataagtatatattcttatcctgtcaaagtcaagaattactttgaattaaattggttttttccaatttaaaactgcggggaagctcccgcagccttttaatattatatcccttatcgcctgtaaagtcaatatccctgttcaaaaaattacagctcccacgctattaccgcaagccttacggccgcttccttgagtgaggatattcttgcctcctcatgtatcgaatgtatgaacctgcctgtaacgcccatggagtcaatgcatgggataccgtaatacgtcatatccgatgcgtcagagcctcctcttgatttttcaagccttacttttggcagaccatattctttaaaaatctcatttatccggtgaaacaaagcaacattggcatcgcaaagctccataggtcttcgcatagttttaatcctgcgtgtgcattcagtgcctctcacatatgatctgtctgcaatctgccgtactctgttctgcgctttttgaagctgtttcatatcgttaaatctgatgtcagcgctgaatctgcatatgtcaggtacggaattatccgcggttccgcctgttacggtgccgcagttacatgtgataccgtttcttgctttcattttttcaagctgtataatcttgcgggcggcttccgtaatggcgcttgcacccagatagcagttagaggaatgaacagctttgcctcttatctcgaattcgtatttgaccgagcctttgcgcataagtgtgacgccgccgtttctgtgggcttcgcagttgaaaaaccctactgcattctgagctttttccctcataaattcaatggttcttccctcactgaaagcgctgcccacttcctcatcgctttgcagtatcagtctgacaggccgttttttaaatccgcaggctgcgagtatttccattgccataaaagccgctgtaataccgcccttgcagtctttgactccgggaccgtatatcgtgtctccctcgcatctgacagcggggcttccaaagcttccgacagcatgaaccgtatccatatgccccgaaaacactacaggagcctcatccgaagtattgttcatcgtaatacttatacagttgcccgatatcttttcttcgtgaatttctacatcccagccctgcgcttccgctttctcaataaagtatctgccgacctcatcaacgccctgcttgaagtctgtggggctttctatgctgcatatgtcagcccacatctgaacgtatttatcattaagctcctctgcctttgtcagaagttctctgttcatattactacctcgcaaaacagggaaaccataaggcttccctgtcatacattattctgatttactatttaacagtgaatttaactgtctttttgttgcccatattatctgtaactgttactgaatacttgcctttctttgtaacctttttgctgcctgtgaatttagcataggtcttgcctgtctttgtattctttataacggctgatttaactccgctgtccttgtctgatactttaacagttaccttgcccttgtatgatttgccgttctttactcctgtcacaacaggctttgttttgtctgccgcaaaagcgtacagtctgctgtcatccttaacgcttgtatagctccattcaacagtctttttgtccgctgaaagcttaccgttagtcttaactatctcatacggaagtgttgccttgaatgacatatcaaatgccacatcgcttgcagcgttctcaatctcttcggtatcagaaccgctcagcatattgcttaagtccacattgaacgccttggctgaaagccatgccttgctgtcatacgttttgaaaacctctctggcatcctttattgacgcaccctttgcgtctaccttcattgtgtaatattcgatgccgtctattttttcaagtttgaactgaccgtcttcaagcagtccctcttcaaagccttccataaagtccttggtgctgtcctgcgcctcttttatgatgtcagcctctgctgcattctcatctgctgcagccttagccatttcaagcattacatcatatgttacgctttccattttggtcttgtcaatgctgaagtcaacatatacatcagcagttccgtcagccttaacggtaacttcattatttgaactcatacagcctgtaaatgcaaacataaccgcaagagccatcatcagcgcgagtatcttcttatacatattctttttacctcccataccacaaaggggactttgaaaagtcccctgaatgtcaaatataaattattcgataatctcagttacaacgcctgaacctactgttcttccgccttctct

SEQ ID NO: 142 - DNA, 6082 bp, Unknown
  16S sequences of unknown bacteria
ggcgggattgtcaaagaccgcgcagatgatatcttttagctcatccggaaaaccgcctgaaggtgtataggcgttaaagcctacaccgagaactgcatagtccagaagaccgttttcaagcccaaatgatgcctcggtgagaataccaacggcttttttgtttgctatgtaaacatcattgacccatttgattgaagcggtcttgccggacacctcttcaatagcttcgcaggcggcaacggaggcgatagtggtgatgcgcattgcctgctcggccgagtaattttgggggcgcagaagcatactgaggtatacgcctgtgccttccggcgagaaaaagctgcggccgagccggccttttccgcttgtctgcttgttggcgagtacagtgtatccatcggcaagttcctctgttacatgttcgcgtatgtatgtgtttgtagagtcgacaacaggaagcaccgtgattttaagccctgtgcacagaggcttaaggtatttttgtatgccctgtacggaaacgatgtccgtatcttccgcaagcgagtagcctttgtttggcacagcttctatattgtagccgtcattgcgcagaccttgcacagctttccaaaccgcagtgcgcgaacaaccgatatttttcgcgatatcttcacccgagaaaaaagttcctttatgagcttcgaaaagctcgagcagtttttctttcgtagtcacaggtattacctcccaatgaatgataatatatcatagagcgcaaatattgtcaacttatttttaaagatggttgacaatatgatttcatgagctgctaaagccgccttatgaggaaaaggtgaaatagcagactggacataataaaaaagcgagaaatgtgtaagcaaacggcgttttgcgggcagcgagcacacttttgaagaaagaatgtgttgttaaaaatgagaaaatgtagtaaaataagcgtatcagccgtctcccattcgagccggttaagaaaggaatgatatgatgacagagaaaaagggaacatattacattactacccctatttattatccaagctccaacctgcatataggacatacctactgcacggtaatggctgacgcgatggcgcgcttcaaaagactttcgggctatgatgtgcatttcctgacgggaacagacgagcacggtcagaagatacagactatcgctcaggaagcgggaatgtcgccgcaggaatatgtcgacaaagttgttgagggcattaaaaagctgtgggagacaatggagatatcgaatgacgactttataaggacgacagaaccaagacatattgagcgcgtacagaagatgtttatgcgtatgtatgaaaaaggtgacatatataaaggagaatatgaaggactttactgcacaccgtgcgaatcattttggacggagagccagcttgttgacggctgctgtcctgactgcggcaggccggtgcaggcggctaaggaggaagcgtatttctttaagctctcaaaatatgcgccggcgcttctcgaattatttgaaaaaaaccctgattttttgcagcctgatacgaggagaaacgagatggtggcatttatcaatcaggggcttgaggatctttgcatttcgcgttccacatttgactggggcattcctgtgcctatagatgaaaagcatgtaatttatgtatggctcgatgcccttacaaactatatcacggcgcttggctggcctgatgatacagaactttatgacaaatactggccggcagatgttcatcttgtaggtaaggaaattgtaagatttcacagcattatctggccggcaatgctgatgtcagcagagctgccgctgcctaagcaggtgcgcggtcacggctggctgctcatagacggcggtaaaatgagcaaatccaagggaaatattgtagaccctgtaaagctcatagacagatacggaatcgacgcgcttaaatacttcctgctccgtgaatatacattcgggcaggatgggatttttacaaatgaagtgatgctcaggcgcatgaactacgatcttgcaaacgacctcggcaatctcgtttcgagaacagtctcaatgatagagaagtattgcggcggcttggtgccgggcgcgggaccggaggacgaagagggaacggacgcggatttaaaaagcattgcggtatcggcggcggcgaaagtcgaggaacagatggacaagtttatgttcaatatggcgcttgaagaaatatggatactcgtgagaagggcaaataaatatgtagatgaaaatacgccgtggctgcttgccaaggacgaagcgaatagggaaagactcaatactgtaatgcacaatcttgcggaggcgctgagaattgtttcgatactcatttatccgtttatgcatacaacgtctaaggaaataagaaagcagctcggtatatggtatgctgatgttgtatgggaagatgcctttgtatttgatatgcttgagggcgatcaggtaaagaagggcaatcctattttcccgagactcgatattgaaaaggagcttaaggagctcgaagaaatgaataaaccggaggaagagccgaatataccgcttgagctcaagccggaaattgaatacgacgtgtttgataaaatcgacttccgcgtaggcacggtgcttaaatgtgagaagcacccgaaggccgacaagctgctcgtgttccagataaagatgggaacagagaggcgtcagatagtatcgggagttgcggatagctatagtcctgaggagcttgtaggcaagaaagttgtcgtagtggcaaatttgaagccgagaatgctgcgcggcgtagagtcgaacggtatgctgatgtttgcggataatgtcgttgacggcaaagagcgttttgaatatattacgacggtggctgacgacggaaatccggtaacataagtacagaaaatgcgagcggcgcaaaacagagcgaaagcttagcgtaataatgggcccggcgctgctataaagcgccgggcttttaatttcttatgatataattagcgtaaaattactgactgccggttttacagcagccgacagtaaataaatgaaacggagtgatgttgatgctgtatgattcccatgcacatttaaataatgaagactttacggaagaggaacgagcggaatttatcgcgcttgctgatgaagcggtaaaaagcggggtgctttcgtatgtaaacgatgttggatttgaccttgcttcatccaagatggcggccgatcacgcactggcttacccgtggtgctacgctgttgtcggctgtcatccacacgatgcggataggtttgacgaggtgcagctcgaaatgataagaatgctggcaaagaaggaaaaagtgcaggcaataggagaaatagggcttgattttcattacgataattctgaccgcgaggcgcagagatattggttcaggaggcagatacagcttgcaattgagctcaggatgccgattgtgatacacagccgtgatgcggataatgagtgcttgcagatacttaaagaggaaggcgcgttttcggatgcgcgctgcgcctgttttccagagcgtccggcgcctgcgtcgggcggagctttgcaggtagcagatggggtgttgcaggcagcaggcgaagcattgcagactgcggatagaaaggaagaagtaaagagcgggaagggcgataaagcgggtgcgccttatgtccgcgacgcccgcgttctgctgcactgcttttccggcagtgccgaacttgcaagacagtatgtaaagctcggcgcaacgatctcaatggcagggcctctgacctataagaataatcgcagaggcgtagaagttgcagagacgattcccattgaatatctgcttgtggaaacggattcgccgtatttggcgcctgagccgcaccgcggcaggaaaaatcgccctgagtttgtgcagtttacagcgcgcaggcttgcggatataaaaaggataagctacaaagaaacggcgcgtataacgtgcgaaaatgctatacgcttctttaatattgagaaataaaaacatttatacaaaaattgttcgtttgtcggaaaaaggcgaaactttaaagacatacacagcacaatatgacattttgtgacaaagatttttagtaaaattaacctgtgaatacctaaacaaaagaaaagggggcgcaggaaaatgagtgctgtgaatgataatgaaatgatgaaagaaccgtcaggggtaaaaacgagtcttgcggacagaataggtgcggacgatgcgagaagtgtcgcatttgcgtgttttctgaccgttctttcatttgctatgggaagggtggaaatggcgggcgctttttttccttgcggtattgcgctgatgtcggctgcgcttaaaagaagcagtctgaacatatatctcatcatacctacacttgccggaatgcttacgctctggcgcggcggcacatatatatggggagatgtaattgcggccgcggccgcaagtgcggtatttatgatattggcgaagcgcgggcttccggatttctaccgcatgatcatctgcgtgtcgattgtcattatttcaaactctgtgtattacacggcggcgcacatactttacagacttgatctcaaacttttgctgctcgaaacgataacggtcggcgggctctattatatattccatgtatttttctcgttgtctaatatgaaagaaacattccgcggctcagttgagggcggcattgtttcgattgccggcatttgcgcgctcatattctgcgggctcacctcatggagaggagcgtcgtactatattacagagtatataccgatgacggcgggttttctctgcgtgctgattttagggtacaagcttggaatatcggcgggcataacggcgagcgcgataatagcagtcatattttatctgtgcagcataattcctatgtctcaggtcatcatatttatatgcgccggacttacagcgggatttttcagagggctcaacaaatatacgacggctgcgtgttttgctgcggtctgtctcgtttttggacttgcctgtacaggtgcgcttggtgcgcttccggcagcgccgccgcttatagctgcactcatttttgctctcataccttcacggatgatgaaacaaataaacgaaattctcaggcggcttgtttccggcaatgcgggcgtatcgtcatacgagcttcaggaaggtggtatcaatacggccaatgtaaaagatgtccttgatgggtataaggagtgctttggcagccttgctaagctttatgatataggaaaagatcagcgcagcattatttcacaccagttccggggaatgcagcaggtggtaaatcagctggaaatggacataaaatcagcaaataagggcagactcgcgtgcgttcctgtgaatactgaatataaatacaatatagatgtaggcacgtcaggctatgcgcgtctcggagatgtatcgggagacagttacatctgcaaaacgcttgcggatggcaggtatattataatcctgtctgacggaatgggcaaaggcgaagcagcggcgatggagagcagtcttgcggttaaaacactcgccaatctcattgaagccggttttgatgtagaaatagccttgcgtacgctcaattccatacttcttctcaaatcggaggacgagatcttctctacagttgatataggaatattcgataaaacgagcggaaaactaaagctttataaaataggtgcagcttcgactttcataaaaagaggcgaaaaggtgagcgcggtaaaaatggcggcactgccaatgggaattgttgacggcctcaaaatagattttgtcagtcttaagctgcagcccggcgatcagataataatggtatcggacggggttacggattcagcgcgctacgcaaatgtggccgaaaacggcagcggaacaggcgcagggagcagtgaacacggtgaaaaccgaaagacaggtacgcaaaatgccgataacggctgcgagtggctctgcgagactctatcgagctgcatagg

SEQ ID NO: 143 - DNA, 14749 bp, Unknown
  16S sequences of unknown bacteria
aaaaccgatttcattggctttgcgggtacccgggcgcgaaccggatcgccgcccgggccgccttttcaatagaaaggaccggaacccggggcgcacattcgcacctcccgggttccggtcctttccttaccttactttaccttaccacaactcttcccatttgttttttccgatgcagataatacggaataatcatcatcagtgccagcgaccaggtcatcgggtaactgagaattaccgtcagtacctcatggtatgccggaacaatccaggtcacccatggaatccgcagtcccaggatgcaacaggtggtgatgatggttggaatttttacatcgcccaggcctcgcaatgcaccgttgaaaatctccaggatgacggacagaacgtaccacggcatgaattgatgcatcatggtcacaccgatttgaatgacatcttcatcggtcaggaaaaggcacagaagcgggtgggcacagctaatcagcagtatcacaatcgccaccaccagcaacgacgactgcaccaatccgacccgcacgctttggaatactcgttccttctttccggcaccgtagttctggcccacgaacgtcgtgacggtcacgccgaaggcatttagaattgcccagacaataacatcggttttaaagtatgccgcccaagccgctacgatatcctctccgaatccgttgatgcaggcctgaatcagtatgttcgagatgccgtaggccaccgattgaatcgatcccggcgtgccaagccgcatctgatgtttcagaatttttccgttaaagccttccttcaggtctcgaacccgaagggacaggcggaacggaatcccttccatttccttgttccgcaccagcgcccgcattaccaggaacgcactgacgccctgagaaatgacggttgccagcgccgcaccgatgacctcttttttccataccaccacgaacagaatatccaggacgatgttcagcacgcagcacacaatcagataatggaacggccgcttggaatcgccgatcgccctcaggatggaagatcccatattgtacagaattaccgtggacacgccgccgaaatagattaccatatactgaacggaataggtcatcaggctttccggtgtccgcatcattgtcatcgcccatcggctgagggccacgcccgccaccgtcgtcacgatggacaccaggatgccgaatgccgccatggtgtgcagggcctcatgcagttttttctcctcccgtgccccgaagtattgagacaaggtcacggatgcgccggcgaacatcgaggtgaacaccatcgtcacgatgtatataacggtagtggcagatccgccgattgccgccagtcccgcttttcccacgaaccggcccacaatcaccgcatctgccaaactatagatctgctgaaaaatagttccggcgaccaacggcagaaagtaccgaaacatcgcccgtccaatacgcccctccgtaattggattcatcactcccaattgctcattcatcacattctcctacataataatttctcccatggattatactccaatcggtccgctactccgtatctcccagcataatcttcagggaatcgtccccgaagaaggtgttggcgttgtacaggaacagcacgtccgtaaccttttccgactgaatcagatcctccagattctcaaagtagtaccgcggatccaccaccacgatttcccggtagtgctgcgtcaagaacggaataaaactatttgcgtaggaatccttaatcaacagcaagcgtttcccaccggccaccggcgtttcgatggtatacatcggatggttgcttccaccgaacaccgtataggcatccttcttcttcaaattcttcagctgatagaattccgccgtcttcttctgcgtgtccgtgtagtagattacggacttgcggtaatcccgattcgccggaagatagatcttgatggcgtcgtccatcccgttcacgaaaccgctcttggaatacagcgtgccccggaaatcattcttcaccaccttcggcgcaaaatcttccggcttgtccccggtcagagcgccgatggaattccggtatgccagatacgcgccgtccgtcgtccagtggtggtccgtccggtaatacagctgcacgtcgtcttttgcttttataaaagcagaccgaatgtcaatcggagtgattccggacttctccacagaagcgtagaagtcgtccatctgcttattctgattggccatctgtaccgtggtcggcaggttctccgacaggatgttcccggcgttgggcgccagcagaaaatgcatcttcaatttggaatggctcttggcaaaacccgccagtgccgcttccgtctccttgaggttcttcggattcggcgtggtgaggttttccatcagataatcgttttttgcccggtagactccgttgttctccagaacccccacggttttgtccgccgccgctttcacctgaatgaagcggttgcggcccggaatctggtcgttggcataatcgtccatcttgctttcaaaccggccatccaaatactccgacacccgaaaagcggggaaggtctgaagcgcccggttctccgcagcggaggtcttccggtccggaataaaaattcccagaagctgcagtccgaagattaccgccaggaaacagattcccaatatttttgacatttttatttttctgtcaaccataatttacctttcatacattctgtatccgatatgccgaagcacttcgttttttccctagaatcggaaatacaggaacggattgtaggatccgaacaccaggtacgcgatgctgagaatgagaatcagcatcagcagaacgatgccctgccactcgtgtccttccttttccagccgctcccggaaccatttcatcggtgccggcgtgctgaggcacatgcccagcgccaggagaattccgtgggtgcgcaggagatacagggttttcatgttggcgaatgcgtggccggatacgcccagcatcaccgcaaaatattttttcatggcaccgaaatccgtaatgctgaagaaggtccagccgatcatcacgataaccaatgtgtacagatgacgcgcccatcccggccatttctccatgtaggggtgcagcacgtatttctcgataatcaggagcacgccgtaataggtgccccacagcacgaagttccagctggcgccgtgccacagtccggtgagggaccacacaatcagcaggttcagaatatgtctcggcaccgtaacccgattgccgcccagcggaatgtacacgtactcccggaaccaggtgctcagggaaatgtgccatcttctccagaactccgtgatgctgtcggagatgtacggatagttgaagttttcgctgaactcaaaaccgaacatccttcccaggccgatggccatatccgaatatccgctgaagtcgaaataaatctgcaatgtataggcgccgattccgatccagtaagtcaccacggaaacatcgctgtccggcagcgcaccgatggcggcgtacagggcgccgaaattgttggccagcaggacttttttgcccaggccgaaaataaaccgctttgtgccttccccgaaatcgatccaatccgtggagcgaacgctgagctgctcctccacatcccggtacttgacaatcgggcccgcaatgagctgcgggaacagggacaggtacaaggtgaagcgcagaaagctcttctgaggtcccacgttcttccggtacacgtcgaaaatataggacagcgcctggaaggtgtaaaaagagattccgatcggcagggacagcgccgtgtaatggatgtgcaatcccgtcagggagttgaaggtatccatcaggaatccgaagtatttaaagaatcccagcaccagcaggttcatgaacaaggcaaagagcatggaccctttgccggaacgtcccttttcctgagctctgccaatctgcagggcgctgtagtagttcaggaacgcgctgtagatcatcaatacgatgtacaccggttcgccccagctgtagaacagcaggctggccgccagcagcaccaggttccgggcttcgatattttttcgcggcaccaggtagtaaatcgccaaagtcgccggaaggaaatacaataagaagaggatactactgaacagcatgtcggaacacctcctcgtattttcccgggttctcggcaacgcagtagaacaggtagtttccttttgtctcaatcaccgcattggccaataacttcatctggttggttccgtagccgtcgaaggccttctcctgtgactgcacccggttctctgcggcatccttcaggccgtccagatccgcggcgctgcgtacttttaccaccagcacttcatccacacccagggattccttgctcttgtaatacagataggaatcgtagttctcgtagttgatgcccatgaactgcatcagcttccgattgttgcactctttcattttgcccatatccgtattctgcagcatggcgcttcggatatccgccatatccacatcccgggcgctggcggaagcgtatattccccgcagaaacaggaacagcaccaatatcagtgccagtcgtaccagcaccggcgggattcgattcaattgtttatccattgttcctctcatctatagatttgccttttctatcattttatccatccacatcggatagtacgcgctggccgcatgaattccgtctcccgcatagagatccttatgcgtcggcaaaatccggctggcatccacgtaagtatagcccttatcgtcgcacatctcctgcagggccttgttgaatttcttataatgtcccaaagatttcttctgcttgatggccttatttgtcggcgtagagatgctgcagatatagatcttcgtcttcggactcttcttgtgcactccatccagcagtttctcgtaccgcttgatgaaggctttggaattgcctcgatagttgatggtgtcgttcattccgaatgcaaagaacgccgccttcggataggtggccgccgccttccggaacaatttttcatcgttgttcagggagcctcccacggaactgaatacctgcttcttcgaaagccactgatagacacttaaaccttcggtgagagaatctcccaccaccacgcagttccggaatcgctccatgtaccaagctctcttcccactgagggagtcgccgttcttcagactcgcatccaccagggaaatgtccttctcaatcttggccacatcccccttctgttcccgggccacaatttcccggttgacctccacctcatagcgggtgtacccgtcgtagggccggttccaatcaaaaaaattaaatacgaaaataagcaggagtgcatacactatgactcctgtccattgaggtttccgcttctttggatcttttgctatgataatcttcactgttgtcttctttgtcgtctccataactgctaataatataccgcaaaacagctccacattcaaccttactccggtttcaaaattcaaaacatccccattaaaaaaaatgggatagttaccggtaactatcccacaaatattcgtaacgaaccgctttttaatgcttatttgttcggattgaacaggtccatcgcgccgattcgatcgaaggccttgcccagctcctcgcagccgcaggtacatgcgattcgcaggaaaccttcgccgcagttgccgaatgcgttgcccggaagggtcagaacgtgcgcttcgtccagaatcttttcagccacttccatggaagtcaggccggtatctttgatgttgatgaagaggtagaacgcaccctttggcggatacagcacgtgcatgttgttcaatgcattaattctctccgctgcgtagaacactctcttcttgtattcatctaccattgccggctggaaatccttgtaggtccgatatgcggccagtgcggctctctgagtcggtgccgctaccgtaaatgcaacgttcacgttcacgtcagtcatcaccttgatgaattccgccggagcaatgatgttgcccacacgccatccggtcatggtgaagttcttggatacggtgttgatgataatcgtgcgctttctcatgcccggcagggatgcgaacggcacgaacgggttctggtagctgaatgcggtgtaaatatcatcgcataccaccagcaggtcgtacttctccgcaattgctgcaatcttttccatggtttccacggtgaggcagctgccggtcggattgctcggtgtgttcagaacgatcgccttggttctctcggtaatcagggactccagtctctccacgttaacctggaaatcctcttcctcgtaggtcggaagctctaccgggatacctctcgacatctccacctgcttcggatacggtgtgaagtacggtgcctgaagaatcacttcgtctccgtcgtccagaatcgtttccattaccagatgcattgccaacgtgccggctgccgtaatgatgatttcatcatccgttacatccatatcgtattcgtctttatagaacttgcaaatctcagctctcagctccggatcgcctcggaactccgtgtacttggtgtgacctgccagagtatccttgtaagcctgctcgattacgcccttatcggtcaacaggtccggatcgcccaggctcaggttaatcacgtcgtcatactgttttgcctttgcgtttactgcgcccatcggggacgagctgtccttccaatagcgttttgcaatgtacttgtttttcatctccattccttccttacagttcagatgttaaaaaaaattagcttatacaataaaccaaccatggtatttattgtataagctaacaatatttctgtcaagtcttccggccggtcctttttttaacaaatcgaaaggcattctttattttttctctcccaaaaagagattaataccgttcgccgtgttccgatatcagctggcccttcaaacgtttgaagataatcacgatatacttgttgaagatgtccaccacgatgaaacccagagcaatgccaacgcaagtgagtaccagcgtcaccgcctcttccttggccaccttataattctccagtaccagatagtacatcatgtaatacagattcggtcccggaaccagcggaaatacgcagacacacaggaaaatcgttgccggcgctcggttcaccctggccataatctgggcgaagatggccacaaaaatggcgccgaacaatgtcgcctggaagttgctgttggtcatttcaaaacatacataatataccgcccaggtaaagaacgctccaattccggagtacaacacctgaatgccctttacgttgaaccaatacgcgaatcctacgcaagcgattgtgcaggatatcagctgcgttgtaaaactcgaagcaagtaccaacatcttacatcactcctttcagaagcagaatcggcaatgcgattcccaaagcaataccggtcgcacccagcacggaattccagatattcacaataccggacagggtatccctgtgcagcaagtctcgaataccgttggtgaagccgattccggaaatcagcagcatcacgactccgatggtgatatagttcacgtgttcgcccaatccgcatgtcactgccaggatgataaaggtttccacgatgcaggcgataatcgcattgaaaatcagcggattgtgctcgtatttccccagcacttcgcccagtgccacgataatcagggatgccagcacggccacgatggtgtccataaaattagtattgaagaagacggcgaatccggcaccgcccatgacaccggctatatagtgctgccacctcggctgctccggacggttcattacctcctgaagcttcgcctgaagttccggtgcatccggtttgtttttacaaatgaaacgggacagattattcagataatccagacggtcgaaattcatctcgccccccgggacgtgacgaatctgcgtcagcgtttccccgttcggggtctccaccgtcgcctgtatgttggacgaaatcacccaacaatttctttttttgaagccatacgcatcgcacagccgatacaagctgtcctccacacggccaatctctgcaccgctgttaatcattgcctccccgagatcgaggattcccttcagcaccttcgtgtaatccatttccttccctcaatttttttccttccctcaatttttaccaaaaaataaaatgctgtaccacccgagtccggatatggagtccggatagcacagccattacattatcacattgaaaccttgctttcaatagattttcatgttaatcttttgatttatgttcaaaattcttttgcgtattttgaaaacttttcacgacccttttacatcaagttaatcgcccgcataaatgccgggatcagctgcttctttcgggacagaaccccttccaaataatagcttccgtcgctcttcggcgcatccttaaaggcgatgtccgccagctcctctgcccggtcaccggcgtacagcatttccgacgaggagttccgaatatccgtcagcaggaagaaaaccatggacacgccgttctttccgcactcgtggcgaagcagcggctgaatccgcttcttgatttcctgaagctcgtccgcactcatggaactgatctgacccacgccgaagctggtatttccgaaggtgaacttcttgtaatcctgatagaagatttcctcttccgacttgttgcccagatccgaacccgcttcgaacatttccgtggcaaaagcttcaatatcgatgtctgccagcagcgccagcgcacctgccgccatcttgtccttcagcgtacaggtcggagatcggaacatcagcgtgtccgaaattaccgccgcgcacagcagtccggcgatggatggcgcaatctcgattcccttctccacgaacatctcgtacagaatcgtcgccgtacagcccaccggctgattgacaaagtaaatcggctgcaatgtctgcagggtgcccaggcggtgatggtccacgatttccagaatctccgcctcgttgatgttgtccacggcctgggatgtctcgttgtgatccaccagaatcactcgcttcttctggattcccagcaggttccggcgagagatggttcccacgtagcgatcgttggaatccaccaccggaaaagctctgtggcgggtggacgccatggccgcccgcaccttgtccgtatagtcgtccatccggaacgtcataatgtcttctttcagcatgaaagattccaggggaacgcttttgtggatttccatgcaaaccgcaaaagtatccatcgatgtctcgatgatgaccgccttttctgtccgggccttagcgataacttcttcgttggccttggctcccagacagagaatcagcacttttgctcccttctccagggcgccaatctgattttccacccggtccaccatgagcatcaaatctcccggctcgatgtgctcctgcatgcgctccaccatggccgcacccaccaataccttgccttcttcaaagcggtcgtcgccatcgcccaccacgatggtgccgttcacggtatccgcaatatcccggtaccgcggcttcatgcgggacaggaaccgactgtcctccgcctccataaaggtctgggcgatgtctcccttggtgatcagtccgatgacccgatcctcttccgtcaccgcaagtgtcaccgcatccgtctctgccatgaaatcccacgcctgcttgatggtcatgtccttggacgccccgggcgtgcggcgaatttccatgtcgcatacctgagcaccgatgtcgcccaggtaatccggaaccggcatgttgaagcggtccagcacgtacatggtctcctggctgatttctcccgcccgcatcggaacgtagtggtgactgtgggtggtcatgtttttcaaatgtgcatatgcgatagcggagcagatggaatccgtatccggattcttatgtccaattacgatgatatttcgttcctgctgcatactgctctctcttccctttcttttcctgccatcctcggccttacttcatgcgaatgctcttgattttctgatcttctagcggcttgtccatccacggatcccgcttggtgttcacgatggcatccgccacttccatacccttggtaatctttccgaatgcggcataatctccgtccagatgcggtgcatccgctaccatgatgaagaactgggatccgccggaattcgggtccatcgctcttgccatggagagaacgcctcgagtgtgcttcaggtcattcttaaaaccgttggagttgaactctcccggaatggtatatcccgggccgcccatgccgtttccgttcggacatccgccctgaatcatgaatcccggaatgacgcgatggaaaatcagtccgtcgtagaacttcttttcgatcagggattcgaagttctcccccgtcttcggtgcgatgtcttcgtacagttccccttccattacgccaccgttttccatttcaatgataaattctttcatatctgtttctccttattggtatattcaatgatagataattctacaacattatttcctttctgtgaagtcttacgggcaattcgatttgcgggagttttcccttcgctctcgccggaaactttcgcagggccgattttcttttataagatttttctatttgaaaaaacgggatttggtgatactatttacttgtatatttatgtttaataataggaggaattcattatgagattagatgctgcaggcaaagcatgcccaattcctgtaatcatggcgaagaaagagctggacaacggcactcaggatctgtccattctggtagatggtcagactcagattgacaacctgtcccgcctgggaaagacatatggaagagaaatcaccgttacaccggaaggggagaagctcgttgctacatttgcggatggcgacggcaatattccggaatccgctcacggctttgacgaaggaagctacgcggtattcttcaacaaggaaggtctgggaaacggcgatgcagaactgggaatgaacctggcaaagatggccatcttcaccctgtccgagagcgaaaacatcccgacctacgtgctcttcatgaacggcggcgtaaagctgaccaccggtgtagagcctcagattattgagaacctgaacaccctgattgagaaaggaaccaaggttctggtatgcggcacctgcctgaacttcttcggaatcaaggaagactgcaaagttggaaccgtcagcaacatgtatgacatcctgggtgcaatgcaggaagtttccaaggttatcactctgtaggagagggtggtgttcatgacggatactttttacctgtacacttttgaatccactcacggagccatttccaccgagaagctgctgaagccggtgggctgcaccatcatgccggtgcctcggcacatctccaccagctgcggaatcgccgttcgggtggagccggagaaattcgacgaatcaaaaaaggtattcctggatgggacggagttggtcccggaggaataccatgtctatcggattgaagaggataaatccatcaagcgattcgattacgaaccggttaccatttagaggtaaccggtttcttttttctctaccgcaattttctcatctcggacgacgtattcgccatcgatgcagtccacaatcatcaaatcgcagttatgcacatcctcatcccagaaatttttcagctccttgtgccggaaatagaggagcatggcgtgaatggccgttccgtgggacgccaccagcacatttccttgttcccgagtcttcagttcttccaaaaagtccgttatccgctgaatcagatgttgaaaagtctcccctctccccgccggctgaaattcatccggtgcggaaaagaatttctgcgactctccgggaagctcccggtaggcatagccttccagctcgccgaaatcaaattcctcgattcgatcatccacgtgaaacgtgtctcggctctgtccggtaacgatttcgcaggtatccagcgcccttctcagcgggctgcaatagattacatcgaaacgaaggtttttctcccgaaccacctttgccaaatcttccgcctgttcaataccggtggcgttcaggtccacatccatgtgcccctgcaccttccgggccaggttcagatccgtttgtccatgtcgtaatataaataatctcactgttttctcccatctgtgatacgtattttttaaactgttatacagaataccacagatgtttccgcagggtcaactttccgggtttcggcgatgtgccattaccagaagtccgctgcagctgaggattaacagcaccatggccaccgcaaaaccatcgtcgccggtttctggggtatcgattcttcggactttatttgcctcgcctttggtgtctcggcttttcgtgtcccgattcttggtgtcccggctttccccgtccggattatcggggtcccggctttcctcgcagccgtcttggattttcttccgcgttccgtctttgacggaaatgacctcgttcttgtccagatccaaaatggtatcgttggcggagtcatccaccgtcgcaccgtcctcatcctccggatcgttttcctccgtctcaaaatcccgaggctcatcggaagtctcccctccgctgattacgttttctgctgtgtcttccggattcgattctgatgcgtccggatttgtttctgatgcgtccggattcgcttccggcgaatccgtcgactctgccggtccgccgtcttccgtttcgctcacctcctcttcctcttcgtattccggggtgatttcttcaaattccacctcggaagtttcgtccgaaggctttaatttttcgtctgcttttactgcggacatcggctttgatttcgcttttgcttttttggtttttttggccggggcagcctttaaatttcgaatgcgaatcaccgtggcgatttttccgtcatatcgggccgcccgcaccttcgctttggttttaccggctttaaaataccactttccgttcttcttcacccctccgtctcggccggcggagtaccacaaagttcggcctttggcatctcttcccgcatacaccgccgtatggatatggctgtcccagccgcaaatatctcctttcttgagaccggcatgcttcgcttttttgtggggatgaagtatcttcagcttattgtttttcgtaatgcaggttttccgctttcctcgaatggcacctcctttgtcaatccagaaaacctgccccttcttgataattcccgcatcctggagtgcccaggatacgtagatagcacagttggtcacgcgccgcttctctttgcttttccggtaagatcccttccctccgtttacgctgtagtgaaatccgtccttctccagattctcggctacccggtccagggaatgcttccaatcctcgtatgtataggctgatggggacgaggtggccgcttccgccgggaacgcggttcccagccgagacaacatgagaaacaaaaggatcaagaatcccaggaatctgaggaatccggaaaattccggattcctgccggcaatccgaacacgaattgttcttttcatattgcatctcctttcatattatttccggtattgcagcgctgattcctttccggtgaaagtattatgccacagaaaaaattccccttcagtacacttttattatcatgcggaagtttataaacttccgtatgagcgggcgtggccgggcgtggcggtgtggggcggagccggcgatgtggggcggggcggcggggcggcggggcgacttggtgcacgaaaaccctctagcccttgttcctccgttccctttgcaccaagtcccccgcattttttcgcccgtgaccggcgccgtcttggtgcacgaaatcccgccggcccttgttcctccgttccctttgcaccaagtcccccacgttttttcgcccgtggccaacgccgacttggtgcacgaaatcccgccagcccttatatctccgtttcctttgcaccaagtcccacgcgttttttcgcccgtggccggcgccgacttggtgcacgaaatcccgccggcccttgttcttccgtttcctttgcaccaagtcccccgcatttcttcgcccgtggccggtgccgacttggtgcacgaaatcccgccggcctttattcctccgttacctttgcaccaagtcccccgcgtttcttcgtcttggggcaccacgcccccgagcacagcagccgttcccgacgggcgggcgtggtgcctcaccgttcgctagcccttgtttcttcgtcttggggcaccacgtccccgagcacagcagccgttcccgacaggcgggcgtggtgcctcaccgctcgctcttgtttcttcgtcctgaggcaccacgtcctcgagcacagacgaaaagtgatgcacgaaagcctcccacccgccttcgtgcatcacttttcctctattatattttcaaaaggaaagaattgacgacgaacatcacccgcactcctttcgtcgtcaattctaatcatctccccgtgccgcttgcttcaatctgcattcggcaccacaaacctgctaagagaagtcaaggaatttttctcttagcaggttcctaaatttagg

SEQ ID NO: 144 - DNA, 9053 bp, Unknown
  16S sequences of unknown bacteria
gcatcagcttgccgccgtatttgagaattttgcgcgtaacgccgccttccagatgctccaccgccgtgacgtcgcccaaaccgaatgccgaaatcttgttcatcgcaatgttctcctttaaaatatgagcaccgcttcatcgttggacaaagcgaatttcctgtgcgccgctttttcgccataggggccaaccgcgcccaatttccatgcgtcgagatcgatttccatggcgttttcgccgaaattggcaagcatggtatagcgccgtccatcctgccccgttgccgtgatcgcgaacaagtcccctttgcggctcgtcgcgagagaatcgctcagcgctcttgtggcgcaagcgtcgcccagggtcatgccaaaccccacgtcgatcagcgtttcgtttcggtcgtaaaagcgccgtttggtgctgtagggcgcacagatctcttcggcataaagcgtgccgctattttcacgccccaaaatctccacttgccgcctgccagggcgcacgatggtgagtttttgtggcgaagcaaggccaattttcccatccacattgacccaatggccggcgtctatctgctcatagcgcttggcataatcgccgccccgcagataatccgccccattttcatgcgccaacaggcgctgccgcccattgaaaatgtcgtttggcacgttccacaaaacaccgcgcagcgttgccacgaacgtgcggttcaaagcgcgcgcgtattgcaagcaaatcgcggacgcgccatcgggcagcgcggcaaaagccacgtgcttttgcgccatggtttcctttagctgcccttccgccatgaattgatcggaatagacgatcgtactgccgcaagtgaggaaaccgccttcaaaaaatttttcctgatggcaatgcacttcatcgaaattggccctgccgacgccttcaatacggccgcacaaattgtagcgccattcggccaacgagctgtccgacttgggcaagaacagggcttgcggcttttcgctcgcacgccacacaaacgacgcgtagcggtttccgtgggtgtcgaaggaagcgccgtggtacgcatcgtgccatgtcaaatgcgtgggcgtggttttttgcgccgagaggggataacgatcgtgccaatacagcatcatcgagagcgcgtttgcccggtcggattctagccgcgtgtaatacaccggcgattgttcttcaaaatggccaaaacggttggaaaggaaagatccatccccattgaccgctgtttccttttccaggatgctcagccagcctttttccaaggcggagcagtcctcgccatatttgtcctccaccagagcccacatgggcaacgcataatcctggcaatagcaatatcgcgcgcggctatcgccgccaatgcgcagcaaccggccgtcctcaaaggtgcaggtgcgaatgagccgccactgttcataggcgtggtgatagagaatgtcatctgcctgaacgccgcgcccctttaggaagaagtgcagcatggcaatgttggaaaggcagatcaccatatagcccacgttcatgtacccatggtggtttgtggcataggaattgaacatgttcgcacccacgaacatgtcgccaatcctgcgcccatccaccacttcatccgagttttcgtccgcctcgatggaaatgccgttggcaaaaaattcctgggcctttttccggtaggccgcacaatttgccgcgtctggatacagcgccgcgccgcgatacagcatggcgccattccaaatgttgctttccggcttattgtgttgcacgagtccagcttcaatgggatactcgcgcaaaaggaaatcgcattccgataaaaccattttgcgcaggccatcgcgatcttcctgtgtcaaaaagggctcaatcgcttcgatgccatggaacatgcgctctacgcccaacacatagatccagttatggccccattgttgcccatctgtgcaaacaaaatcgcccgttacatgggtggcaagcgtatagcgcagcatgcccagcgcctgctccagcaccttttcccgcgtcaaattccgcgattgccaatcgatttcttccatagccgcggcaacggcaaacgcagaaaacgccttctggtgcgtgtgcacgccccagtggccgtgctcgcccgcgccataacagatcaattcccttcgttccgggcagatatacaagtgtttttgggaaaaagctacccaatccgcgagaagcttcacgccccgcgtccgctcaaaatgcgtttccatattaccatccctttctcgttatatttttcatcgcatttatcccttcaatgagcccatcataacgcccttgacgaaatatttctgcacaaagggatatatgcacaaaatgggtgctgttgcgacgacgatcagagcgtattttaacagatccgccattccctgcatggctatcgccagctcttcatctacgatatccgacgtatcaatatcgttcatgatcaaaatttcccgcaaaaagatttgcaggggatatttgctgctatcggaaagatagatcatggcattaaaatacgagttccaatgtccaatcgcgtattgcatggcaattaccgcgataaccgccttggagagcggcaacacaaacatggtgaaaaagcggaaatcgttgcagccatcgatctgcgtcgcctccaaaagctcatctggaatggtgctgcgcaaaaatgtgcgcgtaacgatcatttgcgagatgccgatcgcgcccggcaacaccatcacccacaccgtgttgagaatcttcaaatcgcgcattaccaaatagctgggaatcatgccgccgctgaatagcatggtgaaggtaaaaaggaacgtaaaaaaccccttgtgcggcagttttttccgagccaacggatatgcgcagatcagcgtcataaagacattgatcaaagtgccaagtccggtgtagagaatggtgttggcatatcccgtccacacccgttcgttttcaaacacgcgttgataccccatgatgctcggttcaaccgggaagagcaccaccctgcccgaagaaaccgcgtttgctgaagaaaacgacgccgacacgataaaaatcaacggatacagcacaatgagcgttaacaggatcacaaacgcatagctaatcgagtaaaacagtttatcgtcccttgagcgctggacggcatttttgctcttttgcatcgcacgcaccccctaccaaagggaattctcgctgattttgcgagaaatccagtttacgcccacaatcagcaccaaattcaccacagaattgaacatacccaccgccgcggaataagaataatcgttcgccgcgccagaggccaatcccttcttatatacgaaagtggatataatctcactgcggctcaaattgaggctgttttgcataaggtacgttttttcaaatccgatgctcataattgcgcccatgcgcaggatgagcataatcgtaatggtgggaagcagcgcggggaaatccacatgaatcagccgttgcaagcggcttgccccatccacttccgcagcctcgtgaaggtctgggctcacattggtcagcgccgccagatagatgatggaattgtagccgaacccttgccatacgccgctccaaacatacaggtgaggaaacgcactgggttgggcgaacaggtccgctggcatttgtcctgtcaacgcctgcatcagctttccatagaggccgttcatgggatggaacagctgcatcagcatggcgacgatcaccacggtcgaaataaaatgcggcatataggttatggtttgaacggtctttttgagtttttcgtgctcaatggtattgagcataagcgcaaagagaatgggaaaggggaacgcggccaaaatggcgtaaatcgatagcgaaagggtgttatacatgatgttggtaaactgatatgcgttgaaaaatttggtgaaatttttcaagccaacccatgggctgtcccatacgccagtgacaatggaaaattttttgaacgcaatttgtagtccaaacatcggccagtaggcaaatatcaaaatatacgccactggaagcagcaaaaacacatatagctgccaatacggcgcatatttcatcctcagcttcttcagcatagccgtcatccttccatctacaaaataatactatgggcgggtttttcgacccgcccgtgcattcttctttttgcgctgtgcgacttattcgctatacatgcgggcatagcagctgttcacagcctccatgtattcatctaggcccattttgtcaaattcgtccacgtagctgtcccaatccgcttcaatgtccctcacgcctgtgacaaattctgagaaagaattcaacacatagtcgttgatggtcgactggtattcgttgatgatttcctgttcttcctcgttgtacaccaggccgttcacaatgggcacgctatactccagctctttttccatcgtgcggaacaggtgatacgcggcgttataggcaaggccatccggatccgtgccctggccacaggtgatcttgtccgtcaaaatgtacggaccaacctgcccccaccaagaattctgcaatacgccccaggtggataccacggacattgccggcgggaagccaaggccttccgcagtgcctacggtattttcatccggtaccaaccaatcgacaccttcttcgccatagcggttccaaacgctaatcagttccgagcacatgtagtcgccaaagcggaacgccgcttccggattttcacaattcttggtgatgaccatgccaatggaaggaatctgttccgtccattgggtctggcgcaaaccggaggggccttccagtggatccaggcaaacgtactggccacggcgcacatctgtcgcagggaacatcgtgcccgacatgcgcgccaagcagccaaccacttccggctccggcaccacaatggcattgagctgcgtgctatcctgcgtgaaggtgagcggcgaaatcagtccctcgtcgtatagcgacttaatccattggatgccctctttccagccttcctggtttgcggcaaaaccgatggtgccgtcttcattgcggatgtaatagttctcttggcagtaaataaagggattcatcaaatagcgcataaagttggaattcacggtgtccgccaggcccatcagcgcgatttcgtccgcttcgccattcccgttgggatcttcatcgcggaaacgccgcagcatttctgcgaattcctccgtcgtctgcggacgctcgatgcccagcgtttccagccacggctcatacacgagcatgcggcttgccgaaaggctgttgttgatataggcgtgatagcgcatcaggccatagatttctccatcataagcggtgatatagcgcagcaaatcttctttgttcagtccattggcttccatgttttggtcggtgtagtacgcgatcgtgtcataatattccgtgacaggaaggataatgcccatttgcccatacatggccaaattgttcagtccgcccaaatcgctcataataatatcgggcaattcatcgccaccagccatgatctgcaattccaccttctggataaattcttcggcggtggagggatagtatacaaattctagctcaacgttcaaatcatcttctaggcgcaaggtctgtgcgtttgtgtcaaaatcctctacaactgtcgattggctcagtccaactgaaaggtgaatcgtttcttccgcaagggggagcgtgcctggctctgaaaggacggtttcggccgaagccccgcccattgccagcgcaaaaaccaaaagtaccagaaatccgcggcgcattgttttcattccaattccctcctaaatggtatagaatagcaccacaaactgaataatataattttatagagagtgcgatcttttgtcaattggcaaaaattttcaaaacaaaaatgcatttgattagggctatcgactacaattgtgcataatttattaaaagcaacgcgggcaatgtcaaaaaagctccatcttacaatccacagctctgccttttagctgctatgctaaccctccgcaaatttggcccaaccatttcgctggaagaaattccatcggttctattggattttcgcgggaagtgtggtataatgcaattgtcgctggcagccctcggacgttgtcccttgccagcgtatataagaatggcacaataagccggcgttttttgtcggggaaggaggcaaaaattatgaaaatggtgaaagacaagcaaattttggtcggcgcggatttcgcgggctatcccctgaaggaagccgtgtgcgcccatctgcgcaaaaagggctgggaaatcaccgatgtgggcgtcaccgacccgaacacggaggatacggacctaatgttccaccgcattggcctgcgcgtgggcagcatgattgccgaaggcgaattcgagcgcgcgctggtcttctgcggcaccggcatgggcattcacattgccgccagcaagtgcccgcacgtgcatgcgggcgtggtagaatccgttccggcggcgctgcgcgccatcacgggcaacggcgtgaacgtgctggccatgggcgcgttctacgtggctccgcagatggggtgcgatatcgcggacgcctatctgaacgccgaattgggcaccgggtatgaatggtggaaaaacttctatgagttccacaagctcgccatcgacgagctggaagccttcgactatgaagaatacaaaaagaacggcttcaaggtgaagcatctgggcgattatccgctttcgctggaaaccaaggacgatttgcatttccaactgcgcggcgattgacgcggcgcgcagggaagcgcggcacaaccatttcgggaggtgtgcgatgaacattcccaaaactatgcgcgcgctcgttgcgcgcggccagggcgattacggcctggaaaccgtgcccgtgcccgtcattggcccggaagaaattttgttgcgcgtagaagtgtgcggcatctgcgcgggcgatttgaaggccacgcagcccgtggcgcgcttttggggcggcgacggcatgcctggatattgcgagccgcccttcatccccgggcacgaatttgtgggcgtgattgccgccaaaggcgagcgtgcggcgccggaattttccattggcgagcgcgtttgtgtggagcaaatcgttccctgcggcgcgtgccgctattgccgcgacgggcgctattggctgtgcgccccgcacgacgtatttggcttcaagcgctctctcaacggcggtatggcggaatacgtccgcctgcccaggaatgcccgtctctacaaagttcccacttccttcacgctggaacaggccgcgctgattgagccctatgcctgctcgctgcacgctgtgcgccgcgcgggcatccaggtggacgatgtggtggtgctggcgggcgcgggcacgctggggctgggcatggtgggcgcgatcaagctgcgcaatccccggaaattgatcgtgctggatctttcggaagaacggcttcgcctggcgcggcgctttggcgcggatatcaccatccagcccaaccgggaagacgccatacggcgcgtgctggagctgacggacggctatggctgcgacgtgtatatcgaggccaccggccatccttccgccgtaccgcaggggctggaaatgatttgcaaaggcggcacattcgtggagttttcggtgttcagcggccctgcgacggcggattggagcatcatcggcgacgcgaaagaaatcgaaatccgcggttcccagctcagcccttactgtttccccaccacgattgaaaacatcgccagcggcaaagcccccaccgaaggcgtcgtcacgcaccgctttgccctggaggattgggcggaggcgttccgcaccgcgcaatccggcgcggccatcaaggtcgcgatttgccccacatcccccatgcacaaactatagcgatacacaaaggagcgtatttccatgatgaaaattggcgtgcagaccggcggcgtagaagaagcgcacggcattgacggcgcataccgcatcattcacgaagcgggttttgacgcggcggacgcgaacatcgaccatctgtattcttatcaagccatcgtgaaccatcagagcgttcccgccttcgacgcaagcgacaaggactgcctggaatatttccgtccctggaaagaagcggcggaaaaatacggcgtcgataactaccaggcgcacgcgccgttcccctcttatattctcgatgagagcggcgagcagaacgactatatgatccaggtgctgaaaaagtgcatcataggctgcgactacatgaattgccgccgcctgatcatccatcccttcttcctgggataccacgagcaactcgatccgcagaccgaatgggacgtgaacatcgagcgctacagccggctgatcccggaggcgaagaaatacggcgtgatcctttgcctggaaaacatgttcaccgcttaccggggcaaaatctattccgcctgctgctcggacatcgacgtggcctgccgctatatcgacacgctcaacgaaatcgccgggcaaaagtgcttcggcttctgcctggataccggccacctgctgctattgggcaaagacgtgaaaaacgccatggtgcagctgggcgaccgcattgaagccttccacgtgcacgataacaacggcgtcaacgaccagcaccttgcgccctatatgggcgtgctcgattggaaccgctttgtggaaggcctgcgcgccattcgctacgacaaaacgctcagttttgagacgtttaacatctggaacaccatcgataaggagctatgccccgagcacatgcgcctcatcgcccaggcgggccgcatgttcgcccgccgcgcggcggaataaatttccaggaaagcctctgatcgttgacaaaccttcggtttgccaacgaatttgcccgaccgcttgtcttcgcaccgctctcgccttacggcggcgcggtgttccgtggctgtg

SEQ ID NO: 145 - DNA, 1773 bp, Unknown
  16S sequences of unknown bacteria
aaaaggcttggatttatgggcttttttctgcgaaaacaaccttaaatcagtgtttccttagatctcctcctcatagttgctgactctcacgagcagggcggtcatgtcgtcgcacctcttgttgttcagcgcggcgttgtcgactatcttctccgccattatatcaagattatcctcccattcgtaggttataagattcgcgagccaaacgccgtcctcaaggctctgcgccactccgtcactgagcaggattatcacgtcccccgcctcgagctcaaactttatctgctccgcgtcgagcgcgggcattattccgatgggcacggtttttgactgaagcttatagagacttcctttcctcagcacatatgacggcgcggcgccgctcttcacaaacgcggcatgacctgtcatcaggtctatctcggcgaggtcgaccgtcgccgagcactcctcacgacggctccgcatgaagccgttcagcatctcgagggttatcgcctttccgtttccgccggtgaggagctgttcgcagaacaccccgcacagcttcgacgtcaccgccgcctcccttccgctccccatcccgtcggatatcagggcgtagaagtaatcctccttcgtctcgaagcaggtcgccgtgtctccgttcgcgctctcgctctccttcacgtttgacgcgcgtgcgtattcggcgctgtagcgcctgcgggaggacatcgacacctcgaccgtgttctcatttatgctgaatttcggtttcgtcagatatgtatgcagcgtattttcggcggcgcgtctcagatcatccgcaccgtagcgcattccggcgagctctatcccggtcattaccacctgctttcttcttgatccccagcagagcgcgcccgcccccgacatatccatatatctgagggcgcgtctcagcttcgcggtcatctccgcgtctatctcgtattccttgtcattctccgaaatcgattcggcaagcagcttcgacaacgattcataatcgagcgcaaaagcctccgtcttgtcgcttctgatcagcctttcgacaagctccccgcattccgtgttcatctcggaaaggattttcccgatattgtaacagcggtcgcgcaggtactgcggaacgtcgtccggctcgacgcgtcccttcgtgtacagcccggttgtgagtttgctctgcgcgtcgagagtggacgtgcactccctctcgaggcagagcgacgcgagcgaacatcttgagcagtatttatcgaaagagttgtcgcatatctgcttgaggtcgataattccgggccttctcagacggtcggaaagggtatatatcacgtcggacagccgcccgagcgcctccgaaagggaattcatacgcatcatcgtgtccttttgtcttttctcattgatcagagccatgtcgttcccggcgtccggatccggctgagcgaacgccggcagcttcggcagaagaccgtaatgcgcgagcggcagatatacagcgaccgcgccgagcgtgtccggaagcaccgtcttcagcgtatcgaaaccgcccgacccggtcccgagaacgagcgacacaatacacaccgcagccgccgagaccgcgttcgagaaccgcgagaacatccccgccgcgagccccgctccagccgctatacacggcgcgaaaagcagctccgtgtcaagattcatgagcccggagacgtcgaccgagcaggcgatccccgcgatgagcccggcggcacaaccgcgtctcgccgcctcgcc

SEQ ID NO: 146 - DNA, 5246 bp, Unknown
  16S sequences of unknown bacteria
tgttcgacacctctaagcccgctcccagaagattctcgcccacacaccaatgaaccgcttcggcgtaaccgacgacctcatcggaaccctcctctggctcgtcgacaacaacgcctccggcttcgtcaacggaacggtcatcccggtcgacggtggattcgcagcttattccggagtctgagaagtggaggaggaagaaccgctttgaaaagcggtcctccctcccccacaccccctctctccccgtaaacttttcataatttttcaggcgcttatctcaggcttcgtatgaagactgagataagcgcttatttgtacaacaaaaaattgcaaaaagtattgcaaagtgttccggaatatgttaaaataattcagtgggcacaaaacccaatcaagtataaaaaggaaaggattccaaatggtcttctcaagtctcgaattcctcctgatgtttctgacaatcaccctcctcgtctacttcatagtaccgcttaaagcaagaaacatcgtcctactcatcgtcagcctcatattctacggctggggcgaacccgtctacgtcttcctgatgatcttcaccatagccgtcgactacatcttcggcctcctcgtagaacggaatctcaaaaaagacgaccggaagaaggctaaaacctgccttgttctgagcatcgtcatcaacctctccatcctcggcttcttcaaatactacgacttcttcgtctccaacctcagactcatccccggtctctccggtctgccgctcctcggactcagcctcccgatcggcatctccttctacaccttccaggcgctctcatacgtcatcgacgtctaccgcggcgacaccggcgcacagcacaatgccgccgccttcggagcctacgtcaccctctacccgcagctcatcgccggcccgatcgtccgctacaaggacgtggacgaccagctcaccgaacgcgaacacagtgtcccactcttcgccgacggcgtccgcaccttcgtcgccggaatgggcaagaaagtcctcctcgccaacatggcagggcaactctgggaatatttcaaagcgaccccgaccgacgaacgcacagtcgtcggcgcgtggctcggaatgctctgctacaccttccagatctacttcgacttctccggatactccgacatggcaatcggtctcggaaaaatgatcggcttccggttcctcgaaaacttcaactatccgtacatatcgaaaagcataaccgaattctggcgccgctggcacatctcgctcggcacatggttccgtgaatacgtctacatccccctcggcggcaacaggtgctcgagagcgaaaaacctccgcaacatcttcatcgtatggtttctgaccggcttctggcacggcgcaagctggaactacatcctctggggactctactattttgtgctcctcatgatcgaaaagaccttcctgctcgaaaagctgaagaaagcccccgccgtcgtctcgcacatctacacgatgttcttcgtagtcatcggctggctcctgttcgtcttcgaggatctttcgaccggagtcgtctggctcgggaatatgttcggcgtcggcgtttccggcgttgcgagcgggtccgacgtgtacaacctcctgcgcaacctcatattcttcgcgatactcgtcgtcgcctgcacgccgctcccgaagaagctctggaaaaagttcacagacggctccgctgccgtgaaaacaataagcgccatcggctgtacactgacacttcttctgagcatggcgtaccttgtcgactcaacgttcaacccattcctgtatttcaggttctgatgcggaggagatccagatgaaaaaatacaagatatatgatatcctgacggtggcagggcttatcgtcacgatatatggtttcgcgcttgccaccctgatcgtaccggacaagaatttctcagaggacgagaaccgatacctccagcagaagccgaagttctcgatcagcgcgctcacaagcggcaaattcacctctgagatcgcgacctacttctcggaccagattccgctcaggaacgtcttcgtcggcacgaaagcggtcgttgagatagccatgcagaagcaggagaacgacgatgtcctgctcggctccgacggatacctcatcccgaagaacgaccacccggactacgaccgcgccggaaagaacatcaaggcgataaaccgcttttccgagacgctgatcacctcgtccgactcgtcgctttccgtcgatatgcgggtcgccatagccggaagacctcaggacgtcctgacgcgctatatccccgcgatttacccggtggagcactacaccgaccggatattcaccgatatctgcggagaactcgcggcgccgtcgatcgatcttctgacacccctgacctcgcgcgccgacgccggggaatatgtctactaccgcaccgaccaccactggacgaccctcggcgcgtattacgcgtactgcgaaataatgaaatcctttgacatggagccgtatccgcttgagcacttcacgcgcgaaatcgtctccgaagagttctacggcacgacatggtcgaaagccggaatgaaatggataaagccggacgagatggaatacttccgctggaacggcgacaccgatatggtgacagagatcaccgacaccgggagaatgatcgacgggatgtacgacctcgaacgtctcggagtcaaggacaaatacagctccttcataggcggcaacaacggatacgtgaagatatatccaaaagaaggaacagcgctcgccgctgaaaagcgcgaaaagctcatcctcatcaaggacagcttcggtcactccgtggcgcccttcctcgccgagcatttcgacctcgagatactcgacctccgctactacaagctccaggtgatagacttcgtcgcggagtctgacgccgacaagctcctcgtcctcgtcaacgccgacagcctcgtcacctcgaactcccttgccatgctgaacctcggtcttggcggcaactgatgatatgaactctcaaagaaagaagaaaagccaaccaggctcataagatcgcaatgaacaagaacttccgcacagtctccctattcttcgcgaacgcccttgtctacgggctgaactccctgtactactgcttcatccagatctacatcggcgaataccacccggacaatatcgccgggattctgctttcgatcgggcccttcgtctcgatattcgcgccgatattctggggcatattcgccgacaaagcaaaatcaaagaatctcgtcctcgcaatatcaatcataggctccgccgtattctactgtcttctcggcgccggtcactccttctggtatctcgcggcgatgctggttttagtgatgctcttcatgtccccgttcggcggactcatagacatcatcaccctcgaatacacagcggaaaacaatgtctcctacggacccatccgcatctgcggcaccatcgctttcggcgggcttccgatgctcctcagcggctttacgggagacaacatcttcgtgatattctacgcctacgccgtctgcgccgtcgccgcagccgtcttcgtaacgctctcacccaaagttgaaggtcacagcacagccgaaaaacgcaccggaattctcccgctcttcaaagacggacgtctcatgctgatcttcatcttcgtcggcatatctcagttcacctgggcatactacctcaacagcttcccgaaccacctgacaggcgatcttggtcttccgcagacaatctggggcataaacaccttcctcaccgccgccggagaaattcccttcttcctcatgttcacaagactcttcgacaaaatgggaatgaaaaagctcctcctcgtcagcctcgccctcgtaaccctcagatacgccgccctcgcgtttctcacaaacgtacccataatgctcatagtcggcttcgtaaccggctccgccaccacgatcttcacctactgcggctccgtctacataaacgagaacatcgctcctgaatccaaagcctccgccaactccctcatgtacgccctcggcaacggtattccaaaagtcctcgcgggagtcctcggcggacaaatgacaacaatcttcggattcacggtatcaatgataatctgcaccgcactctgcgcgggcggtcttatatgtttctttattacgcaaaggacaaaaaaactcagctactgataatcgttcgcttgcaggggaggaaaaacctttgaaaaggtttttcctcccctgcacccctccttttctaaacttttatacattaaggagaacagcacatgacacacgctatcgggaaaatggcaaatgaaatatacgagacagtcaaaaatgactgctccgtatacctctacgggtcagtcacgctcgatgatttcagggaaggctggagcgacatcgatataatcgcgctcaccgggcacaaaatgtcagacgatgaagaaagcaccctcgtttacctgcgccagaaaatgatgaaggacaacccaatataccgctccttcgaaggcgtcatcctccccctcgccgacctcatctccgaaaccccgtcccgcgccgtatactggggcaccagcggtcagcggatcacagacaccttcaccgccgatcccttcctgatgaaacaactcacaacctccgccaaactcatcatcggcaatgacatccgcgcgggccttcgcgaaccatcatacaacgaactcgtcgacgccgtatcatcccacctcgactgcgtccgaaatcacgcctccgcgaccggtcatcccctctactcatatggctggctgctcgacatctcccgctgcatatggaccctccgcaccggagaaatcatctcaaaaacccaagccggagaatgggcgctcgaaaaccacctctgcccggacaaaacagccctaagatacgccctgcgagcccggaaagcccctctcgcggcaaagaacgcgcccggactcatgcacgtcgccggaatgatcgcccccgccatacagatctacgccgacgtcctcgaagccgaactgaaaaaagcaaaataaccacggctgaaaaaaaggaagagacccatcgatctcttccttttttctttttataagcataccttcatcactcgcagttttgaggcggttttgaaaaacggcttgtccgtctttcaaaattcacgaccctatgtcgtgaaagcctcaaaact

SEQ ID NO: 147 - DNA, 32759 bp, Unknown
  16S sequences of unknown bacteria
atgggcataaaaaggacctgatggggaacccccgtcaggtcctttttatgcccatgtctttcgtacaaacttacagttttgaggcggttaaattcacgaccctatgtcgtgaaagcctcaaaactgtttggtctgaaaatttactttcagactttaatctatgtatccgagtctcttcgcggcgaagatgaagaagatcatgcagctcgagtaccactcggagcaggcggtcggctctccggtgaacgggtcaagctcctgaccgaggttcactctgccaaagcagctcgtccacgcggtaagccacctctcgcagagcctgtcgaaatccgcgttgaatccgtaatagtccatccatctcgtgcatctaagcgcgatgagtccctgtgagtaatatccccagcagttgcgctccgcgtgtccgttcacgctcggatcggagaccgccatcgacgggtacgggaacggcgtgttgaactcgtccgggttgcttatgtgtctctcgtatatctcgcggatgagagcggcgtcctcctcggggtcaagcaccttttcgaggaacaggtggaatatcgtcgacgacaggtactttcttctgttcccgttcttgtcgacgtcgtagaagaagcagtcgtccttgtcgaagcagacctcaaagagacgctttttgacatccttcgccttttcgcgccagtttttctcgtcctccggaagaccgagctcacgcgccatgtccgcgagggtaacctcggtcgcatagaagttgcaattcatgtcgacagcgattatcggcgcgacgtccttctctttctcctccggcgtagggatgtggtctccggcgttgcccttgaagagcataccttcgaggcgtccgctgttgtcgtgaccggtgtcatagccgtagaacatttcgacaagccctctgccagtcgtcatcctcgtatttctgaaccagttttcccacatcgacgcggaacggtacgccttttcaaggaatccgcggtcgcgcgtcatctcgtatacctcatagcagagccgcgcgaaagacacgcactcctgcgtctgaccgtagccgatgagcttttccggcgggcagtcgggcattttgttcgcgtcccagacgtagcacgggagctgaccgtccgggcgctgatagtccatgaaaagattcagcgtgttgaccgcgagcgggagcttcgaaggatccatcttcgcggagatcaccgagtcatagacgtgctcgagccagatgcccgggtaagcgtccgagatcaggaagagcggcttgtccatgcccttgaaggcgcggatattatatttgtcgatgtgctcgcgcgcggcggcggcgacctcggctactttttcggggtggagggttatatcaatcattttccaatttcctttcgatgatatttatgggacactactgcgaaaacaacactgaaacagtgttttctcaaaaagtatagcagaacggatagaggttgtcaagcggaatcggcaatttttttgagacgtcatgatacttcgttattatgtacaaaattgtttcgcccgcttatgacatatgtcaattgacatatcgtgatatatagtgtataattgaatcatagaaatatcacttccggagggagacacactcatgcgcaagactatcgctctcattctaactataaccatgattttcagcctcatatcctgcgcgaaggaaaacgtcgacaatgatgtctacatatccgactatttcgatctgtcagatataacactcgccgacagcaatatgaactctgccatgctcgactatgacggcaacatatttctccccgtgctcgccgaaaccgtcgacaacagaatcgaccgcggcgagaacaactctcttatgctcctctcatatgaccggatcgaagagataacgtcgataagcacgtccgaagaaaaccggaatatgattatagataacgtctgcggcacaaatgacggcagtatcgtcggatttttcaatgagttgtatttttcaggcgaaataaatacagacccgatgaccggagaagaaaaggacgggataacctactctcagacattcttcgaaaaattctcaccgtacggcgaagttgtattcagaaaagatttcacatacgatctccccgaaccgctgaccggactacacaccgacagaggcgaaatgatcgccgacgacgaaggctatatctttttccggaacagcaatctcggcgagctgttcgtcttctcaccggacggggagtttctgttcacgctcgactcaccgtcggaattttcacccgctgagttcaaccggctcttccgcggatctgacggaaaggtcaggtatttatacgccaaagaccgcgaggaatacgcgtcggccgcgatagacataaacggtcagtgctacggtgaggaaacgcctttcacgaagatcaaccacatagacgaaaaactcctcgtcagcgtcaccggcgagccgttcgtctatgacagctatggtctttactcgatggtcgacggagaaaagaccgagcttttcagctgggtctcggtcgcggtcgacggcacggctctgcgtgatgtcgtaatcaggtcgacggaggatataaccgtctgtacacaggacgaggacggatatctctacgcacggataactaaagtgaacggctcagaagtccctgagatcgtcaccctgaacctcgcgatagacacgtcggtcggcacgcgtatgctcgagagcttcacgaaagccgccgcgatattcaaccgcaccgaaaggaattacagaataaaactcctcgaatacacgaccgacgagggcggcttcacagccggacagaagctcgcgcgggacatctcgtccgggaaacggatcgacatggtggcttttctcggcgatctgtcgtatgaactgctcgaaaagaacgacatgttcattgacctgtatccattgattgacgccgacccggagatttcccgcgaggactttctcccgtgcgtcactaccgccgcggaggcgtcggacggcgggctgtacagattcataaacaacttctatataaacacaatgctgataagctccggatacgcggaaaccgtcgggaactggaacatcgacgccctcagaaagctgaacggctcgctcgcggataacgaatatcttatgtcgtcgaattccgacacagaccccggattatatcttttcggtctgctcatgccgtatatgctcgatgaattcattgactatgaaaagcgagaatgtgacttcaccggtcttgccgacctgctcgatttctgccgtgaggcaaagataaacacaaacggcagcgaaggctttgaaagagttctggcacagtcgaccacatccgacatagatatgcttctgttcgacatgaccgtgagcctgccggattcggagatcatcggatatccgggcacagattgcgcggctggaagctttatcacgccgatagactcgctgtcaataacgaaatactgccctgcccctgacgccgcgtggcgcttctgccggtctataattgatttccagaaaaagaactgtacatacagcgcggcggacaacagttatcactatccgttcggtcttccgtgcacatgggagaacttcgggcttctcgatgaacaatcctcgcactatgaccactacgtcagctatttcactttcagggacagcaacggagaggagcactccgcgtacaactcaagatatgagaaaaaaggctcagaaccgctgtccggcggcgccgtcctagaacggacagaaaaggatacagcgacacttaaatcgctgatcgcgtccgtcgaccggataaaaccgaatgacaaaacttccctcgaaatcatcctcgaggaggcgtccacgtacttctcggaaatacgctcggcggaagagacggtaaagctgatatccgaccgcgtccggaccagacttcaggaaacaaaataaaacagaacgcccccggaagacccaacctccgggggcaatccttattcagaacatatcgggtgtgaagtcgcctttcatcgacgcctcgcctatgtactcgtcatacttcttcctgccgttgtaccagatacgccatgagccgttgtcgtacagcgccgagggcttgtagcagctgtcggcgtcccactctccgtcagtcggggtcacgagcggattcagcttgcatctcttccagccggtgcgtccgtcgggcgacagcgcggcgcagatgcaggcggtgtttatatccctgtagccgatatagaacatgagatagccgagctcggtacgcagcacctgacaccctccgacacggtcgcgttcatactcgttcgacgcgtcctttacgaatatcgggtttatcctgtcctttgtccagtttatcccgtcggtgctcgtcgcgagcgcgaggacgttcggctcgtaggtctcgcccgcggcgtaccacatacggtaaacgccgttctcatacagaacgcaggggttcatgacgctcatgccctcgaattggcgctccgggataatcataggttcgcggctcacccgctcgaaatgtacgccgtcacggctcaccgcgccgccgatgaagctgtagccgcgcgcctgcccggtgtaccacatcttccactcgtcgccgacctttatgacgcagttccggttgcagttgtcctcccagccgttcgtcgggtcgcacgggagagttatctccggctccgaccagtggacgccgtcgtccgagaacgcgaccgcgagagcttttttcggtctccaggagaagtccatgcggtaacgcccgccgtcgcgcgtgacgagaacgtcgaagagcgtgccggtagacggaccgccgtagattgggtttgcggggtttttgatgaagtttatcattgttgttttacctttcattgtttctctgtgatctttccgatggctttatcgagttttttctccgccgccggaagctttgaagctatcttcgaagtaagcgacgtgacgtcgcccttattcagaacatcgttatacatactctgtagcccaagatatccgaatgcgtactcgaaattcatcgtgcgggtggagcggattatctcgagcatcctgattgaatcctcgtcgcgcattgccttgtgcttcagaacaacatcgtagtatgccattgcgtcgccatagtagctctccgcgttcattgcctcgagcagaacaccggtcatctcctgctccgggctgatcggcgagacagccattatacttgaccaatatgtcgtgaatgtgtgtctgtactcgcttcccgcgtcgtatttcggcaccggcagcagaccgatatcggtatcgaggtcacggaatatcagcagctgctcgattcccccgaaatagaagagcgtattgccggcgcggaaattctttctgaggatattcgtccatgggtcgctctcgcggctctggaacttctccgcgagcagccagtccccgctgttcatcgtcgcgctgaccttctccgccgcggaatagaagttctcgccgacattgtagcgcggaattccgttctcatcatggtcgacaacgtccgcacagcagccggtcatcatgacgagaaactcgaaatagtccccgcacgcgccgtacctgtcgttctcatccatcgttccgtttccgtcgagatcgttagtcacgtccttagtcagcgcggagaaattgtctatcgtccactcatttctgtccaccatgccataaggatcgatcgagtactgctccgccagctctttgttgaatacgaccgcgttcgtatgggagtctgtccatgtattcatggcgccgattgccgcgaacacctttccggacacagagagatcattcgccgtctgtgtgttccaccaaggattttcgaggtcgatataacgcatcgagtttatatccgtgaaatactccccggtcgcggcaagcggcatgagcctcgagaaggactcgacgacgacctcccagttgtcgtccccggcgaggaaagaacgcttgtatgtcgcggaagggtcgtcgacgcgctcctcacttatcgtcacgccgtacttttcctcaatcttcaatgttctggcgaacacggcatcgttcatcgtctcgccgttctcctcgtcggaacgtacctcggagtagtatctgaccaccttgtcggtgctcgtcctcgacaggaatctcagcgttttcccgtcatacctgacgtccgggagatcaggctccagccttgtctcctcggtgttgtcgccgacagtcacggtcgtgtcgacgccctccgtcgtgaccgtgggtttctcttccgcacctgagccgcaggatacaaacgcggcaagtgtcgcgagcgcgagaaacatggatatacattttgcgtgtctcattgtcgttctccttttttcgtaaaactctttacttttgttccgttttatgatataatacacgtaaacatggattttttcgcgaagtacccgtgtctatgtatccattatacaccatatcgcgaaacgtcacaagagcattatgtcagaacatatatacattttgtatcagaaaaagaaaggcggcaatcaatgaacggcaatctatccacacttcgcggcgacgcgcatccggagataatcccccagtacgaaaccgcggcgtgtaccctcgccgaaagagatttctacaccccacgcgaagaactcgacgatatattcttcgtcccgtcatacatcgggcactacatctgcaaaaaagaatacgagatacagcgcgacgacctgaacgtcgacggactcatcctcgtgacgacggcaggtgaagggcgtctgatacgcggtgacggagacatccgcctcacgccgggaaccgtatacatccagaactgccacgagcatcatcactacaaagccgtaagcaacggctgggaattcagatatgtccacttctgcggcgggctgagccgtgaatactgcgacatgatagtgaagcgctccccggtcacaaggccgtcgccgaacgcgttcgacgcgatactccggctgatggaagacataaagaacggcgttgaggacgcggcggtctcgcacgcgcgcctatccggatatatctatgagatgctcgtcatcatcctcgactcattcaggaagactccggagcgcggcgaccccaaggcggacgccatcatggacgcgataaactatatacgcgaccatattgccgaagagctcgacactccaatgctcgccagacgcgctttcatgagccgcacctatttttccgccctgttcacccgggtctgcggtgtaccgccgcatgagtacgtaataaccctgcgtatcaaccgcgcgaagaagcttctggcggacacgagccttccggtgtggcgcgtcgcggagctctccggcttttctgacgcgtcagctctcgcgagaatgttcagaatgaaatgcggcgtcaatccgaccgcttaccgctcaggggaatacacgccggcaaggatctgagcgtcgggtttcacgcgccgtcggaaacgttcgacaatgcaaaaagtattgaaagtcgtgcgaaaaggatcggattttcccgatcggcttgacaaaacaacgcgcgtcctgtataatagagacaggggaacgctgattcatggccacctatgcataaaaaatcaataaatccggggcacctttcttcagtccccccgatcttatcagcttgtacacaagaaaatacatcacggaggatgaaaatgaaacgtatcctgagaatactgacgccgttcgcgatcctgatcgtcatgctcgccctgacagcgggctgcggtgaaaaagctccggagtatattccggagccgacgaggattctgcgcaccgatattccgtcacaaaccgctcttgacggcgtaaagatgctacgcgccgcgctgagggaaatgtccggaaaagatattgaacccgtgaccgactgggtcgcccgcggtgaagagattccgccgcttgactcagagatagtcgtcggaaagacaaaccgggaaaaaagcgcttcggaatatgaagcccttgtcagcgcgcggaagaacagctcccgcgactggtcaatcgtcgagtcagacggctcggtgctgataaccggcgcgagcgacgaggctcttctcgacgccgtgagctatttcatcgcaaattatatcgatgaggaggggataaaggtgccgcagggtgaaaaatacgagttcaggtatccgtataaagatataacgatagacggaaagccactgtctgattacgctcttgtgcgctcttccgatccgctcatacgcggcgcggaggagttcctgctcgataccgtcagggacgcgtgcggtctagcgctcgactccggcgaaatgaaaattacctcggagctttccgggaccggatactcggtgacgtctgatgacgccgggataaccgtcagaggcggtacatacgccgacatcaatatgggcttcgccatgctcggcgcggctattgaagacggaagcttctccggaaaatcggatatctccggaacactgccttcggtgcacggcgtcggggagaaaaccgctgacgggcggtataccacaatcggcgatccggtctggctgatagatgacagctcggtgattcagtccggatgggatgccgaccttgtttccacaaaatacgcgaccgccgcggaaaacaacaccagctactggcataaatactcgcttgacaacagcggcgttaacgagccctgcatgatgaagcgtccattccagccgcagaccgacggtgttctgacccttgaaacgaggcttacgattccggtgtccggagcaaaaataacgctcgagggcgatggaaaaaccgcgataatgatcgccacggataacaacagaatcgttaccggagacggcaaggagatcaccgcggcagccccaatgatctcgctcagacttatcgcggacatcgactcggcgaagtaccgggtcttcataaacggaagtgaactcggcgagtacgattttcttgagaagacagggaagctcgatcttctgcgcttttcgctcgacgccggagccaacggctcaatggcgcccgagttcgtctatctgtacaggaactaccctgcgctgagcagattcgaccttgagacaagcggagccgctccgctcggatgtgtgtccgaaaacgcggatgtcaccggcgcgcgtgacctcaggatcagcggtggacacgcggagatgtccttccccgccgtcgacggacacgcggcgtatgaggtgaagcttctcgccagggacttctcgacggcttcgttcgacgttctctcgggcggaaagcctgtgctttcgctcgtgttcgacaagatgctcgcgaaggtcggtgacgaggtgctccgcacatattcaaagaacttctggtatacgctccgaattgagccggacacccgctccggagcggctgaagtgttcatcaacggtaagatgctcggttatttcgcgctgaccggaaatgtcagcggctttgacggagtggcagtgcgctcggagggcgtcgtgcgtattgacgacctcatggttttccagataaacgatcatgacgactatgtgcccgctccggtctccgccggttcggacggatataatgtcgggcttcaggtgtgctcgctctggcgcaacgggtatcattacggatgggactgcatatctccgtttgaagaaaaccgcccggttctcggctactatgacgagggaatcacggaagttgccgactgggagataaagtacatggctgaacacggcatcgactatcagctcttctgctggtacagtaccagtatgacggacccgataaagacgccgggtatgtatcaggctctccacgatggatatttcatggcgcggtacagcgacaggatgaagttcgcgataatgtgggaaaacgcaaacgccacgcatcccggttcgagcgacaatttccggaacgtgatcgtcccgtactgggtggaatactacctgactgacccgcgttatatgacaatcgacaataaacccgtgataaccgtgttctcagtcggcgacctgctgaaggacttcggaagcgccgagggagtaaaggctgagttcgactatctcagagatgtctgccgcgggctcggatacgacggcgcgataatcatggttcaggcggcaacgactaacggcagcacgctggcgacaatacgcgagttcggagccgacgctacctacgcttacaactggggaaaagcgaacacctctttggaatatgagaactatgtctccggacagttcgcctccggaacgaatacggtcgcgacgatatcggtcggcttcaacaacgtcgcgtgggcgggcacccgttcctcgctgattgagccggacgactacaaaaaggctctcgaatgggtcagggatgatttctccggcagatatgacaaggactcctggctgtcgcgttccgtgatactctccacctggaacgagtatggcgagggaacgtatataatgccgtcgcccgcgctgcatggcttcgattatcttgaggcggtgcgcgaagtcttcgccccggacagcggatgtgagaaccttattccaaccgagagccagctcgcgcggctcagtactctgcgtgtccagtcaagaaagatcctgcgcgcggattacagagttgaaagcgctgattactcgggatttgaggctataaagggctgggacttcaaaaccggcgcgaacggctggacacagggcttcggtctgcgtgagttcagcggttccggcggagcgctctccggcatatccggcgctaacgattacagcgtcatgtcgccggataatctcggcattgaccttaccggagccggcgcgctgcatgtgaggatgaaggctgagaaggcggcggggacgcttcagatattcttcacgaccgatgaggataacaactgggacgagaagaaatccttccacgtgcaggtatcaaaagccggagagtatgtggattactggctccccacaaccggcaacgccgccttttccggcaagctgagacgcctgcgcgtcgatcctcaggatatacctgagagccgttttgagatagaactccttgaagtctccggaaagagggaacgactcacgcttgagcgttcagacggaaccgtgttcagcttcggcaggtacgaaccttatttgtcggatggcgagctgtatatgccgttcgacccgaagaccggactcctgacattcttcggatgcggctacgactggttcccggagacccggacgatactcgtgcgccgcggtggaaagtcggtgagctacaccataggcaaggatatagaagagatggacggccttcccgtcatcccgttcagcaggctgactgacgacttcgggatcagtgacatagtgataaagaccgagaaaatgttctgagcgcagagcggcgcggaggcatgacgcttccgcgccgttcgtctgttttctgatcttatccgtgctttcccgtgttttcccgtcacagtccgggaaaccgtgagaaaatcgcgcacacttattgacaaaggctcatggctatggtataatatgtcagacaataacttcggaggataaaaaccagatgttttcaaaatatgtgtcaaatgtcccgcttgggaccgggacaaacttcatcctttccttcggcggagacaggcgtgtccgcgcacgggcgtatttcagggtggagatgagcggtactttcgactaccggatattctacataaactcggtgaacagcacctatgaccagggcgcggtcgcctacagaaacaggagcggaggacatttccgcgttgtcagcgcgtctctcgcggacggcggtcagataggctcggcagacgcggaaaggctgataaaggaatcgcaccatgaatcgctgccgccgctcgacggcgccgtgacgctgaccttcgacggggaaacatcccgcgatgtcacacctgacgagcatattgtgagcgatcctgtaaggctgacgataccggacggacactatctcgcgttcgagtgggagatcataggagacggaattccgtgtacaccggacagcagagcgctgaccttcgtcgacaccggagacggttattcgtccgcggatggaattccgtgtccccttcccgccatgttcgcctgcgacaggccgtacaggaaacgtatagcgtttctcggcgattcgataacacagggctgcggcacaggacggaacctgtacggtatgtgggcgggaagaatcgccgcgatgatgcctgaaaacgccgtctggaacctcggtctcggatggggacgcgggtcggatatgctcgcaccgaaggacaatgacaccggaagctggctctggaaagccatgcagaacgacgtcgtcatcctgacctatggcgtcaacgaccttctcagcggcagataccgcgagaacgcgtctgaacgccgccccgacaccgcgggcgaggttgtcgcgacgatatgcgggcttatcgaaaagcttcaggacgcgggcgttgaggtcatactttcgacggttcctccgttcgattattctcccgccgcgaaaaacgaatggagagccgtgaacctcgcgataccgcggattgcggacctctacggctgccgcgtgtatgacatagaggcggcgcttgacaattccgccgcgctcggcaatgaattcatgtacggcgcccatccggacgaaaagggcggagaggtcgcggctgaggcgttcagaaaacgcttcctgaacggcggactaaaaacattctgaacatacaagtcggaaaataaaatttcagaccaaacagtttgtacgaaaggcatggtcataaaaatggattacagagactaccaaccaaaaaagacctcccgcgtccgcgaggacatcgagtggtcggtaaactattcctacaatacgctcgacacaaagaacccgcgcgtgatgctcatcggcgactcgatctgcaacgcgtatcactatgccgtccgcgaacggctctcggagaaggcgaacgtgtccttctgggcgagctccaagtgcgtcaccgacccggactacttccgtgagctggatttcatgctcgacgcgagggagtacgcgctcgtgaccttcaacaacggactgcacagcctcacgaccgaccttgcggagtgggaggaggcgtaccgtgccgccgtcaggttcatactcgacaagctgccggagacgacgctgtgcatcgtgctgtctaccgcgctgaacgacgacgagctgacccgccgctcgttcgagctgaaccgcatcgcgctgaagatcgccgacgagttcagacttccggtgattgatctcttcacgccgacgaacgcgctcgataagccaaatgagatgaccgaccgcttccatttcagacagaaagccatcgatatgcaggcggacatgatcgccgcaaaggcgtgcgaacttctcgatctgcgcgacataggcatcgtgcagaagtcgaccgagaccggagcgctcggcgctgagaaataaacgataagaggttcaatcctgaaaagccgcactgacgcgataagcgtcggcgcggcttttttatatggtcttatctgtccttcacgtcaaacagtactttcatccactcgtcggacaggtcgacccatcggcgggcgtgggctatcgtctcgttcagtctcttaagctcctcgccgtgataaacctcggcgttgcagatcgagagaccatgctgaccgtcctcgaaaatgtgaagctcaaactttatattctcgcgtctgagcgccgcggcgaactcaagcgagttctcgacggcgaccgcctgatcgaagaacgtgtgccagatgaacgcgggcgcggtctcggaggttacgcacttctcaagcgacatcttctcgcgctcctcatgcgtagcgtcggcgccgagcaggttgtcgatcgagcctttgttcgcgaagggtccgtcgccgattattaccgggtagccgaggaccatggcgttcggcttattttcgcccggtacgagaccaagcttttcggcgatgaacggcttgttccagaagcagccgaggctcgcggtcaggtgccctccggcggagtatccggtcacggcgatggcgtccggatcgacgccgaactcctccgcgcggcggcggacgaccgcaacggctgcggacagctggagaagcgccgccggatatctcaccggcgcgacctcataattcagcacgaacgccgcgtagccccttgccatgaactcgagcgcgaccggctccgcctcacggaaggaaagcatattataccctcctcccgggcagacaatgatagccgggcggcggcgcgtcgggtcaacctcgaccgaattgtcggggatatatgtcgtcagggacggctcagaatactccgcccacggtctgtcaagcataccctgacgcgcggagtgctcgtgtctctcattcgcgagctcatcgaccgtgcgctcacagagccccgggaacagctgccggagatatattttttcgtatgtcataatgttgtatttcctttcagcgaccggaaaagttccggtatagatcgcacttttcatgcttttcaaaattataccacacacccgtgaatttgtcaagcgggtgtgtgattttgttatgccgcctgcatatgaaaccgcgccccgcggagccggtgagccggcgcgggacgcgaatcagatcatttcttttcgccgtacagcgacaagtcgttgttccttccgagacacttctcaatcacgaccgcgatgaaggatgagaaaccgtgatcaatgctcgaaccgtacttcatgtcctcccagagagttccggtctccgcggcgcattttccgtatgtcgcccgtatctccgcgagatcttcgtcgaacagacccgccctcagcatcgccgcggcgcgcaccgcgtagcctatgaagccgtgaagcggctcaatgtccggaaactccgtgaagttgtcgatgaacttctcacggaacaccgcgaactccggcgcttcaaggtcggcaatcccgaagaacaccgcctccgcctgacatatccgcgacctgtccggaagtatcacgagcgtgccgtccgcagccctctccgagtggtcgaagaatgtcacgccgtcgaaggactgcctacggatggcctcgcgtatctcttcggctttttccgcgagcgcgggacggtcgtacatttcagccacgcagtcgagcaccttcgcccagagcatattcatcgggtagttcacgtcatatgtccagcggttcgccctcgtcggctctacaaacaccgtcggtatcttctcgagcagaccgtcacagttcgtgtagccgtcgaaatacgtaaggatacgatcaatgagtcccttgaactccgcggtgtccccgccacgcttgccgtactcgtatacctcatatacaaaccagagcgtccagctcgatatcgttctgctcgtcgtcagctcgccgggatagcacatcgggagaagtccgtccggcagagttccgccgtcattaagcgggaagctctccgccctgatgaaattctcaaggaatatccgctcgcactcaaggcttccggtgaacctgaacgccgacagagctgtgaaccagctgtcgcagagccatccgccgcgctcgcgacccgggcagtccatgaacgtgtcgagcgtgttgtgcgtgaacgtcctgaacgccgcctcatgcgtgaggtcgagaacgctgtcgccggaagcgagcgggacatactccgcatcatatctgtactcgcgcatatcggctctcagaatatcaatttctccggattccaccatgacgccgagatatttcagagaatagcactcgaaggactcaaatgtccttgtctcatcagcagggtctatgtcgagctttattatgtccaccttttcctctcgttcgacacctatgtctattctgccgtcgcgcggcatctccgagaagaatatgtacaccgttgtcttcactttcgcgcggaaggtcagccttatgaagcccgcgtatatgcggccgaaatcaaacgcggcataatcccccgcgctcaccgtcagcggcatggagagatcattttcaaccggtatcatgtcgccgtacatcgcggcgaggacgtcgtcggacaattcttcacaccgatagccgaccacctcgtcagagatccgggtgaaacgcttgtcgtatcggtcgaacccgtctttcttccggaactcaccgcgctcatacggcacgggtttgggggacagaccgagatacgggagcttccactcgcgttccatgtacttctttccgtgatcgaccgtctcaagtgtttcggcgtcaagcgaccatatcacattccatatgccgtccgccgcctttccggtgagccgccagacctcggtgaacgccctctggtagctgtaccttatgcacttccgcgcgcggattccctcaaggctgacgccctcaaagtccccgttcacaaccgtgaagcggatcatatcgccgtcctcacacagctccgcctgtaaaaatgacagaacatccattgtatagaacgacgggcagttgtatcccgcgacctcgacggcgagatagttctcaccgtcccggacggcaaggcttatcctgtcgacccggacatatccgtgtggtccgcgcgcgggaccgtagtggacgacctcgccgttaagccatacgcggtacagcgtcgagccggtcagggtcagggtgtactcacgccccgcgcgggcggtgaaaacggtgcggaacgccgcctgcgagttgacagttccgctttttccggcgataaagaccggtacggcttttctgaaaaaatccatttaatctcctatcatcgtgtcaagattctcgaacattttctcatttgcggcgagaaccatcttctcacgctccgcatagaatgatgctatgtcggtgcggttgcttgtatcggcaagtttctgaagagtgaagccaaaacctatgctgttattatagatatatccatagtcgaacaaaagtcctttgcttataatatcaatcatctcgctcgtatctgtgtcatctgcgagcttaaccttcaatgccgtctcatagtacttcggaataacactcttccagctctcggcacagagcgcttcggttatgatgcctgtgaactcagcatctttgactgttaccggaaccgacagcaacgcgtgcgcgccgtcagacatcgtataataattcgtctgcgcctcgtcatacttcggatacggaagaacaccgaacggattcttgttatcacgaaaatcactcatagctccatcgaaagtagccggaaccatcatggcgcgaccgacagcgaaaaggtcattaccgagtgtatacttagtattttcagtatatcctccggtattgtcatagaaaagccccatgaccttttcgacgattgtcggggtcttgtcctgataatacacaagctgcggaatgccgtcgctgtctgatttcattatcgggttgtcacaggaccacatgaacgtgttcagaggggaacgggtgctcgacactataccgtaaaagtcctcgtcgtccctcttgtcgtttccgttcagatccttatagatatccttcgtaacatctgcgaccatgtcgagagtccattttccatctcttacgaggctatagagatattccggtgtcatgccataatcttcgaccgcaaccttgtcgaagaaaaatgcgtacatatacgaagtcatggacagagcgtaatcgccaccggcgagatatattaccttgttcttgtatgacagttccttgttcgcactctgcgaccaccacggattttcaaggtcgacatatgggatgtcataccagttcaggaaaccaccggttattgcgatctttcccgctgaataggcgtgctgcgcgataagatcgtagctgtcatcaccagattgtatcatctggttgatttttgacgccatgtccgtatagctttcagagaccacctcgagctttattccgaagcggtcttctatagttgtgttgcgtctgtatatggcgtcattcactatatcgccggtctcgccactgctcataaagtcgctctccatatagtcattggtcgcgaccgtgaatgttctgcctccgtaattcttctccggcagtccgtcgaatacctcggtgtcagatatctctccgctcatgttatcgcttacggtgattccatcgttggattctgtgtccttcgttccgccgtcatgtccgcaggcgatgaccgacgccgccaacgatatcgcgagcagaagagcgagtattctttttgtcttcatctttcaatcacctttcgcaagccgtgacgtctccccagctgtcgggaaacgacataggctctcttttttataaaatttccgaatcaagcttgactgtatctcaattatatggtataatcgaagtgaagtcaacatcttttagggacattttcgtgctgaatacagacaaacataaaaaaggaggacaaaaatgcagctcagcgatttcaacgaacgccactgctacgtcaactatctcaaagacaatccgttcctgttcatcgaggcggcgaccgtcgtagagccggatccggaatacggatatttcaccggcgcgatggtcatgacgactttcgaatacatacagaccggttacggatatataagctacaaagacagaaaatacaagctctcccccggcgactgctgcatcatgcaaggcggcggaaagccgtacaaattctggtcggacaaagaaaaaccctaccgcaagctatggttcagcggtcagggaaagtttctcgacacgatgctcgacctctatgacataaaggacgacataacaataatcagggcgccgcaggtcgagccaatcttcaagcgaataatcgacgaactctaccgcaccggctacgacgagcactcgatgaccgccacaataaacgacctcatctggattctcaagaggcagggcatgaacaaaggtgacaaccgactctcgagtcagatacacaaaaaaatcagtaaagactaccacaagataacctgcgtctccgacctcgcgtcgctctaccgcatatccgaaaagcagctcacccgcgtgttcaaggcggactacggcgtcactccgtgggcgtacgtgatagagtgccgcctgaactccgccgccgacaagctgcgcgacggaagcgcgaagacgatcgacatagcctacgcctgcggctacaagtcggtctggcactttgagcgggagttcaggaaaaaattcggcgtcacgccgacagaatacagactcggtaacagacagagcgacacgggaggagacaacaaataacctcagcgattctgaaacccgtaatcctcatcgcgatgacgcctgatcatatcgcgaaaataaccggtcagggagacctcaggatactcttccccgtcaatacggcaatatcgtccaaaaagccgtgaataacgcaaaaatctcagaccgactgatttctccactccttcggcgtacaccccttgatctcccggaagagccggtggaaatgctcgttcgagctgaagcccgccctctcgcctatctcgataacggtcaggtcggtcgttctgagaagacccgccgccgcttctatcttcgcgtcgttcagaagctgtgtgaacgtcttcccggtcgaacgcttaaggatatggcagtactgactcctcgaatacccggcgtcggcggcagcggcgtcaagtgtcagatcggcgtggcattcacgtattctccgcagcatattcacgacgcctccaccgcggttcgagatgtcgcccgacagtctcgcctctccgagatatctccgcatcagacggcagaacattccggtgagaatcgcctctcccgccgttctgaaatacggctcataatttatgacctccatgtacagcctcagcgcgtgctctgtcagctccggatcgtcgccggtcggaaacagtatagttctccccgggcaggctccgtacagagaacagcgcaggaaatccccgagaatattgttctcggtcagtatcgcgaagaacgtcttgtcaaaggtgctcttgcgcacgtatatctttatgaccgagcaatcgtccgaaaagaccataaggctgtgcagcgttccgggcgcgagcagcagaagatcaccggacacgagcggcagaacgccgtccgacagccttatcgaacagccgccgcggacacaataacacatctggaaatagtcgtgacagtgcatctcatgctggtcatacctgaaatgatgcgtcacgtagatatttacgttccggaaatccttttccggctcgcggatgtggaacttccagaagctccgtctctgtccctcctcatacgcttccttcagaaaacgctccatgtcgctgaatcgcagaatgtactccatcatttcatccgtcgtctcaacatacatggcttccttctcgtcgtcgaccgccttccacagcgcggcgaattcctgctcatagtccattttcatccctcccggaacattataccattttctgacttaaaaatcaagagcgccggaaaatatatcaatatttcaacacgatacgcaatgaacaatccgcgtgacatatggtataatatagacacagagcgggaaaacgccccgcgcaacgaatcatccggaacacaatcgctccggaaaataagttatgaaaggtatgtgtaaaagaaatgaagcaaaaatctctcatcgccgccgcgctgatcacagcggcactcatgctcccggtctccgcgaactcgatcgagctcggctcaaacgctgagaaagtgacgaccacgatttccgccgtcggcgacaagaagcccgtgatcgacggaaagatcgatgacggcgagtacgccccgatcagcttctcgaaggacgacctcatgtacctcggctacgacgacgcgagactcgccgagatgaaggacaccgacgtgaaaatttacgcgtcatatgacgctgagaacgtctacataggcgtcgtcgtgagcacgcccgatttcgttcagaaagcgacgagcggcaacgatatgtggcagaattactgcatccagctctgcggcgcggcggctgacgagaccgacccgggttcccgcgcggagctcggctacgcgagaaacagcgagaccggagaactccttttcgcgaactggtcgagcggatatctcgacggatacaccgccgacacaaccggtaaggatttcgcggtcgtcaccaagaacggagtgaccacctatgaggtcgcgatgcccgccgcggctttcggtgccgattcgctgaaggaaggcggaaagatcggtcttgacatcacaatggtcttcagcgacgacaacggccccgccgtcattgagtgggctcagggctgttatgtagcgaaagattccaccgtcttcgcgaaggtcaccctcggcgagccgatgaaggctcccgccgcggcgtccgatgacgcgtccgatgacacctccgcggcgactgccgacaccttctccgtctgcctcgcggcgctcgcaatgtctgccgccgctctggcgctcaggaagaagcactgacataaagagaaccgagtcttttcatgatgaagcctcccggagcgggtccgctccgggaggtggtttttgttatgtttatgaccatgactttcgcacaaacaggtctgaaagtttattttcagacttatcagcgtccgaacacagagttctttttcacttcgtcaatgacatgtatgacctcaagcgcctcatcgagctttacagggaatgccttcccgtgtcttatcgtgtcgtaaagagcgtcccagatgcgcggagtgccgtcgccctttatcgggacgagctcttccttccacgggagcttctccgggtttccgaaaccgcccataggcgtaccggggtcggagaccaccttcgggagctccacctccgggtcgagatagcggagcttaaaattgccgccctcgctgatcatcgttcccttcgtgccgtaaatcatgtactcgggcgtcgggagcgcgactccgccgcttatctccatgtcgacgatcctgccgttcacgccggtgaagacgatctttatgtggtcctcgcagtctccagccgccgcgacatgctttatctccgaatacatcgtcctgtacgcgccgccgcagaacctcagcgaatggtccactatatgcggtccccagttcagcagctgtccgccgccgtactcgcttatcgtctgccagtcacaccggcgctgataattgttcctcgtcagctttatctcatacacgtttccgaggatgccagagtcgataatctcacacgcctgctcaaagccgtactcaaagcggcggttgtggcgtatgtaaaggtgaggtccggcgggctggctgccgagatcggcgagctcgagggcctcggcgtaggtcatggcgaacggcttctcgagcatgacgtcctttccggcgagaagcgccttcttcgcgtgcgcgtagtggtcgcaggatctcgtcgcgatatcgacgagctcgacctcctcgtccgccagaagctcgtcgaagtcgcggtatatcttcgagccgaactcagcggcaaccttttcggagcgctccggtatcaggtcgcacactccgtatatctgaaatttgtcaagtctcggtctgtactcgttcaggtgcatacccatgcccgcgcgtccgagacccagcattcctacttttattggtctgtccatattttttcctttctccgcatatagtatatgagctacctatagtatacaacgtatcagggcacttgtcaagcgtgaaaatcgcgtttcacgccgttccgtcgccttgcacaaaaaaatcgcgaccagattgtctacaataccgattgacaaattcttcccggtgtagtatcatatatacaaacaaatcatacgcaaaaattaaaacgtttcaaatcagaaagatcacatggagcaggaaaacaacaccaccaaacggagcggcgccgtcaccatcgccgacatagcaaaagccgccggtgtctcgaaagccaccgtgtcactcgccctcaacggcagtccggtcgtgaaggacgagacgcgtgaaaaggtcaccgccgccgccgcgtctctcggatatgtgccgaacttctcggcgagacggctcgtcagcgggaaaagcggaatgctcggggtcgtcgtgccggatatcgagaacgtctactacgcgaccttcgtcaaggagctgacagaccgcgtgtcggaggcaggctggtcgctgtcgatcttcatctcgtcaaacgaccccgaccgtgagtcgagggcagtcagggacatgatcgcctcaagagttgagggaatcatctacgttcccgtaaacacccccggcggaaacgacgccgtgccgctcatactgaactcggggataccggcagtctgcgccacgacgctgaccgacaagatgagctgcgttctctgcgacctcggagacggcatgaggcggctcacggaacggcttctcgcgacaggaccgaagagcgtcatatatctcgacggcagtcccggcgtatacaccctcgacgtcagacgcgaagccttctcggaagccgtgagaagctacagggaaagcggacacgatatcgtcacgcgcacgataagcattccgtcggtcgattatttttcggcggagcgcgccgtcgcggggctcggtgagctgccggacgccatcgtctcggtcaatgacttcatggcgctcggggttgtgaaccatctcacttcgcgcgggataagcgttccggacagggtgcaggtcaccgggttcgacgactgcgtgttcgcggtctcctccccggttccgctgacgacggtcagacaggatatcggtatcctcgcggaaaagacggtcgcgcttctgaaaagaaaactgtcgggcgaaacctccgaccgcgaggtcatcctcatcccgacggacgtcgtgacgcgccgctcaacaaaaaaataacgggcatgacccgtaaataaaggagataacatcatgaaaacaatcaaggacaagcagcttctcgtaggcgcggatttcgctggctaccccctcaaggaggcggtcgtcgcacacctgaaaaagaaaggctggaccattaccgacgtaggtgtcaaagccgattccgacccggacgacaccgacctcatgttccacagaatcggtctcagggtcggctcgatgatatccgaaggcgagttcgagcgcgccctcgtcttctgcggaaccggaatgggcatacacatcgccgcgtcgaagtgcccacacgttcacgcgggcgtcgttgagagcgtccccgccgcgctcagggcgatcaccggaaacggcgtcaacgtgctcgcgatgggagccttctatgtcgcgccgcagatgggatgcgacatagcggacgcctacctcggcgcctcgctcggaagcggatatgagtggtggcacaacttctatgagttccacaagctcgcgatcgacgagctcgaagccttcgactacgagacctacaaaaaaaacgggttcaaggtaaaacacctcggagattatccgctgactctcgaggacaaaccggaataatccgaataacatcatgacaacaacacagtgaaaggagcatctccatgttacctgtaaacacacgattcatcaggaatccgtccgcgttcatccgcgagcgccgtgaggaatcccccgctccgatgttcaggcacaggttcatcatccgcgggaatcttgtccgcgcttccctctcgttcgccgctctcggcgtcggaaagctcttcctgaacggaatgccggtgagccccgccgttctcacgactccattcggcgactacagaaagaccgtatggtacgacacagccgacgtcaccgccctcctgcacgcggggcagaatctcgccgccgccatgctcgggaacggattctacaacgagtcgataaagacctcatgggacttcaacaccgcagactggcgcgactcgccgaagctcatgttctcgcttgagcttgtctacccggacgggaccgaatatgttaccggatcggaggactggctcaccgatatcgaccgctctccggtcagatggaacgagcttcgcgcgggtgagcgctatgacgcgaatttcgacacagactggatgactccggaatatgacgacagcggatgggtccacgccatcactgccgacgtgcctaaaggtattcttcgtgagaatcccgcgccgccgatcatcgaggacacggtatacagccccgccgcgataaccaaggcgggagacggaaagttcgtcttcgacttcggtcagaatatgtccggatacccgcacataacggcgtccctccccgccgggacacatcttcacataatctgtgccgaggaagtcgacgagaacggaaaccgtgtcgacaacacactcgccgggcattataaggacggggaaactcagttcttcgacgtgaccttcggtgagaagccgcttgactggaagccgtggttcagctactccgggttcaggtatctcatcgtctccgggttcccggagggttacacgccatccgacaccgatatccgcgccgtgttcgtgcatcagggggtccggcagaccgggcgtttctcctgctcagacaggacgctcgacacaatatggaggtacgcgagactgtcaaccctctcgaatctcttcaatatgcctaccgactgcccgacgcgcgagaagctcggctggtgcaacgacgcccaggcgtcctgcgagcagatgacgcagaactacgacatgaccggtctctggaagaaatggctgcaagacatcttcgacgccatgaagccggacggcgatctccccggaatcgtgccgacgcccgcgtggggctacgcgtggggaagcgggccgatctcgaccggaatcctcttcgagataccgtacagacttttccagtacacaggctctgacgaggctctgcgcgccgcgtatccttatatgtgcagacaccttgattttctccgcgcgaaggagaacgacgggctcattgagcacgggctccccgactgggcattaccgtatgacgagaagaaccccgttccggtgccgctcgggttcacctgtacgctccttatgataaagttcctgcgcgtcgccgctatgacggctgagcggatgggcttcgacccgtcggcgcaccgtgaagctgaaaaatactacatcgacagcttcaggcggcatttcatgcttcctgacggcacgctcacaatcaccgaacagacgtcgtccgcgatgaccatcgctctcggcgtcggggacaccgagaagctgaagccgcagtttctcaaggcgcttcacaagtatgacgggcatttccatgtcggtatgctcggaatgcagtatatcttccgcgcgtgcgacatctgcgggttcgaggaggaagcgtacaggctcctgacggcggaagggtatccgtcgtacaactactggttcgagggcggcgcgacagtgctccacgagatgtgggcggacagagagtctaagaaccaccatatgtattcctacccggtcacgtggttccgcgagacaatccttggcatcaggcaggacgagacgctcttcaccgagagcagattcaggatagagccgtgcttcctcgaaaaaatcgaccacgccgagggagaatacgacacgcccgccggaaaaatcgcggtttcgtggagacgcgggtacaactctgaaatcagactctcaatcacggttccggaagggatcacggcggaactgtcagctcgcggaactaaaaagatcctctctgccggacaatgggaactcagattataaggagaaaatttcatgcagataatcgagaaattcaaagcaaagcacgcggcgatgtacgatcaccgccgcccggtcatcgcgttcctcggcgacagcgtcacacaggggtgcttcgagatattcgacgaccacgggcatatcgagacgaaattctgcccggaagacgcgtattccgaaaaggtcggacacatcctcggcatgctctatccgaacgccgccccggtcatcgtaaacgccggaataagcggcgacacctcgtggaacgggctcacgagacttgaaagagacgtgctctcgttcagacccgaccttgtcaccgtgtgctacggactcaacgacgccggatggggagagggaaagatcgacgagtatgagaagtcgatgcgcggtatcttcgagggcataaaagcctccggagccgaggcgattttcctgacgccgagtctcaggagcgacgacaccgactaccgcaacccggtcaaaatgctcgaggactgcgtcagacagaacgcgaaaaacgagcgcgagggctggctccagaaatacgtggaacgcggaagaaaagccgcgaaagaagccggagtaccgatctgcgactgcacggagctctggctcaccctgaaagccggcggcgtcaacaccaacgccctcctcgcgaatgacgtcaaccacccgtcgcgcgagatgcactggatgttcgcgtatgaactggtaaaaaccatgttcgaagcataagcataataaaaagaagggtctcactacagaggtccttcttttttatctgcgcggctgcctgatcaaccgacagtcaccgtgacttccttcccgtccgctctcatctcaccggcgggctttccgtcgacgctcaccttcattcctgcgcgcctgtcccactcgacgctgatttttcgcccatgatagagtatatcgtccgccgtgaagctgtcaaggctctttccgagcggagctattctcagcgtatctccggaagatgggacgattccgacaatcccgcggaggacgagatctatgaacgccgaatggttgtaatgccgcccgcgttccatatccttccttccccactcgcggagaatgcttctcgcgagccatacgccggtgtccgggtgcatattttcgtcgacataaggggttccgtcctcgtcccgctgactgtacgcgtatgtcaggagcatcctcgtgaaatcgtccggcgttatcgcggtgccgccgccttgcagataagcgatgacggcgtcaagcgtctgagtcgtcgcgaaaggccatacgggtccgttccacaggcactcgtggccgaaatgcttcatatagtccggatgcgagcggtcggcggtggtgagaccgtacttccccgcgaagacatccgtgtcgagcagataacggaaggcgtcgccgccgctctccgggattccgtatatccacggtatgtatccgacctgttcgcgcaccgggcggttttccccaccctcgccgcgggttatatacataccggtgtctgtgcagtaaaggttgtcattaatcatgtgtcgaagcctgtcggcttctgttttccacacaaggctgtcagcccgcctgccgagaatcgcggctatgtcggacagggcagcaaagtccgcgaacatatacgaattgacagtaggtctgaccccgtcgccggagaccgagaattccattccgtcccggttgcaggactggcggtacatacctctgaggggtccctccgtgaccttgtggtcgtcccaatgccgcgcgatacgcgtgagcgacgagtaaagctccccaagaatatccgtatctcccgtgacctctgacagtccgagaaggcttgcggcaaaaggaaagctgtaaagataagggtccccctcgccgcaccagaatctcgcgtaggacagaagcggcgagcggtcggacatccatcttccctcggcaaaatggtgcatggcggcgcagtttatcgtattgtacactcccgcccacggaacatccggcaggaactccgtgatgacctgtcccgctggggtatcctttatgtgcatggcaaaagaacggcacctgtaagcgtaggtccggtcaagttccgcgtccgaggaactgaataccggaaagagagcggcgtagtctttgttcatgattttctcctttcagagtgatattataccgattattatacacgacgcgaaatcgtaagtcaagtgcgtttcgtcgcgtgatatatacattttgtattgacttcgcgaaacttgatacggctttaatctacaaatatagtatcgtttcttgtcaacatcccgtggaaaagcctgtggaaaactccaggtatattcacactgttgataaagctgtatataacctctgagtcctcaattgaaaaccagaaaagtaacagcgggtgtgggaaggtctgtggaaaacgcggcgtttggtcagccgtcctcccgtctgacctcgctcggggacctgccggtcatcgatctgaacagcctcgagaaataattctggtcgggatacccgaccgcctcgccgacctccctgacgctcatgtcggcggaacgcagaagctcctccgcgcggctcatccttacctcccttataaacctgccgtaggatcttccggtcacctcagcgaaaagatgcgtgaaccggctgaggctgagacagcactcgcgcgcgagctcttccgcggacggcggggacgcgatattatcgcatatcctcacacaggcgtcatcgatgcgcttcgcggctcccctgctgacgccggacgagcgcagagccgcacgtctgccgataagcgcgagcatagcgtagagcgtcgcggcgcaggaatcctcatagaagcgttttttcagtgtgaattccttcaccatcttccgcgacagctcttcatactcggtgctgacgcccatgtcgaaaacgcgcctgccagtcagcccgtaacgctcgagaagctccgctgttcctgagccggtgaagtgtatataatgcgacaccgaatgctcgcacgccctgtagaaatactcctgcggctctccgggtctgaaaaggattatacatcccgcggggatgaggctttccgcgccgtcctgcctcaggtggcagatgcccttcgctacgtaaagtatatggtagtcggacctgcccttcttcctgacgctcccgtgatcgtgtacggatatgtcctcaacgccgcaggcgttgaccgccagaaaatcgtcagataccctctcgcttgacgtgccgcgcgcttcttcagtttcaatcctcatgaccggctctctttcgttcgtgatacggatatgataccacattacgtgtctgttgtcaatagtgtcagcgattccgtactaattatcagccgcaacggcaatatacatacgatgtcttatctggtataattgtcatgaagcgggagagataaaaagcaattccgtaatactcccgcgcgaaaggaagagtgaacatggacataaaccgtatcccggaaaatgagctcggaaagggctccggcataaagctcgccgtctgcgacaccgaacacgacctgtactggagaatggcgattgaggttctcgaagtgataaaggagaacaacgacaagggcgaggacaccgtgatggtaatcccctacggtccgctcggtccgtacagcagacttgtctacctcgtgaacaggtacagagtcagcctgaagcgctgcacattcatcaacatggacgagtacctggcagatgagaagacgtacatcgacaaggcagacccgctgtccttccgcggcggcatggacaggattttttacaatcagatagacgacgagctgaacgtaccaacggaaaaccgccacttcccgatccccggtgaggaatggcgcgtggcggacatcatagcaaaggcgggaaagctcgacatggcgtggggcggcgtcggaataaacggtcacttcgctttcaacgagccgccggaacccggtgagatctgctcgccggaggaatttctcgaccgcccgacaagggtactcagaatttcccgcgagactaagaccataaacgcgtacatgaactgcggcggcgacctcgacggaataccgaagtactgcataacggtcggaatgcgcgagatgaacggcgcgagacgggtcagaatgtgtatgccgcgggactggagcgccggcgcgctgagaaagatacttcacggacccgagaccgcttctgtgccgtgctcactgttcaacaggcacccggacgccgtcctgtacgccgcgagatgcgccctcgcgtccccggtgccagagatacgcgtgtacaacaaatgagaccgcggctcatccgcggaaggatagtgagcggcgggactgtcagaaagggagagctgcttatcgacggcggaaggatacactttccccgcggctctctcccggaagagacggagatcaccgattacggtgaattcctgattctgccgtccttcattgagctgcacgcgcacggcggggacggatatgatttcgtcgacatgacgcgcgaggcgtctgacaggatattcgcgcttcacctttcgcacggagtcggaagactgtgcccgacactttgcagctgcggagcggagaaaaccgcgaaattccttgatttctgccgggagataagcggtcatccgtgttacggcggcgcacaccttgagggaccgttcctgtcgcccggaatgtgcggggcgcagaacggctcctgccttctgacgccaaccggagagtgggcgaaaagactgtcctcgtaccgcgatattctcgtgagagtgacaatggcgccggagcttgacgggacaaaagagttcgcgaaaaagctgaccggcgccggcatcctcctgtccgccgggcacaccgccgccgactcaatgacgctcaggcgcgcggtcgattatggcttcacctcggtgacacacctgtattgcagcacaaagaagcgcgagaagcacggcggacgcgtgctcggcggagcggaggaggaagccctgataaacgacaacctcacagtcgagctgatcagcgacggacatcacgtctcgcgcgagaactttctcgtcacgatgagatgcaagggcacgggcagagtcgcggtagtctcggacgccatgcgcggagccggtgaggacggcatcagtgagagctggctcggggaaaagctcccggagaaccgcgtgatcatcgaggacggagtggcaaagctgccggaccgctcgagcttcgccggcagtctcgccgtcggtgatacaatggtgaggacgctcgtgaaaggctacggaatttccctgccggtggtatccgaaatgatgagcctgactcccgcgaagcttctcggaatatccggcagtcgcggaaagcttgaagaaggatatatcgccgatataaccgttcttgacgaaagcctcagaacaaggtcggtttatctgtcaggcaggctcatgtatgttgtaaacgttttgtgaactttactgactattccccgttacggcatgaagtatggtataatagaggcatcacatacagacggaggactaccattatgtatcttcaacgcatcgtacccgctccgcgctcattccgcgaggacgacgtcacacggttcacgttcggatcttcgctgacggcccgcgtttcgggactcccgccgctcatggcggagagggcggcttatctgtggaaccgcttctcctgcggcgcgtctgcgctatcgacgaccgacggcggagagggcttttcgctcacgatcgggagcacggactgcgcgctcggaaacggcgacgcttacgcgctgaaatcagacgaaaacggaatatgtc

SEQ ID NO: 148 - DNA, 9368 bp, Unknown
  16S sequences of unknown bacteria
gccttcaaccgctcggccacctctccatgtctgaatccccacattacgcctaaacgcaaaatatactttaccataaaccaaagcgcttgtcaactgacaacacttgttttcctccaaaaattttttcactttcttataaattccctcttgctttttgcttccaactgtggtatcataaacaagctgacatccgggtgtggcgaagtttggtatcgcgcttgaatggggttcaagaggccttgagttcgaatctcaacactcggaccagatcatgataatccgaactacattatccaagtgggtaatgtagttcggatttatcattttcatgaaaatgtgatttgacgaacaagggcaggatttacattcctgcccttgttttttgttctctgtactggtatcattttttataaaacaaatgcaggtttatcggggagtcgtataaggcaacatagcagaattctggaggtgtgtatatggatttcccaataaatagaaatgctttcgatcaatttatctgcaactcaaatatctttgaattaacacgagttgctatgctacaatgcttgaaaaactggtacaatgatgagcgagagcaatttcttgatgatatgagagctgattttgatacggttatggaaaaataccacttttatgacagcatggtatcattcaataaaaattttgagtttaacctgccattagacacgataacctgtatcattaccatcaacgatgatgaggacgattattgtatgtgttatcgggctatatttgactacgatatgaatatgattgacgatatgatttccccataattgtggcagcgaacagcctgttcttactgacttcttttaatcagcgcggcataagttatagaaaggtgagaaatcgtaatgataaaagagattgaaattcaaggttgtgttacaattccagaggatgtttcaatggatgactttgttgataaatttattgcgtttattgaagaaaatgggtggaattttggcggaggatatcgtactattgtagatgggcactatataaatgacgatgggacaaaaggcgaatatgtctttgaccactgaatgacaacttcctatttaccagctagacataagcagaggcgggagcatcgtttgagatgttcccgccttgtgtgttagtcctgtttcgttttgtcctgttcctgccgtactttccctccacaaactcccactgtccttcctcactctcgaaaaacgcctgtatctccggacgcagagccttccacttcgtgacagggaatcccggcgccgcagccgttgaatgttcggatttttgctttgaccaaaacgataccacaaaacacagggggacggtccctcccccgcgcccgctacagcagcacatcggacacaatcagcccatgaaaccaaaccataccagcaatgctacgccaacgatgccaagcacaaccccgacctggatgtatagcctttctttatactgatcatatttgtaaaacaatgcggtcgccgcaccgataaacaaaagtgcaaggcttcctttccacgccggattgcctttgacaagacaaatgagcgtcaaaacctgcgtggccgcaatgacaaaatccagtgccgcgcttctggaccgcgtatcgatctgtgcgtcccgctcatctttaacaagccgtggctgggagtgctgtttcatatctctttcctcctattcatgtttttcgtagtacaactgaacaaaaatctcaaggatcagaaatccccccaggaacaggcccggaagaaccaagatggcaaaccacaccggattggcagtcagcttaaatccaatcatcccgcaaaccatgaacacaaacagaatgccgtacgcaatatccagcatccgcgctttgcttttatagcgaatcagacgattgcgctcatcccgttcttcaatttgatcctcccttgtcgccttcttggagaaagccctccaaaaagaggtgattcccagcaacagcaaaaatacggacaaaatactgtctctcacctgaaccagtgcattcggatccggcgaaccgaaatcgtgaacaagattccaaagcgccaaaagcatccatatgccgcctaaaagaagtccttttctattgtaaactttcatattccctgtcctccaattccttgttttctttcaggcagcacaattcctcaaccctcacgccaaatacctcagccatacgatatgccagcataagagaggggttatactgctctttttcaatggaaataatcgttcgggaagatacacgaaccagatccgccaattgctgctgcgtcatcccggcctgtgtacgcaattccttgactcgtgtcttcatagcttccccctccgtaatatgaagtaagcttcttgtgaagccaacttcatattaccactgaaaacacgttctgtcaaccaaaatatgaagcatccttcacaaaaggcacttccgcaacctcttcgcccaattcaatgaaaaacaggcacgaactatgttcgcgcctgtttttctgcaccgtccgccacgacggcaaacattattttttctcagcacagcgatgccgcagcgctcaacagccgcagacactgcggcaagaaaaaacaggggcggaatattcccgcccctgcttcgctttctattagaacgctctgttatgcgcccatggtcgatgtttccggcagcgtactgccgccgtcgatcacgatctgcgctccagtgatatagctggattcgtaacagccaaggaaagcagccagctcgccgatttcctcaggccgtgccagccgtttcagcggcacgcctgcggcgattccatcaatcacgctctccgggttttccgggcaggactgcttggccattccttccaccataggcgtacgcacatagcccgggcaaatagcattcacggtaatattataatcagccatctcccgcgcaacggctttggtaaagccgaccagcgccgccttggacatggcgtaagccgcctctccgggatcggccaccatatcgccggtgaccgaactcataacgacgattttaccttcccgcttggccatcataatgggtgcaatcgcccgggttacattccagacacccttgatattaatatcaatgtgatagtcccgatcctcgtcgctggtcgaaagcaggtcgcccagcacacatacaccagcgttgttcaccaaaacatcgatggttccataagtatccagtgcctgcttcaccaggttgagcacactctctttgttcgttacgtctgtacgaacgccgatggcctcataaccggccgcacgaagctcctctgcaaactccagcacccgcgcgcctctggccgccagaaccagtttggcaccgtacttggcatacactttggcaatcccttctccaattcccttggatgcaccagtgatcacagcgacttttccttccagctttctcataatggttcctcatcctttcttttgacaacggattcggcaggcaaatccaaacgggccccggaacgcctcttcacaagcgctccgggtactatcccttgtttttatccttgctgaatgaaatctgacgcaccgtgtttgcacagcggacagacataatctgccggcaattcgtccccttcatatacatagccacagatcttgcacacccagctctttttcttcggcgctgcaggagccgcaggcacaatacgttcaaagtccgcaacgccgtgcttgcagatcgggcagatataatcggccggcagcgtttcgttttcatacacaaacccgcagaccttacaaatccaacccacctttggcgcgtctgtcattgccgcaggcagaggcttgggtttgatgtgcgcaaaataatatccataggtcacggacggctcaccggaaagcacccgcgctgcagtcacatcggcaataaacagcatatgcgtaccgcagtcctgcgaggcaataacctttccggaaagaacagcattcgttgcttccttcacgtaataaatcccgttggccgctcgctcggcataggtgcagccctggaatttatccgcggtttttccgctctggaaaccaaagcgctggaagacttccatggaagcgtcctccgtcagaacagaaacattgaactcaccagttttcagaatcatatcacaggtgtagttggctttgttaactgcaatagtaatccgtttgggctgatccgtcaactggctggctgtgttgataatacagccgttgtctttggccccgtcccgggctgtcagaacaaacaggccataggagaacttctggaacgcaaggggatctactggcgtggcaacggcagagggggctgccgctgccgccagcatggtcagcagctctgcgggattgctgcggagcatggaaatgactttttccttggaaggtactgccggctttgcatccgggatcgtagcagcaatggcatccaccaacgcatccacttccccgctctgcttttccttcagggaggaacgaacagtcaccgtagcgtcaataaatttggtgccaggcaactgttccatcaggcggcgcatctgcccgccggcagcaggcgcccaggaaccattctccacgaaggccaccgtacggttctgcagattgtggttcacaatatcatgcagcagattctccatggcgatgtaaatgccggcattgtaggtcgccgaagcaaacaccaagtggctgtaccggaacgcggcagccaaaatctcatctgccgcagtatacgaagcgtcatacaatgcgactttaataccgcgctccgtcagcttagcagccagaatatccgccagattggcggtattgccgtaaatggagccataggcaatcacgacgccggtttcctccggcgtataggtcgcccattgaatatacttttccaggaactgattgaattttttgcgccagacaaaaccgtgcagcggacaaaccattttgatctcaatgccggaagcctttttcagcacatcctgcacctgtttgccgtatttaccaacaatattagtataataccggcgcgcttcatccagataatcgccgaaaaaatccacctcgtcggcaaacagcgcaccgtccaatgcgccgaatgtaccgaatgcatcggccgaaaacaggattttttcgccgatatcgtatgtgaccataacctcgggccaatgcaccatgggtgcagccacaaaggtaaacgtatgctgccctgtgcagaacgtatccccctctgccaccagatgcagccgtgtacgcacgtcaaacgcaaagaactgttccatgatctgcgcaaccttttcattgcacacgatcgttacttccggataggccttgaccaaatcacccagtgtggcggcatgatccatctccatatgctgcacaatcacgtaatccagccggcggccgcccaacacatgcgccagattttccaagtactgcttagacgccgacgcatcaacggtgtcgaacactacggtcttttcgtccaacagcacataagaattgtaagatacgcccttcggaattttgtatacgccctcaaacagagccagacggcgatcattggcgccgatccagtagtagtctttggtaacctttcgaacattgtacatgctcttacaactcctttccataccccgtcggaattttccttcttcctgcgcattaaatcgcaaaagcagtcaaaccaaattattggatcccaaaatacaaatttatctttttttgcacatttttcacattatccacagacttttgcacatgcccaggcatccacgctgctgtggatttacagcatcagccccattttccgggcttcaaagagcaattcatcccggaaattgggatgggcaatggaaatcagagccttggcacgctgcgagaacgttctgccgcgcaacttggcaatgccatattccgtaacgatcatatccacttcgttccggcccgtagtcacaccggcaccgggtgccaggaagggtttgatcttgctgatagttcctcccttggccgtggatgggaacgcaataaagctcaatccgccgcggctcatcaatgcgccgcgcacatagtccaactgtccgccggaaccggagaacatatggtttccgatggattctgcgcaaacctgtccgctcagatcaatttccaacgccgcattgaccgaaactacattgtcattctgcgcaatggtatagggattgttcacataatccaccggcaggatggcgaccgacggattgtggtcaatgtagtcatacatccgtttggaaccataggcaaacgtagcaatggttttgccaggatgaatcgctttgcagctgttgtccgccgcgccgcattcaatcagttcaatcatgctgtcggtcagcatctccgtgtggatgcccaggtgccgcttggatttcagcgccatacccactgcgtccggaatcgatccaatacccagctgcaggcaggctccgtccgggatctgctcagcaatcagattcccgatggtcgtgctgacagcgtccagcttggccgggggcagcacaggaagcgcataatccgcttcacacagcgccgtcacttcgctgacatgcaccttcggcgcttcggcacagtacggcatctgctggttgacttccaccagaatcatttttgctttcttgaggtattcagcagagtccgaacccgtgacacccaagctgaaatagccgtgagaatccatcggagataccgaaaccacgaacacgtccacatcaaggtattcccgaatcagcgctggctgatcccagtatgtattgggcagataatctgccaggccctggcccaccgccttgcgcgtcagtgcagagcagaacacagatgtaccctgcaggtttttggcaaagcggatcggctccgtatagcacaccagcggatacagatccaaatacgtcgtgatggtgcagctgcgcatggaatcggccaggcagcggttattgattgcctcatacaacgttttaggctgagcaagaaaaatatccgaaaaaatatgagatgcatccggaatacgcgcagccatttctgccgcgctcatctttttctcttcatatactgcttgaaactgcattgtgttcactcctcatttttctgaacgttcttttttgtctatacacgatcatttacccaagcgcgccggccccggacgggcatggctgtggctcgaaacgaagccgcatgctcccttccaagccgcaccattgccctgttccgacgccaatttgccggtgcggcagtattttcctccgaaagcgctccgaaaaagaaaaaagcccaaaaactccaggagtttttggacttcagtgccgcaaatcaatcagcatacgccattgcatgctgtgctgtttcttttgaatctatcatatcagccggtgactgctttgtcaatctgttatccaaaacgattctgttgtatcagagcctgcatttttcaccggaaaaccttttccgcttcatccagcgaaaagtatccgttggctcgcacagtagctttcatcacaatcagcggaaacagcaccttgttctgctccagtttccggagatgattcaaataaagttccagtgtccgctcggaataggtctgcaattctcctctggtataagtttctacagacgtcaccgcatcgtgatcctctgctgtagtaaggggcctgccgcgccgtccaagattggggtacatcgcgcggaattttgccgtctgtgagatctcaatggccagaatttcctccacaaggcgctctttttccggcgacaccggcggcaggagatcctgaatttgttcatattcctgcggatgtgtagagcgcatcatatagccgtacttctcagacaacgggttgcggccagcttcctctgcctggatcaaatcctgccggtaggaagcaagcatagcctcgttccacgcctcaaactgcgcagcacgcataatgcggaaagtccgttcgtcttcctgacaggaagcccgtccgcccacattttggacttgctgaaacaggttccattcccgattcaaaatatcctctgcaatttcactccgattcatactgctctcacacccttctccgcacatcggcggcagtatttatgtttcctgaaacacccgccgatgctcaccgcgtccgccggcggccaagctgctttcgacgttgatttccagaatcccttcaactttcccgttgacccaatatgggaattgaagtactgtcacttccccgccttctgcaccaggaaagttggcatggtaaaaattcatgggctttcccatggcaaacatcaaaaagagcgcgtcaatgttgcgctgattaacctgagagtgacagtttctggtcgaatagcccaaatactcccgctcaccgaataccttgctgtaaaatttctgtgcctgctgattgcagtatatgattttcatatcccggtcaatcacagcaacggctacacccagctgatcatacatggcaaggatctgttggctgtctaaaggttccatctattttattcctttcgctttgttttcattttttggtatgcaggcggtttgtgtttcgcctgcataccaaagatttccatttcaggggttgtaaaatggaaatcctactctatgggagttaagaaaggaatgggactaaagtaaaagaacgctgcatctccgtatcatatacggagcgcacagggcgattaagtgattctacttgcacgaaaattctcgtcacagccccgcctgccgttctctattttctcagcctggcgtcaaagcgccgctgagcacggaaacaaaaatggtttcctcagtcttcgggtttataattgggcagaatggtttccacttccacatggggacggggaatcacatggacgctgaccagttcgccgacacgctgtgccgccgctgcaccggcatccgttgctgccttaaccgcaccgacatcgccgcgaaccatcacggtcaccaggccgccgccgatgtgctctttgccgatcagggtaacattggcggccttgaccatggcgtccgccgcttcaatcgagccgatcaggccctttgtttcaatcattccaagtgcatcatatttcatgatttttcctccttttgtactgcggccactcaagcctgctcataaaatgtacggaacgcttccagcagctcacccttcgcaatccgtttcaaattccggtcggtcagagtatgctccggatattccttggccagttcacgcagttccgccaagcgcaggaatgtgatttcagacattgcctgttctatcccttcgctttggaggatcgcttccagcttctgacgcgtcatcggattttccgca

SEQ ID NO: 149 - DNA, 17816 bp, Unknown
  16S sequences of unknown bacteria
agctcattcaaccgtttccatggagaatggaagcggatataatctgttacataacctttcctgcaacgatcatacaggttggacaatgctcctcccagcaggaacgtatatccagtcttctccatcttccgatctggctttgtcagcacccacgcaaacatagcagcaattcctgcagttacacagccgctccagcggatgatcttgtccatgtgtcccctggcatgtcctccggctgttccataattatgtaatcgcttaatccctgccagccctccaggaagaagatgttcttcttcctgttcaggcagctgctcgatctcctgcttcactgcatgatccagctgaaacagtcccaaagcaagttgtacatataataatttcatctcttaaccctgcatttccagtgcgggcactccgcgcatggtgatcagcggtccgcccttatgttcaatatagtcgccggtgatcgtcacctgtccgatattatcatctttggggatctcgtacataatatccagcataaaatcctcaatgatcgcacgcagtgctctcgcacctgtatctttttccatcgcttttctggcgattgcagacagcgcatcatctgtaaaatcaagctttacttcatccagcgccagcagcttctgatactgcttcaggatcgcatttttcggctctttcaagatacgcaccatcatctcttcactgagtccatccaacgtgtagatgatcggtaatcttccaagaaattccggaatcatgccaaaattacgaagatcctctacagtcactttccggatcagattcttttcatgatcatatttatccttcagatctgcccggaaaccgatagaagactgtttattcagacgctccttgataatattttcaagatccgggaatgcacctccacagataaacagaatattcttcgtattcacagtctccagcggaaccatggcattcttgctgttggctcccaccggcacttctacctctgcaccttccagcagcttcagcagtccttgctgcacagattctccgctcacatcacgctgattggtattgcgcttcttggcgatcttatcgatctcatcaatgaatacgattcctttttctgccttctccacgtcattgtctgcagctgccagaagcttggacaatacactctcaatatcgtcaccgatatagccggcctctgtaagagacgtagcatctgcaatggccagcggtacatccagtaatctggccagggtctttaccaggtaagtcttgccgcttccagtcggtccgatcatcagcatattggatttttcgatctcaatgccatctgcatccggacctgcagccactcttttatagtgattgtacactgccacggaaatcacttttttcgcctgctcctgtcccactacatattcgtccaggctggctttgatcttatgaggtgccgggattgaatggatatccagcactttttccggctgtttttccttgtccggtgcttttttctttactttctgacgacccgggaagatgttctggagatccgacagattcaccatactgatattgggcattctggagaaatccatcttactgtaatccacattgccattattcatcatatccagtgtcttctgcatgcagtcctggcagatgcagatctcatcggtcagatggatcatctttcccgctttgctggctggtctgtggcagacaaaacatgcctcctggctgttgttgtcatccggattctgtccttcttttaattctgtatctttttcgtctatgttcatacttgttattctcctcttttcactggttcaattatatagtaccgttttgccatctgcaagtgaactttttataaacaacctgttgaaaaaaggctgcggcagtaactgcctcagccctcttcactgtttttatttcctctggattatttttcctgcttattctggatctggctctgagctgtcgtctcatcctgtgtacttaaagtcacctgcagagtctgctcctcataagcattgccattcagacgctgtacctttacctcaatggtctctcctgcggaataatagctcatcatctctctcagctgatcagacgtgcttaccgtggttccatctacagaagtaataatatctccatcctgcataccggctttgtcggatcccagtccttccagaacggtctttacataaacacctaccggcatattgtagttcttggatacatcatcggtaacatctaccatattgctgattccaaggtaacctttctgtgcatcgtctactttatctctggtctctttattcatcaaattgccaataatagactctacatcagaaatcgggattgcataacccatgccttccacatcctctgagatgaattttacagagttaatgccgatcagctctcctttgctgttcagaagagctccgccgctgttgccaggattgatggccgcatcggtctgaatcagtttgttggtaatattctgtccgtcagactgtacggttacttcacggttcagtgcactgacaataccggatgttacagacaatccatagccgtatgcattaccaatagcaactaccggctcaccgactttcaatgcggaagaatcaccgactgttgcaattttgatgctctccatggtctcatccggaatatcagacagcttgacagcaataacagccaggtctttattcggatcagttcccttaatcttagcagaaatcacattactgtcatcagcggcatctccgtcagagttaaaataaacacttagttcttttgctccggatactacatgattgttggtcacgatcagaagttcggtgtcattctttccaataataataccggatccactggactgtgtatcctgttcataatttccaaagatcgtctggaactcctgggttcctacattcgtgatggatactaccgacggcatgcaatttgtaacaatgtcagatacatcatacacatcagaagcggatgatgccgtagttgtagtcgtcagattattgcctgccttactcagggacacctgacttttcacagaatttcccagatactggtttcccacataattcactcccatgaaggctgcactggaaacacttccgaataccaatgccagaaccagacattttgcaacagttctgccaaatccgccttttttccgtttcttcggagctgatccctgattcatcgcctcggaagaatcgtaatgggtgtaagtacttcctgtatcatagtgattcatattttcctgttcattattatttatatcatcatacataattgctttctcctttcacaattcctgttgttctctttgtttgtgattacaatataacagtcaattgtgatggaaatgtgatgaaatagcgaaaaaaatttgaacccaaaagaaaagtagtgtatactataagaatctgagaaaaaacagaaaggattcaattgcatgaagaaaaaattgttacttcttttcctcagcaccgcactggctgccactacactggcaggatgtggaaattccactgaagaggctgcagcaccggctgtaacagatgtctccgaagcagaagaggaagtagaagcagaagaaccggaagaggaagaacctgccgtagaagaagaaacccgtgaaggaatgtaccgcagcgagatgaccaacgagtggatcgatgatagtctccagagtcagcgcccggtagcaattatggtcgacaacgagaagactgcacttcttcactatggactgactcaggcagacatcatctatgagatgcagaacagtaccatgaacggaggagttacccgttttatgtgtatcgtaaaagactgggacagcatcactcagttcggtagtatccgaagtgtccgtccgactaacttcatgatcgcaccagagtatgatgcagtcgtgatccatgacggaggtccttactatattgatgcattcttaaagaacccgtgggttaaacatttaagcggcggattcaaacgaatcaacaacggtaaagcaagagagttcactgagtacgtagcgactggtgaagttgcaagccgtctgaaagctgccaacatctctgaaagctatgatgattactatcagggaccacactggcagttcgcaagtgaagctgatccgaccgatctgtctgctgcagctgattctatcgactgtacactggtagatcttccgttcgagcacaatggatctcagcttgactacgatgcagcaagcaacacatatctgtattccgaatacaatatgaaacacactgatccggctaatggcaacaagcagcttgcatttaccaatgttattcttcagagtgcaccgatcacccagtatgatgatcatggttatatgcagtacaatattctgaagagcaacggtaagggctactatatcaccggcggaaaagcgatcccgatcacctggtccaagggcggcgacgttgatatcaccaaatttgttgataaagacggcaatgagatcaagctgaacaccggtaaaacctatgtaggtcttgtaaactctgcaaaatggaatgaccttgtactgaaataaatcatcccgaaaaagaatgatccccgatccgcagttccgcggtcggggattttttgatgttcaaattctataattcttccattacactcttataagacggtcggatgatctttccatttccaacaatctcttccaggcgatgagcactccaccccacaatacgggctaccgcaaaaatcggagtgtacaattccaccgggataccaagcatatcatagacaaaaccactgtagaaatccacgttaggactgacacctttgtagattttccgcttctgggcaatgatctccggtgcaagctcttcgatattattatagagagtcatatccctctcccggtgttttgccgcagacagctgctccacaaagcctttgaagatccgctctcttgggtcagacagtgaatacactgcatgtcccattccgtagatcaggcctttctgatcaaatgcctgtccctccaggatctttgtcagatacgctttgatctcgtctttatcttcatagtccttcacatgctcccggatatcgtccatcatttccataaccttgatattggctccgccgtgccgtggtcccttcagagaagacatggccgccgccaccgcagaataagtatcagaaccggaggatgttaccacacgggtcgtaaaggtagagttattaccaccgccatgctccatgtgaagcatcagcgccacatccagaacctttgcctccagaaaactgtactgtttatccggacgcagcagcatcagaagattctctgcagtagacagtcccggatccgggcgatggatgtacatactttcatctctctcataatggttgtatgcatgataagcatatactgccagcattggaaatacactgatcaggttcacgcattgacggatcacatttccgatatcattggaattcacattttcatcatatgatgccagggtcagaatgcttctggtcatagaattcataatatctttacttggcgccttcataataacatctctggtaaaattggtaggaagtgcacgacacttacccatcagttccttaaattctttctcttcttctgctgtcggcgcctttccaaagagcagaagataggcagtctttccaaaaccaagagaatcttttggaatatttctgatccagtctgtcacattgtatccacggtaccacagctttccatcacacggaactttctttccgtcttttacgcaaaaggaatcaattcttgaaatattggtaaggccggtaagaacaccatttccattaatatctcgaagacctcggttcacaccatattctttgaacagactatccgggatcacatcattttccatacataatttctgatatttttccgtataattctcccactgtttgttatatcccatataacatctcctttcttctgcattctacacaagttgtcagtcttctttatcttaccatatcatccgtcatttttccagttcagactcagtggaacgttctgttcctgccagatgataacagatcaccggcgttcctttttcaatatagccgtaaagctcctgcgctttttcataaggcatattgatgcagccatgtgaccctttcgtcttgtaaatagttcctccaaagctggatctccaggtagcatcatgcataccgatatttttgttgaacggcatccaataagataccggcgtttcatagttttctcccaccagtgtcgcatttcgctgcttgtaagtgatgctgtaagttccctccggagtatcataacctctcgccgagttaccggacacaaaatcagactccatcaccagctgcccatccttatagaaaaacagatgctgcgcagtcagattgatctcaacataggtatcaccataatccggtgatccataagaagcagctgtctgataatagaccggcgtcctctctttgctctctccggtctcgatctgtgctgccagttctttagcctcctgctggtaattcatccaccagccataatcgccgccatctactgtgatttccttcccatagctggtcataaacgttctggaacggaaaatcgaatcatacttcttccgcagagtcgccacataattttccacctgcgtctgatccagcgtcacagcgaatccatcaacctccagccaggtactgatggtgcttccatccagaacttctatgttatctccaaaccgatatgtaatcgtaactgtcccatacttctgaagcttctgcaatgtattctgaagctcttcgctgtctgatgttactgcaggtatttcatagcaaccttctgcatccagatccaccagacctttaagttcttccactgcattgctgatcacttccagtgtctttgcctgatccagctcatttccctgtgtctctgccacaatggaaaatccagtctccggggtatactcactgatgtgtgcgttcgtgggcacctgtgcaaaatcttcctcaaaaccttttaatgcctgaaccgcctgtgtcagtttttctttattataggaaagaagggcttccgtttcatgttcttcatgctgcggcagaaaccacagatattggttctgctctcttaagatctgctgcaaaggttctgtggatgcataagaaagattgatggcttttccatcgatggattcctcataactgctaccgtcgctctttcgctcctgaatccgaaggaaatacgcatctacccggtctgccagatcctgcaccgtcaggttggagacgtccacctgatcgatcagagttccccgttggaaatggttcccgtaataatagcatcctcctgcgtagacaaccagtaaaagaagtacacatgcacatatgatcttgattccaattccagtttttttcatttctcctcatcctctccggttctattcgtaccttacagtatactggtttccaccaaaaatacaaccgaaggatgtcgaattcctgatctttccattctgaaatattttcatgaacggagcatgaattttttgacttttattttcatttatgatatacattatttatcttaggaattctcctatgatttcccgattatacactaattgatttattgcagttctattgacatacgtatttttacgtaatattatatgaagtaaaggagatacaaaagatgccgatgactccacgcgaacttattgtccttctaaaacataatggttttgaagaagtcagtcagaatggatcgcatgtaaaaatgaaaaatttccaaacaggaaaacaaactattatcccctatcacaataaagctttgaaaaaagggcttgaacaggcaatattaaaacaggctggactaaaatagcccgttttaagtgttcagaaaggagtgtatttcatgaaaaaattattttatccggcaatttttcataaagaagatgatggcttctgggtatcttttcctgactttccagaatgtctaacagaaggcgataatatggaacagacttatgatatggctgtcgatgctcttgggctggcaattaccagcagaaaagaggaaaaagaagagattccatctccatccgatcccgatgtaattgatgccgatggtggaattatcactgtcatttgctttgatatgatggaatatttaaaaagacacagctcaaaggctgtcaaaaaaacattgagtattccagagtggctcaatgaagctgcctgctctatgggtcttaatttctcgcaggttcttcaagaagcattactgcagaaagtgcaatcaaaattttaaatatggtatatcatgcccccagcccaaaggttgggggctttatatctgatacgtatttagaacggtttgatctcaatgccttccgcagtcagtgcttctctgatcttcttgacgaatgccagtgctttttcaccgtctccgtgaacgcagatggaatctgcctgaatagcaacttcttttccggtgatggcggttacttttccatcttttaccataccgatcacacggcggatggcttcgtcttcatcagtgatcatagcacctggtttgcggcgattcacaagagttccgtcttcttcataggcacggtctgcaaatacttcctgtgcataggcaagacccgtatctttggctgcttcgatcatcttgctgttgcttaagcccagaagcttgatggacggatctacttcatagatgccttcgcagatggcttttgccagatcgtaatctttggctgccatattgtaaaaagcaccatgaggttttacatgggcaagctttacaccttctgctttgcagaatgccagcaaagctccgatctgatatttggtataggcttttgcctcctcattggagactgccatatttctgcggccaaatcccatcagatccgggaatccggtatgagcaccaatgctcacctgatgctctttcgccattttaaccgttttttccatgattacaggatcggatgcatgaaatccgcaggcaatatttgctgaagagatcagcggaatcacctgatcgtccagtccaagtgtatatcttccaaagctctcgccaagatcacagttcaaatcaacgcttttcataactttttctcctcatatccttacagtttcaatgacacatttttcacatctgtgataaacatatgtcccggtgcatgggtgatggcaaatgacggacggctgttcatcactgccgcctgcggagtcacaccacaaggccagaacaccggcacttcaccttcgcggatggtcaccatatcaccaaaatccggtttattgatatctttgataccgatagcttccggataaccgatctgtaccggcgctccatggactctcggcatcgctgctgtcacagtcactgccgccggaatcagatgatgaggaatcggacgcatacttacgaccatatttccggagaatgcgcctgcagactcacagggaatattggtcagatacataggaacgttacagccttcttcaatgtagcgtaccggaataccagcttccagcaattctgactcaaaggagaaactgcatccgatcaggaagctgaccagatcttctctgtagaaccgggaaacatctgtatactctcctgtcagttctccattttcatagatccggtattttggaatgtctttgtagatgtccacattcttgccaagataggacagaccttttccacccacatcactgacttccagcagcggacaggattttggatttctctgtgtaaacaataagaaatcatatgccagatccttgggcaggatcaccaggtttgcctgagcataacctgcgcacattcctgctgtgggtcctgtgatctttccttctctgataagtgctctcacctctgccggtgacatactgctgtaatccatccctgtgttcctccttgttctctgtttcccttagccgttgatcttcttgtccaatgtatccagatattttttccgctccagattaagcttctgagcttcttctactgatatataggaaaatctcactttttctcccggtttccgctgtccgatagccgaaatatccgtggagatcacggttccgatcttagcgtatccgccagttgtctgatgatccgccagcatcacgataggcatcccgctggatgagacctgaacagaacctgttgtgattccatccgaaataatatctccgctggtcacaaattcaattgcttctccggtaagcttgcatgccatccgattagaatcctgcgtaaccgtatatgcctgttctgcaaaggtcttctgacctttttctgtgaaatactcactttgcggtcctggaaccacccgcagcaccggaagtttatccgctgatataggcgtctgaaaacttccttctgcagcatttacttttcgtttttccatatgcggaagagtcgccttttctgttcgaagttccaacacatcgccggtcttcagtgcacgtccctcatatccgccaagtccacatttcaggttagtggaacggcttcccagcaccggttccacagcaaatccgccagccactgccagatatcctctgcagccggtcatggcaaatccacacacaagcgtatctcctgcatgaacctccactgcttcatacaatggcatcgctgtaccattcagtttcggtgtcatgttggcacccgccatggcgatcactgccggaacagtaaaccggatcgtcggtcccatgatcgttgcttccagaactgcttccttctggtcatttcccaccagaatatttgccagacgcatagcctggtcatccacagctcctgacacctgaaatcctttattcatatatccgaagcgccccagatcctgaacggttgtcagggcgccgccatttactatttccagactcataggtatgcctcgtattcttccgctgtgatcggtacaaagcggatatagtctcctgcctgatagagaaatggctgttctctgtcaggatcataaagtttcagcggtgttcttccgatcagccgccagccgccaggagattccagcgggtagataccggtctgttctccgccgattcccacgcttccttccgggatcttggtcctcggattatcaaggcgcggggtaaataacttcggattcagtcctcccagatacggaaatccaggaaggaatcccaacatatagatattgtagtctacagaagaatgaagcttgatcacttcttcctcggtaagacctgcgtgagctgccacatcttttaaatcttctccgtaactgccgccgtagcataccggaatctccaccacatgatgaggtgtctcctgtcctgcagattcttctgcggaaataccggacagttcttttttcagctgttcaaagctgatctctgacggatcataggtcaccatcagcgaacggaaggtaggaaccgtctccacgattcctttcacatgggctgctgccactttttcattcaggcactgaacctttcgattcagtgcctcattgatctcatttccaaattctaccaccagagcacagtctccagccggcaggatctttcttccatcttccggtttcttcccgaaaagggaacggaatacagaccacataggttccacctactttctgccgatggctgtcagatactcatccatcagaagttttcttaatgttgcaaggatttccggagcttttcctcctaccggtttctcatcgatctcatgagcactcaggcagaagttgctggaggaacttacgataacctcatctgcatccatcatctctgctacagtaaacggtctttcatcaaccgggatgcctgcaactttacacatcttaatcagatggacgcgggaaatacctggcaggatataatgatctgtcggatgtgtgataaatacgccatctttgatcatatgtacattactgtgtgcacactcggttacaatatcacctctgtggaatacgatctcgttgcatccatgctgtttaccaagctcggaagccataacgttcgggatcaggttcaaagtcttgatgttgcagtgcagaaaacgggtatcctctacggtcatcagtttcagagtcttggacggatcaccgatcttggatggacggatcatgacccacagacgtcctttctgtccttctggaaatacatgatttctcggtgcaacggccctggttacctgccagtatacgaacagctcatctccgtcaacttttttcaccatctcgttcagaatatcttttacttcctgtttcgtatgcggaatctcgatcttcagcagtgctgcactgttaaagaaacgatccacatgctcatccagattgaagatcacatgattgcctgcacaggtggcatcatatacaccatcaccatagtaatgagaacggtcatcaaaaggaatcaccattttgtcgatttcgtcatactttccatcatagtaacctaaagtctgcatcatacattcctccatctccggtgcgcaagcgcgatgtctctttcctcatcgttataacaaaaaaagatgctgcccggcccccaggccaagtaacatctttgttacgcttgcatttcactcatttgttgcaatgattatatatccagactttaggaaatgcaagtttttcagatatttctgaatgatttttattttcagctttttatataaatatttttaagttctatgtcatattttcaaaaatatttacattttcttttatttgatcagttcttccgcatgcttcagagcatctgagatattggcgcagaaattgtcttttccaaccagctccacaaatccggccttctccatcacatgcatcggctgctcattcacatgagaaaagattggtgtgatgcctttagcttcacaatatttcaccagattctgaagagcattcatagcagtactgtcaagtgcaggaacacttctcatacgaagcaccagacatttggtaaaatctttcactacaatgtgttcaatcgcattggctgctccaaagaacaacggtccggtaatctcatagacgcggatctctttcgcaagtttctgcatatgatcattaactgcatctgaatcatcgtccacgtaagtccagctgtccacgtgcgtctcatcgctcatgcgcttcatgaacagcagacaggtcagcagcataccgatctcaatagcaactaccagatcaaatacaacggtcaggaagaaggttaccagcagcaccagaatatcactcttcggtgcggtctggatcagatgagtgaacggtctccactgacacatattgtaagcaaccacgaacaggatcgcagcgatggtcggcatggggatcattcccgcataaggcatcagaactaccagtaccagtaccaatgtgatagaatgcaccattccagctatgggagtacgtccaccatttttaatgttggctgctgtacgtgcgatggctcctgtggccgggattccgccgaacagggcagaggcaatatttcctgctccctgagctaccagttccatgtctgaacgatgtttcccgttgatcataccgtctgcaaccacgcaggacagcagagactcaatagctgccagcacagcaatggtaaatgcatttggaattgcatcctccacagctgcaaggctcagtgccggaaggtggaaacctggcagtgcattgctgatagaatacagatctccgatggtagaagccttcaacggaaggaattttaccatcaggattcctgcgaccacagccagcagagaacccggaatctttttgaaaatataaggagaaataatcaggattgcaagacttaccacgccaacgatcactgcagacagattaacagtgccacaattttcaacaaaagcgtgaagcttttccatggtctcaatgggttttactccgtccggataagtcacgccaaagaaatctttgagctgaccgatcacgatggtcacagcaattccggctgtaaatccggtggtgatggtgtacggaataaaacgaatcagtgtaccaaaatggcacagtcccatcagaatcagaaagattcctgccagaatcgtcgcaatcaccagtccatccagaccatttttcgccacaataccagctacgatcgtcgcaaatgcagccgtcggtcctgcaatctgtacgctgctgccaccaagtgcagagatcacaaatcctgccacaattgcggtgaaaatacctgcctccggaccgacgcctgatgccagtgccagtgcaatggacaacggaagggcaatgatcgccacaataattccagccgtcacatctttggcaaactgttcccggctatacgttttcatacatgttagtaacattggtttcaaagaactcatcagttaaaaatcctttctcgttggatatcctcagttgtcaaacacaacttttccagtatagcacaagaaagagatttttcaatgatgaattatcatttataatcaatacactcttgacactcaaatatgactatgttatatatttaacagaataagtgtcgactaatcttcgattgagtcggtgaaaagggaaatgggtgtgagtcccatgcggtgccgccgctgtaagcgcacgatacagggttgttttctttcactgtccttttctcaaaacatggatgggaagagagaaaacagacaagacccgcgcaagccagaagacctgcttatttttcttttgctgtcacggtccatgacacttgcgaaagatatagggcgcagtgcgtccagatgccgaaaacgggtgcatcatctgatccatagagttcagatgatgctttttttatgggctaattacaaactacatattaatggaggaaatcttatgaaaaagagaacagtaagcgtattgttaactacctgtcttgcagcaggtatgctggctggatgcggttccacatccgctgataccacagccactactgacaaaacaacagaagagactaccaacgagacggagagtacagatgcatctgaggcttctgaaactgccgatgcagacagcgactatgagccggtcaccattactctgaatctggagcgttccggtcttggcgaaaatgttgaatacactttcactaagaaaccatccgaagtcgttgcttccggtgatcagatggctgacttcttctttgatctgggactggaggaccagatggctggctacacaaaaggaagctgctggagtactgtatcccagtatccggcacgcgacaaagttccacagcttctggaaccgggtaaaggtctttccaatatgtccaaggaagagctgctgtcaaccggatgtgattttctgattggctgggactccgtattttcagacaaaaacttcagtaaagaattctgtgaccagaacggtatcgcaacttatttcccatatgtgtgctccgacaaagcaacctttgaggatctgtacaaagattatgagacccttggtgctattttccaggtacaggatgtagctgctgaaaaagtacaggctatgaaagatactctgcagaaagtaaaagacactttgggtgatgaagcttatgaaaatccggtcactgtattcgcttatgactctggtgaagatgctccgtttaccgcatgccaaggtatgccgggcgacattatcaaactggctggcggaatctccatcttcgatgatatcgaggctggctgggcaactccgtcttgggaagaggttgtggagcgtgatccggatgtaattctgattctcgagtacaccggaggtgatgtggcagataaaaaggaattcctggagaccaacgagttcaccaagaatctgcgcgctgtcaaagaaggcaaaatcttctccgtatgctgcagtgatatgcagggaagtgccggaagtgcagccgctgtaaaagcaatcgcagagcagttatatccggacaaattctaagaacatctggaaaactgacaggggagtgtaaaagctccccttctttattgcagtaggaggaatatatgaaaggaacaagaaactcaggaaaaggccgtttctggctgacgctggcactggtgatgacactgattgtgatcgcagtaaccatctctaccaccataggtgctgtcaatgtgtcagcttccgatatcggtaagatcctggtcaataaaatgtccgggaaagacatcttccagattgcctgggaaggaaagaccgaaaatatcatctggaacatccgttttccccgggtactcatggcatttatcgtaggcgcaggtctttcactgtgcggtgttctcatgcaggccctcaccaaaaatccactggctgacccctatgtactaggaatctcctccggtgcatccgcaggagccgtcggtgttatcatccttggatggttcagcttcttaggcggctactctgtaatcttcggtgccaccttaggtgccgctatctccatctgtctgtcactgggaattgcatctataaagggacgtattacttccacccaactggttctggccggaatcgccacctctgcatttttctcggcggtgaccaacctgatcatctacggattcaatcagggttctgacaaaacaaaaatggcacaatactggatggttggttccttaagtggagctacctggagtcgcgtaaaatatgtggcaatcgtaggtattataacagttgctgtgattctgctgtttgccaaagagctggatgtactgctgctgggcgatgacgtggcagagacactgggcgtggatacccggaaaaccaaacttctgattatcataactgcaacgattctgaccggcgtggtcgtatctgtcagcggtgtgatcggtttcgtaggtctggtcgtaccgcatattatgcgaagctttgtgggctccggtcacaaacggctgatccctgtagccattctggctggaggactgttcagtatggtagccgatctgatctctcgaattattatcgcccctgaggagcttcctatcggcgtgatcgctgcatttatcggtgcaccatttttcctgtatctgatccgcaagggcagcgcaggcagaaagtaaaggaggcagattatgagtttacaggtaagaaatctggattatcagataggtggaaaaagcattctggaacaaatctgcctggaagtaaaagacggtgaatttgtaggattgatcggtcccaacggctgcggaaaatccactcttctcaaaaatatttaccgctcctacaagcccgaccgagatactatattcttgaatgaaaaagatgtgcttgatttttctttcaaaaagatggcagcagaaatggcagtcatggcacaggaaaatcatgtggaattcgattttgaagtgcgagatatggtcatgttcggtcgttatgctaagaaaaaatttctggaaggggattcagccacagacaaaaagctttgtgagaaatgtcttcgcgaagtaggacttaccggttatgaacaccgctcctacttaagtctctctggcggcgaaaagcagcgtgtactgcttgcccgtgtactgatgcaggaaagtgcttttattgtactggatgagcctaccaatcacctggatgtaagctatcagtatcagatcatggatatcctgaagaaacagaatgtcactctgttttcttcaatccatgacctgaatctggcttccctgtactgcgataagatcatcttcctgtatcagggaagaatcgtagattacg

SEQ ID NO: 150 - DNA, 7195 bp, Unknown
  16S sequences of unknown bacteria
ggtggtgtgggaggtcataatgccggagaggaagcaggggacggtatcgatctgttaaagccgctccatccgggcgggcgctatgactatcaccggtttctgcggcagttcgcgacgcttcaggaggagcaggagcttgatttggaaagcttcgatccggtgcagtatcagtttggtatggagcattatggaaacattccgctgatcgagccgctggaataccgtgaggtacacaggctctcggagcttgtgattgcgatcgatacatcaggttcgtgcgatgtagagacggtgacacagtttctgcaggagacatacgccatcctttcagatcaggagaactttttccgcaaaatgaaggtgtacctgatccagtgcgactgctgtatcgaacaggtgcaggtgattcattccagagaagagtgggagaagtacagccggagcattgcagttcatggccggggcggtacggactttacgccggtgttccggtatgtggaggagctgcgcagaaaaaaggagttgtcaaacctgcgggccatgatttattttaccgatggagacggcatttatccgcggattgccccagactatgagacggcttttgtttttgtaaagcgcaccgaggggatgcaccaggtgccgaagtgggcgcgggtgttctgtacggcggacaactgacaaggcgtttataagagcagacgataaaatatggagaacagacgaaaatatgaacatacaggaagcaaaagaagagatcacacataccctgcgggcatatctgcataaggatgcaatgggaagctatacatttcctcttgtgagacagcggccgatccttctgatcgggcctccgggcattggaaagacagcggtgatggagcagatcgccagggaatgtcaggtggggcttgtcagctatacgatgacgcatcacacacggcagagtgcgatcggactgccgaagctcgtagagaaaaactacgggggaatgaagctgacagtgacggaatatacgatgagtgagattgtagcttctgtctatgactgcatggagcggaccggaaaaaaagaggggatactttttatcgatgagattaactgtgtttctgagacactggctccgacgatgctgcagctgttgcagaacaagcagtttggaagccatcggatcccggatggctggattctcgtagctgcgggcaatcccgcggcttataataaatccgtgcgggaatttgatattgcgacacttgaccgcatccggctgctgaatgtggaagcagatctggatgcatggcttcggtatggcactgcgcatcagatccacggggcgatcctgtcgtatctgcagatccataaggaacatttttaccttgcagaatcaaaggaggggcagaaatcgtttgtgactgcgcgcggctgggaggatctgtcctgcctgctcaaaagctatgaggaggaggggcttccgtgcagcggcgtgatggggcagtatctgcaaaaagaggcggtcgcagaagcatttgcacgctactatgagctgtatgaaaagtacggcatggattatgatgtgaccggaattctgaacggaagtgtgataagggggagcacgctgtacgaagaaaagcgtcggatggcagtgcaggctccgttcgacgagcggatgatggtgattcagcagttgctctccgcactggatgatagctgctcagaatttgtgaaaacagatcaggactgtgtacagctgcacgcctggctgtctgtgtttttgaaaggaaagggagcattttcggagttcgtaaacggagaacatgagaagctccgggtaaaggagcagatggagctgctcaccgcgaaagaggcagagacattgcaccgtgcacttcgaatactggatgaatatgagcaggggatgaaatcagaacggatatcggctgtggatgctcagaatgcatggctgcgtgcacactttcaggagctggtgaacacgcggcagcagtgtgtggaggtgctgcatcatgcactgtcccgcgcattttcctttacagaggattgctttggacgggagcaggaaatgatcctgctcgtaaccggactgacgagaaacgaccgtgcgatggagtttatccggctgtgcggctgtacggaatacctggagttcgccggtgtgctgctgccggaggatacggatgagctgcaaagacaggcggaagcactgcttcggtcagaacagaaggagagaccatgagaatattagattttttcagagatgatacgatgttttatgtgaagctgcgtcggcttgtattgccgcttgcatttcagcagtttatgctcgcggcggtcagcgcatccgatgcgctcatgctcggcgttttgtcgcaggattctctttctgcagtgtcactggccgggcagattacgtttatcttcaatttatttatgggtggctttacgaccgggatgagcatcctggctgctcagtactatggaaagggcgatcaggtatcgctggaaaagatttttgcctatgtgctcagaatatctgcacttgtctcagcgatgttctgtctggcggctctgtttcttccgcagcagctgatgcggctttttacgtctgatccggtactgatccggggcggcgccgactatctgcgagtagtagccgcttcgtatctgtttaccggcatctctcagatatacctgtgtatgctcaaaaataccggagcagcgatactgagcacgataatcagttctacggtggtcgtactgaatattatacttaatgcggtgctgatctacgggatcgggccggtaccccggatgggaattgcaggcgctgcactggctacgacgctttccaagctgctggagcttgtatgggcgtatgccgcatctattccggagggccgggttcggcttaggatgaaatatctgtttggttcggcaggcgtgctggcgaaggattactggaagtattctgccccgatgtttgcagacaatctggtatggggaatcggattttcgatgtattcagtcatcatgggacacctcggaaatgatgcggtggcggccaattcgattgcgaacatcgtaaagaatctgatcgtctgcttctgcagtggtctggcaaacggcggcggcattcttgtcggaaatgaactcggcaagggggaactggagcaggcgaggagatacggagatcttttgttttggctgagcattcttggcggtatcctttccggctgtgtgcttctgctttgccggccggtgattctgcattttgtgaatctgagtcctgcggcagcgggggatcttaagtggatgcttctgctgtgtgtattttacatggtaggaaaatcgttcaatatgatgacgatcgccggtatttttccggccggaggtgattctaaattcggcctgatctgcgatatcattaatatgtggttcgtgatattgccgtgtgcatttctggccgcatttgtcctgaaattaccggtcatagcagtgttttttgtgattaatctggacgaggtcaccaagctgtgggcggtcatccttcattaccggaaatatggctgggtaaaaaatctgacccgcatggaagcatgatttagtcaggcggatattcgcaattcgcttcgctgcttgcttgattcggtgaaattgacagttgaacgatgaataaaatcaggatataatggccgtatgttgcattttgcggcagataaaaaaggtacggccgaaagtcaatcggatcagcttattgctctgcgcagttgaagcaggggcttgcctgattcgtttaaaaagttcgaatgtacataaaaagaaagagagaatgtatgatccagattatcgaaaaagtaaacagcatggtaaacaatttcatctggggtgtaccggcgatggtgtgcatcttcggagtcggtctgtacttaagcatccggaccggatttttgcagatccggaaatttccgtatgcgatccggacaacaatcggacggattttccgcaaacggaatgcttcagatggtgcgctgactccgtttcaggctgtctgtacggcactggcggcaacggtcggtaccggaaatatcgcaggcgttgcgggcgcgatcgcgatcggtggaccgggcgcggtgttctggatgtggatttctgcgatcctcggcatgtgtacgaagtttgctgaggtgacgctggctgttcacttccgggaagtaaacgcaaacggagagctggtcggcggccctatgtactatatcaagaatggccttggaaaaaaatgggtgtggcttgcgtacctgttttctgcatttggcgtgctcacggtgtttggtaccggaaatgcgacacaggtaaatacgatcacgacggcgatcaattcggcactgctgaattttcacattatcgacaccggcgcagtcgcgatgtcaaatctgattatcggaatagtaatggcggttctggtggcgctgatcctgctcggaggagtaaaacggatcggtcaggtagcggagaagcttgtaccgtttatggcgcttttttatatcgtgctagcgcttggtgtagtagtggtgaatattcaggtgctcccatctgtctttgcttcgatctttgagggggcattctgtccgtccgcagtgaccggaggcgtgatcggaagcatgattacaagtatgaaaaagggtgtgtcccgcggtatcttttcgaatgaggcaggacttggtaccggatcaattgcacacgcctgtgccgatacgagaaagccggtcaagcagggtatgttcggtatttttgaagtatttaccgacacgattgtgatctgtacgctgaccgcgcttgtcattctctgcagtcaggtgccggtcgcttatggcgaggcggcaggtgcagagctcacaatccagggcttcacggcggtatacggcaattgggtatccgtctttacggcggtggcgatgtgctgctttgctttttctacaacgatcggatggggactgtacggtgcgcgctgcatcgagtttctgttctcggagaaggtgatcaggccgtttatggtagtatattcgctggttgcgattcttggagcgactgcaaatcttggacttatgtggagcatcgccgagacctttaacggactgatggcgattccgaacctgattgccctgttcctgctggccgggacggtggtaaagcttacgcgggaatatttcgcgggcaatgaccagtaaacggacccgaaggaggcggactttgccgccatcaatgaaaggagagagacgttatgtgcggaattgttggatttacaggtgaccatcaggcagctccggtgctgctggcaggactttcaaagctggagtaccgtggctatgattcagccggactggcggtacgcgatggcagtgcaccgacgacggtcattaaggcgaagggacgcctgaaggtgctcgcagagaagacgaatgacgggacggcagtgcccgggacctgtggtatcggtcacacgcgctgggcgacacatggggagccgtcggagaataatgcacatccgcatatcagtgatgacgggaatgtcgtggctgtacacaacggtatcatcgagaattatcaggaattgaaggataagctgatccgcaatggctatacgttttattctgagacagatacggaggtggcggtaaagctgatcgactattattataagaaataccttagtacaccggtcgatgcgatcaaccattccatgatccgtattcgtggctcctatgcgctggcgatcatgttcaaggactatccgggagaaatttatgtggcccgcaaagacagcccgatggtactcggtatagaaaacggtgagtcgtatattgcatcggatgttccggcaatactgaaatacacaagaaatatttattatatcgggaatctggagatggcgcgtgtccgcaagggcgagatcacattttttgacctgaacggcgatgagatcgaaaagacgcccaagacgatcgactgggatgcagaggcagcggagaaagccggctatgagcatttcatgatgaaggagatccatgagcagccgagagccatcaccgatacgttaaactcggtcatcaaagaagaggtgattgacctttctgacatcgggcttacggaggaagcgatcaaaggtgtgggaaggatttacatcgtcgcatgtggatctgcctatcatgtaggcatggcagctcagtatgtgctggaggatatggccggaattccggtgcgcgtcgagctggcatctgaatttcggtatcgcagccttttgcttgagccggacagcctcgtaatgattgtcagccagtccggagagacggcagacagtctcgctgccctgcgggaggcaaaaaagcgcggggtaaagacgcttggtatagtaaatgtagtcggttcctcgatcgcaagagaagcggattcggtattttatacgttagccggaccggagatttccgtagcgacgacaaaggcgtatagcacgcagctcatcgcgatgtatgtgctcgcggtacagttcgcaaaggtgcgtggaaggattgacgaagaggcatatgccgggtatatccgggagctttgcagcctgccggggaagatcgagaagatcatcgaggataaggagcgtctgcagtggtttgcgtccaagcaggccaatgcaaaggacgtgttctttgtaggacgtggaattgactatgcatgctgtatggaaggcagcctgaagatgaaggagatcagctacattcactctgaggcctatgcagctggcgagctcaagcacgggacaatctcactgattgaggatggcacgctggtgatcggtgtgctgactcagccggagctctacgagaagacggttagcaatctggtcgagtgtaaaagccgtggggcttacctgatggcggtgacgacctacggcaattataatattgaagatacggcagacttcgtgatctatattccgaagacggatccgcactttacggtatcgcttgcggtgatccctctgcagctgatgggttattatgtatcggtggcgaagggcctcgatgttgataagccgcgaaatctggcaaagagtgtgacagtagagtaacgaaaaatcgctactttctcatgtttggcaggtcccaagtttaagagccttatcatgcttgca

SEQ ID NO: 151 - DNA, 18501 bp, Unknown
  16S sequences of unknown bacteria
cgcgggcgaaacaggcgagggcggtgcgaagatacggaacaccgggccgctgaaggcgagcacggtgcgaagacgcggattgactatgccgcactgtggaacggtggcacggcgcagccgtggcggagggattgcacaaactccagcgcaaagtcacccatttcgcatatgcatatagccatccgcctgatcccaaggcacgaaaaagcccgcgccgtgcgcgcaaaacacggagccagagggattggcggtgtccgcgtctggcgaatagccgatgcgctcgatcacttcccgcgcgttgtggcagggttcaaagccatcgcttgcgcagctgagccgcccgcggccatgggtatacgccacgagttcccggggatagccgcgcatggtggccacaggcgcgcgtccttgcagtcgggcggtttcgccgcgcagttcgggcggatcatagcgcccagccattttctcaatatccgccatggcgcggcccagggcttcccgcggcacttccaactcaaaggcgtacatgggttccagcagcacgctttccgccttcatcaacccctggcgcacggcgcgataggtggcctcgcgaaagtctccgccctcggtatgcttgaggtgcgcgcgtccgccgaggagcgtgatcttcatatcggtgatttccgaaccggtcagcacgcctttgtgccgtttttccgccaggtgagtcaaaatcaggcgttgccagttgcgctccagttgatccacatggcattcggaggcaaacgccagcccgctgccccgcgccccgggttcgaggcgcaggtgtacttcggcatagtggcgcaggggttcatagtgcccggccccttccacagcgcgcgcgatggtttcgcgatagagaatggttccatcctcaaaacgcgcatccaggccaaagcgttcgcgcagcaggctcgcgatcacctcgatctgcacttcgcccatgagctgcacatgaatttcttccgacgcttcttcccaggccacgcgcagggtcggttcctcttcctccaattggcgcagccgcgccagcgcctcgagcaggttgctgccctccggcaggcgcaggcgatagctgagcacgggttcgagcacgggcagggccgcgtccggctcgcagcccaagccctgaccgggccgggtttgcgtgagccccgtcaccgcgcaaatcgtgcctgcttccgcttccggcacggtttcgcacttttccccggaatacaggcgaatctgcgccaccttttcttccaaaccgtcatacgaaatgggcgcgcgcaccttcagcgcgccgccggtaatcttcatgtgcgtgagacggttgccctgcgcatcgcgcgtgatcttgaaaaccttcgcgccgaacgcttcgccccaggcgcgctgcggcacatagcgcgccagcccgtccagcagttcccgcacgccttccagccgcagcgcggagccgaaatagaccgggaacaccttccgctgccccaccaggcgggcgatttccgcctcttccagcgcgccggtttgcaaataggcctccagcagggtttcgttgctcgtggccagcgcctcgcaaaattcctcgccgcgcaaggtgaaatccacgcacgcctccgaaagccgcccgcgcagcccctccagcagcgccgccttctccacacccggctgatccatcttgttcacaaacacaaaggtgggcacgcccgcccgagccagcagtttccacagcgtttcggtgtggccctgcacgccgtccgccccgctcaccagcaaaatggcgcaatccagcactggcagggtgcgctccgtttccgggctgaaatccacgtgccccggcgtgtccagcagcgtgatttgccaatcctcccactggaaacgcgcctgcttggcaaaaatcgtgatgccgcgctgccgttccagcgcgtgcgtatccaaaaaagcgtccctgcggtccacgcggcccaacttgcggatggcgccgctttcgtacaggagcgcctcggaaagcgtcgtcttcccggcgtccacgtgcgacaggatgcccagcgtgcgtttgttcaagcggttcccctaccttctggcaattttctgcgccgcttccattatgcgcgatttggccgcgcttgtcaagccttcagccagtcgcgccacagaaatcacaatttctcagttaaaatttctataccccttgaaaacactggcgtttccagcgttttcgccgcctcggtttggcccttttccctcattttttcccttgcgagaagaaatgagggaaacttttttcaggccgtccctacaaccttatccagcagccttgcggaagttcgcttggcctctctggtggcgtgggcgtaaatgttcatcgtggtacttacatcagaatgtcccagcagctcctgcacatccttgggggctgccccgtgggaaagaaggttggtcgtatatgtatgcctcaacagatggaagtgaaaatcatccatatttttcttgcaagaacagtccccgtaatagatgctgctatactggctactacatggctaatcaacacagcggcccaaattccattcaagccaagacctaaataggaaagcagataggccaggggcatccgaaccacaatgtaataaaagatcatcaggaacatactctttgaaggtttacccataccgttaagggcacccaggtagcagtttgtaactgtattcaagatgtagccgatactaacgatcaggaaataagttccgacaatggccgccacatcctcgctcttaacaaataggccggagagctgcttagaaaagccgaccactaaaacagaaaggattacaagcaggacacagccatacatcaatgcacattttagatagtctttagccctgtcgtatcgacttccgccaacgcactgcccgatgatggtagttaagaccatgttcagcgccattgccggatagaaaagaatggtttccagctttcctgttaccccataagctgctattgctgtgacgctatatgtactgacaagcgcagtgagaaaagttgtactgatagccgggatactttgctgaatgacagagggaattgccttctgaataagaggcaatacctcgctcttatcaaacgcagagattttgaacgcgaacagttttttctttttcagataaatcaacatgaacaccagacagatcacctgagaaagcagagtggcaatcgccgcaccgtgaaatccgatgaagtggataaaaatagggtcgaggatcgcatttaagatcgttgataccagcatcgctacggcctgaaacatagaattaccaaagctccgcaaaacggcggtgaaataaagatagaggtagaccgccaaatatccaaggatatagattgccagatagctgtatgccatatcataagtttcagccggggtgttcagagctttcaaaattcccggaagaaaagcctcaagcaaaatcgtcacaaggagggagaaagctaccgcaacactgaatgatgtggcaatcaaactctctgtttttttcttatcctttgcgccaatcgcctgggagatcaggatcgacacaccattagtcgctcccatcgcaacggaagtcaagattagaataatgggagtggagtttgtcaaagcggcataagccgtttctccgagcaaatttccgatccacagactgtctacgaggttatacatcatattgaggaacatggcagcaatcatcgggagcgccatcgccataaggcaacgctttgtatttccgcctataaagtcaattttgtttggcatggtaatcatcctttcttcagcaaatgaatgaacaacattcatatagtagtcaaaaatatctgccgcgtcttgcggcaatatctgaatgaaaactattcattattaggcccttgaaaatcccccgccccagagcgggggatcagtttcaaaggtgcagtgcaaatataagaaattcacgaattctttttgacttatcttcttgtgtcaaatcgtctgccagcaggataccaagctgcccatatacgcagaacatcgcggcagcctgcaaatcgtcaaactggatctctccctgttgtctggctcgttgcaacaatttttctacaatcggaaccaatttctcacacactttgagagaaagctgatcgtggaatttcttgttttctgctccgtgaaaaacagaatagtattttgtgtcccgttcttccatagtggcaggcatatcttcaatgatctgcctcaaggtcttgtgatcgtccttttcagcgcctgcaaattgctccacaaggacatcggcatattgttcaatcgcactgtcaaacagcgcctctttagacggaaaatagcgatagcatagaccttgtgccacaccgattgcttttgctatatctgtaatcgaggttttttcatatccattttccccgaacagtttgagggcagtatctaaaatctcctgcttgcgtacttccggctcctttgtaacccgcatagtctgagcctcctttctttctatgatagcacgccaactctaaaaaaacaatgagtgaatatcaatcatttttcgcccatagcaatacacgctgtgttaccaacctgtttccacgacacattatgaaaaaatgctgaaagcatggaaacaagttctgcttcagagtaaatctttacatccccttctttgctatgacgcatatacaaattcattatcacacgccctacaaagggctgccagcaatctcccatcaggaaagtgcctcccggcttcaatacccggtgtacttcccttaagacattttgcggtgcaggataatgatgaaacgagtcgttgcagtacacaacatcaaaagagttgtccgggaatgggagcgactcgctgtctcccaagaatagctggacttgttccggaagtttcgacttcgcaacagccagcatttcttcggataaatcaatgccgcatagatctttgtgattatccttttgcagaatgagcttcagcatttcgcccgtcccacaccctaaatccagagctgactgaaaaggaatgtgggacagtttttccagcaggatgggataaagggagcgggcgtgctggcccttaatatctttatcataggtggcagcctgttggttaaaagatgcttttgagttttcctttatggtgttcatggcttgacctcctttccatctaccagtatagcactctttgtttgaaatgtcaatgaataatgttcattcattttgcgacttatctctttcgcatcccggagcaatcgctcatcgttctttggtgcggtctttctctgtctgcttttcttcctcatagcccatgatgcggtccacattggccttgacggtcagaagctccttcatctcatcacgggcctttcggtagctggaataggctgcctttttttgtgccatcagctctgcatattccgtctgcaaactcttgacggtagggagctttttcattcccagctcatcaaatgctttctttgcggtctggtgtaaaaggatgtccgcctcatgctcggcgcggaacttctttgaatatccagctttgcgataatgtccgtcaatccatcggcccacaagagccgctatattcagttgtccggcttcacacaggggaaggctccggcggagcctggcacacatcacgacagttctctttgccacttcattctcttgtcgttccctgtattttgcccttaatttttccctcacgagcgtccgtgaggccataaaaatgcggtaatgttcgataacagcctataacacctttgcatggataaattggcgtattttcaagggtttttgggggtttaataacacccgataacgcatctcggaaggtggtgaaagttcaaggggctaatcagatttttttggtttgacaaagggcgcaaaaacgcgtacactattgcagaatgaatgtaccaaaggacacaaaagaaaaagggagggaacgcccatggaaacatctgtccgggcggaattttcgcgcggcgcgcgggacggcctgcccatcatgctgggctattttgccgtttccttcacgctgggcatcgcggcgcgcaacgcgggcctcagcgcgtttcaagcggggctggccagctttcttttgaacgcctcggcgggcgaatacgcggctttcagcgcgatggcggcgggcgcgggctatttggaggcggcctttatggtgttggtggccaacgcgcgctatcttttgatgtccttcgcgctcagccaaaaacttgcgcccgccacgcccgtttggaagcggctgttggtgggctatgacgtaacggacgaaatcttcgccctggccatttcgcaaagcggcttcgtggccccggcctacatcttcggcgcgatgagcgtggccattcccggctgggcggtgggcacctatttgggcgtggcggtgggcaacctgctcacgccgggcctgctcagcgcgctatccgtggggctatatggcatgttcctggccgtgattctgccgcccgcgcgcaaggacaaaaagctgctcgcgctcatcctcgtttccatggcgctgagctataccgtgcgcgcgctgccggggctatccttcctttcggacaacatgaagaccatcgtgctcaccgtgggcatttcgctgctggcggcggtattctttcccatccgggaggcaaaggcatgagcaaaaatccctatctttatctgtttttgatggccgcggtgacctacgccgtgcgcgtgctgccgctcaccctgctcaagcggcgcatcaccaaccccattttgcattccttcctatattatgtgccctatgtcaccctcgccgtgatgacgttccccgccatggtgcaggccacgcaatcgcccatttccggctttttggcgctcgcggtgggcgcggtggtggcgtggcgcggcggttcgctattcctggtggcggtttccgcctgcgcagcggtgttcctgtgcgaactggcgctggggctataaaagaacgctcgtccgcgcaaaatccacgctgttctaacgcttatacgcggcgcacaggccggtgaggtagcccgcgcaatggtggatgccgccctcgtcgtccagaaaagcgggcaaatcgctttcgcgggagacgggcgcgacggaaaattgcttagaagcgtcgaacccattcacaatcgtgccgcgcagcgcgttccaatcgcgcacagcgtcgtttcccacgccaacgatcaggctttgcccggccacgttcagcccggcgatccattgcaaattggccgtggagagggcgcgaaacgctgcgtcgccccacaggcggtaaaaggcctccgccagcgcggcggcatagccataaatcttggcgtgcccgtggtaccagccgctaaaatgcaaaagcccctgtccggcataaacgcccgcaagcagaatgccgaatgggctgctctggcaagcaggcaaaaaatagccgtaggcaaagcggcgtacgccatcgagccaggcggcgcagcgcgctttttccggatagcactcgcacagctcgataagcggcaggagccagtgcggcctgtgcgcgccctggttgtagtttttgtagggcaaatcccacgcgccgcagtgcaaattggccttttcggaaaacgggaaagaatcataggtgcgaaaatgcccgtacaagccatattccgcctcgctttgcgcaatctggcgggtgaggacccaatctgcgtaagcggccgcctgctccagatagccgggccgccccaggcggtgcagcgcgagcgccgcgcccagcattgccagcaagtcgcgtgtcatccattcgcgcggcggggtttgcatggttgcgggcgcgccgtgggtaatggcgaagcattcgctggcaaagtccgcgcgcagcggcccatgctgcgcaatccagcgatagccccgttcggcccgcgcggcatatccggcagctttatccggccgcgattttgccagcaggcgcgccacgcgcgcgaggaccgccgcggcattggcgcaatttcccgtggagatggcgggattgtgccggatttcgtgcacaaatcccccctcgggccgctggcaaagcgcgatgtagtccgcgccggtagcgagatgcgcttccacgcgcgcgcgctccgcctccgccaaccgcccgctttccagcaaatcgcacagcgcctccagcatgatggcgtggctgctgacctcctgcaattcgctgccgcaatcgcgccagccgccctcggaacgataggcgttggccgcgcgcacatccagctgctcgagcgacacggcataccagctctgctgccagagctgttcgcggcccacgcgcacgggcgaagcgctttcggcgagcaaggtttcgccgctttccacgcgcagctgataatctcccggctgctccaaaccgctgaaatccagcacgttccagtttgcaccccacttttcgccccagggcgcaacgctgcccgcaaaggcttcttcgcccgtgatggcgttgcgcagggaaaaccgcgcgtcgggcgcggcatgggcgatgaacgcgcgcttgtccctgcccacatcgtatcccacctgggaatacacaatcttgcatacgggatccatgttcattctcctatcccaaacgggcccggggccaaagccccgggcgcgacagaattgttttttgcggcgctcattgcgctttgctgcggtcgtaagcggtttgctgaatttccagcatggtttccaggccgatgccattgagcgtggcgatatattcgtcccaccgctcatcgatgccgccatttacgataaagtccacggccatttgcagcgcgtatgtttccacatcggtttccaggaaggcaagctcttcgctctccgcgtccgtatacaccagaccggtggggaagcaatccgctgcatccgagagatattccgtgtagatggcgcaattctccagcttattgtccacctggtcagaaatcaccttgcgcgtgtcttccgcgatgcagggggtgaacggccagtgcggcacggattttaccagatcggccgccacgggataggcgccctcttccgtttgcaacttgcggtactggccatcctccgtcttttccagccaggtgccaatcatgccaaaccgctgttcgatgcctttttccggatccacgaaataatccgcccactggagcgccagctcgacgttttcgcaggcgctggtgatggagatgccgttcaggctcagggcatagatgcggcggctccagtgccgttcgccgtccacgcccaccagcggcgggatggccgtgtagactttttcgccatacacgctgttcaggttgtcctcagaccaatactgcgtgaagcacaccagcttgggcgtggccgtacacttggcctcgaaggcggcctgatccatggtggcgaattcgatatcgatcaggccctcgctgtacagcgtgtgcaggtatttgaagccctctttgtaagcgtcgctcgcgtagcaatacaccaccgtatcgccatcgagataatagcggctgttggagaccgccatgccgaacgcgccaaagaagccgtccaggccggaaatgtggtggctgccggtgaagacgaatgaccagggaatttcgtcgtccacgccgttctggttgtagtcatagcccttgatggcgcgcaggcactcgtgaaattcgtccagcgtggtgggcacttccaggtccaattcttccagccagcccatgttcaccatgaacgcctggttgctgtcttccagcccctccgaaatggcggggatgctgtagatgtgtccgtccgccagcgtggaggagatgcgcagatcgggccgccgctcatagatgtccatcagattggggcaatattcctcaatgagaccgtccagctgcaccaggaacccctgggacgcgtaggaaatcacttcggtgttggaaagtgtgccaggccccaggatgatgtccggcaggtcgcccgtggcaaaggcgagctgcttcttttccgccagggacgcggagggccattcgatccattcgacgatgacgccggtgtcttcctcggcccgcttgaagaaatccatctccgcgaaggcggaggaatccacgcgcttgttgtaggccacggtgaaggtgacgggttccgccagcgggaatatgctttccgccagggcggcgctgggcaacaggcaggcgaggatgaggatgagcgcgagaatccgatgcttcatgggtgttcgctcctttctttcttatcctttcagggagccgatcatgacgccctgaacgaaatacttttgcaagatgggatagaggatcatcaccggcagcgtgctgatgacgatcatgccatatttgatcaaatcggccacgcgctgcatataggcggcgtacatcacgtcttcggtggcctccatgctggccagcatttgggaggcgatcagcagttcgcgcaggcgcagctgcagcgggtaccattcctccgtattgatatagatcatcgcggtgaaataatcgttccaatacgccacgccgtaatacagcaccaacaccgcgatgatcgccttggagagcggcaacacaaagctggcgaaatagcggaagtggctcgcgccatcgatatatgcggcctcgtccatttcctgcggaatgttgccctgcaaaaaggtgcgcgtaatgatcacattgaagatgctcaggctgcccagcaggatcaccgcaaagggcgagcccagcagtcccaggttgcgcaccacgatatacgtggggatgagcccgccggaaaaatacatggggatgatgagcaagatggtgacaacgctgcgccccttgaaataccggcgcgaaagcggaaaggcgatgctcatcgtgagaaaaagggcgatggcggtgccgcacacggtgtaaatcgccgtgttcaaatagctgcgccaaatgatgtggtcgctgaaaatccgctggtagccttccagcacaaagcccttgggccagaagagcacctgcccgttgtacaccgcgttgggatcggaaaacgaagcgatgatcacaaaatacagcggatagagcacaaccagcaaaaccaggctgagcacgccaatgttgattgcgttgaggatccgatcggaagccgttttgcgaatggcgtgtgaacgcatgttctatccctcctaccacaggctggtttccgtcagccgcttgctaacgccattggaaaagcacagcagggcgatgttgatggccgtgttgaacaagccgatggcggcagaaaacgaatattgggcgcgcgtaaggccgattttgtatacatatgtggcgatgatctcgctggtggtgctattcgccgtggtttgcagcataaacgctttttgaaagccgacgttcatgatgctgcccagcttgagcagcatcataatgatgatggtcggcaggatgccgggtagctcgatatagcggatgatgtggtggcggttcgcgccatccacgcgggcggcttcatacaattccgggctgatgccggatagcgccgccagatagacaatcgcaccccagcccgtgttttgccatacatccgaccatacgtaaatatggcgaaacatgctcggctcggccatgaaattgatgcgctcgccgcccagagccacaatggccacgttgacgatgccactgacgggggaaagaaacaggcgcaccatgccgcacagcacaatcacggagataaaatgcggcgcgtaagtcgccgtctgcaccagctttttaaagcgcggatggggcaggatattcagcatcagcgcgagcaggatgggcgcggggaacaccagcaggccatacaaattgagggagagcgtgttccagaccaaagtctcaaaattgtgcgcggtgataaagcgcacaaaatattccaggcccacccagtcgcttcccgtgatgcccttggcaaaggtgtaatctcggaaggcgatttgcacgccatacataggggcatagttgaatatggcgagaaacaccagcgctggcaggcacagcgcataaagttgccattgcaaaagaaaattcctgcggaaatatcgcttgcacgatcgttgcacggccatcctcctctataatacaaaatcgcgtccccgtttgcgctttggccctttcgtgggcgcaggtttagtatacacgccctagcgcgccttgtatatagccatttgattggcgaaaaaaatggatactcctatggctgtgggcgcgcgaacaagccctccgccgtttgcaaaggccgcacactgcgcattaagcctttttgcgcccataacgccattgccatttctttcacagcgcatatccaaattttcctggcgttgcaccaagcggcggggtatgctataatttatgcagtaaaaagtggaggggaaaatgttggctaacctcttttcgcgcctacggcggcaagggcaaaacaaattgttcctccgctatctggcgggctacgtccttttgctgattcccatgctttgctttgtgccctacgccatcggccagctggaggcggccatgctcgatggatatggcaagcaggagcgcgtggcggtggaaaaaacctgcgcttcgctggatgccatggtgctgcaaattatgcacatccaatcgtccatgggagagaatccggcgttttcgcccgcccgctcattctcccccacgcgcgccgtttccctgctcgaagagctgcgtaaataccacctgggcttttacgatatgcagatcctggggctatactattatgaggatagctatatctacctcagttccagcacctaccgcctagatctgttcctggacacttatcaatacgatgcgctcaccaaagagcaatggcgaaaagcgctgaacaaaggggaacaaatcgccatttatccagcggccaacctgaccatgcaggggctttcccaggggcggcaaatcctgtttttgttgccattccattacgagggacaatattcctgtggcgtggtgctcaccgcactgccggaaagcacgctcttgcacctattcggttccggactgggttcgcagggcattgtgctgaacgcgctgggcgaagtggtggcaatcgatccgcagcttcggccctttcaggcggaaatcctggcggcgctatcgccagagggcggccaataccggctgcacctccaggggcaggaatacatcgccacggatctgcccgccgccaacggcctgcgctgcgtttcccttttgcccaccagccaattcctacaccagatcacgcgggagcagcgcgccatgtatggcatcctggcgctgattttgctcgcttccggggtgatcatttcgctgctcatcagcaagcagtatgtgccgctaaagcgctttttacaaacggtatccgagcatatggacgcgaaagaaggcacgctggacgaggcggaaagcatgctgctgcggctcgcccgcgaaaacgagcgcctccattcggagcgcctgccgccggaggagcgctgcgtcagcctgctgctgcgcggccacccgccggagagcgaggaacagcgcagcctgctggaaagctttgccgctggcgcctgcgcatgcgccatcgcggctgtacccagcggcgtcctatgcgaggaactgcgtgcgcgcgtgcaccaggcgttcgcgccattttgcgcccttttgcacctagacaccgtttcgggccgggtggtgatgctcatttccctggaaccgacagaggcggaggcttgccgcgcagcgcttgcccgcgcgcacgcgctgctgcgcgccgcagcgcaacaaaccgtggcgctgggcgtgggcagcctgcaaaaagagcagcgcggcctggccgcctcctatatggacgcggtgtccgcgctggaatgcagccgtatgcagggcaagggaaaaatggttttcagcgatgaagtggtggatgtggacgatttggaatccatatttccttataaagaaatggagttattgcgcgcgcacctgcgcatgggagatatcgaggccatccacgggcttttgatgcacatcctgaaatatgccaaaagtctgaatatgtccctgcacctgggccgctttttctgctatgagttggccaaccaagtgctatcctgcgtgcgggaaatgggtgggaaattcgcgcgccaactgcccgacaacatcaacgcggcgcgcctggcggattaccacacgatcgatgaaatgattcgcgccatgcaaaacatgatgaccaacctgtgccgcatgatcaacgaagaagaaatggaaggccaggattgcgccattggcgaagtgcagacgtacatccgcgaaaacgcctgcgacatcaatttttccctgcaggccacggccagccacttccacatgtcgctcgccaacctgtgccagcgttttaaagaggaaacgggccgcaccgtattggaatacgccacggaaatccgcattgagcgcgccaaagaactgctgctcaccacgcggatgaccgtgcgggaaatcagcgaggcgctgggatattccacgtcctccagtttcatccgccggtttaagcagatcaccggggaaacgccccgagaatttggcaagcgggcggagtgaacctacagccccatcagcacgatgcccgcgcaggccactaccatgccaagcacagcggggcgcgtgagtttttcgtgcagcatggcggcggaaagcagcgtagaaaccaccagcacgccgccattgcacacggtattgaccacggtggaattcattgcatgcatcaaaaacagcaaaaggttggacgcgatggtggccgaaacgccgccgcccagcgcgcacagcgccgcgcggccgcccatgtgaaaggccgggcaaaattcgcgcggcgcgcggaagaacagcaaagccgcgcaggccagcgccgagcccagatacgtaatcgaaatcatttcgccccgctgcgcgccggccgccagttgggcctgcgcgctcagcagcgcgctatacaggccgttggtcaaaaagagcagcgcgcaccacagataaaacttgcgggattgcccagccacagaaaggccgcgcaagttcatcagcacgatggccagcagcaacagcgcgatgcctgccaactgcgccgcgccgagcgcctgccccaggaaaaccgcgttgctcacggcgggcaccagaatgccgccggaaagcaggctgaccatcagcgcggcatagccgccgcagatgcccgcctgcaacagcgaaagattgtacaggctgagtacgagcgcgttcgccacgcccaaaatccaggtagcgggcgaagccgcaaaggcaaatccttccagcgccagcgtggccagaccgatgaacgcgccataaaacacggcataagccagcgctgaggccatgcccgtcgcgcgcggatagcgatccgaatacagccgagaaaacagcgattgcagcgtggctaccacaatcgaagcgcccaagagcaaaatatgcatgaactccctcccgcaaaatcgcattgcaccgcccgctattatagcccaaattcgctttgggcgcaagcgcggcggtgcaatttgcgatcctatgaaacgggaaaagatgcgttaatccgcgaaaagattattcggctgccgccgcggacacgcccaaggcgctttccaaatcctgcagcatgatgtccagcgcggtgatgccgccctcagcggtgtaccacacggtgggatgcgcaagatacacgatgtggccattcttgtaagcatcggtttccatcacgagttcattctccacgatctcctgcgcgagcttggcgccttcggtggcaatggccgcgtcgcggtcgagcacgaagatatagtcgggattgagttccacaatcagttcaaaggaagactcgttgccatgggtggaggtcacgtcgccatcgcccaggttgtcaaagccgatttccacgctgatcatggagcaacggccgtcgctgcccagcacgttgaagctgccgctggtgcacaggccgacgatggcgttctggccctcggcaaaggcggccagcgcggcgatgcgcgcgtcgaagtccgccatcaacgcgtccacttccgcctccaggccgaacagggaagcgatggtcgtggcgttctggcgcacgctttccaccacgccaatttccgtatcggtggccagataaatcacgggcgcgatctcgctcagcgcgtcataggaggaagaaaggcggccgccgatgaaaatcacgtccggctcgctggccatcacggcttccagatcggcctccttaatggtgcccaggttggcgatttcctcattggttacataggcttgcagataatccagcgccgtggtggccgagccgaccacgcgatcgcccacgccaaggcggtcgaggatgtccagcgaggccatatccagcacggcgatgcgctgcgggtcgtagggcacggcgagttccatggtttcacggttgccattgagcgtggaaatggtgatggtttcggacgcagcttccccggcgaatgccgggagcgccagcgcaatcatcgaaaggcaaaggagcagcgagaaaaatttcttcatggttgttcctcctgaatgtttttggccgtcgttggcaaaatgaagggcttcgttggcaagccgcggacttgtcaacggtcaattgggcggcgctggccgccttgcggatcgcggcaatgcgagaatggattcacctccgtttctaaagggaattgtgcctagtaatatatggaaaggggcttgcccgcgatctcgaggatttcaaaatccactttataaatgttggaaagggtttccttcgtcatcacctcttccacggtgccgaacttggcgatctttccatccagaaacgcgcagatataatcggaataaaacgccgcgtagttgatttcgtgcagcacgaggatgacggtcttgcccagttcatcgcacaggcggcgcacggttttcatcatattggtggcatggtagatatccaggttgttggtgggctcatcgagcagcacatattcggtatcctgcgcgatgaccatggcgatgtatgccctctggcgttgcccgccggaaagctcatcgatgaagcgatcctcgaattcccgcaactccatatagtcgatggcctgatcgacgattgcctcgtcctcgggcgtggtgtggttgcccgaatagggaaaccgcccaaaggtcaccagttcgcgcacggtgagtttcatctggatgttgttcgtttgcgtgaggatggccagccgcttggccagctccttgctcttccaatgggcaatatccgtgcccttgaaatccaccaggccgccatcgcgcgcgatcaggcgggaaatgatgcccatcaccgtggatttgcccgcgccattggggccgatgagggagatcaccttgcctttgggaatttcaaagctgacggaatccacgacggctttgccatcgtattttttggtgaggtcttgcacgatcataaattacggcctcctgttgcgcaaaagcagataaaggaaatacagcccgccgcccaccgtgataaacacgctcacggggatggcataggtaaacacgtgctccacgatcaattggcccgccaccagcacgatcatgccgaacagcgtggagccaagcaccagctggctgtgccggaatgtgcgcagtagctggcgggacagattggcaatgatcagcccgaggaacgatatggggccaaccatggccgtagccacggcaattgccagcgtaacgcccagcagcaggcggcggatggtgcggtcgtaatccacaccgaggttggtggcctgcgccttacccagggtgatcacgtcgaggagcgccagatccttgcgcaggaaaaagagaatgcccgcaagcagcaccacggaaaacacgatgatttccgaattgatgttgctgaagctggccaccagcgtggcgagcagggaatcgtattcgttgggatccatcacgcgagtcatcgtggtttggatgctggagaagaacgaggtgagtacggtgccaatcagcagcacatagagcacattgtagcgcgtttttttaaagagatagctgtagattaccgtggccaccaggcccatcagcaccagatccaccgcaaaggacgcgttgggattcatggcgagcacgctgcccgaacccagcgcgaacaccacggcggtgtggatcagcgtgtagagcgaattcatgcccaacagacagggcgtgacgatggtgttgttgatgatggactggaacaccagcgaggccccgccgatggcaaaggcggtgatgagcatgacgatcagcttcggcgcgcggatgcgcatggagtaggccagcagtttcgcgttgccaaagttgacgtccacggtcatgtaggccgccgccgccagcaaaaccagcgccgccatgatgcagagtttcctgcggttggaccgctgcgccttggtcagcattcgcccgcgc

SEQ ID NO: 152 - DNA, 6114 bp, Unknown
  16S sequences of unknown bacteria
cagcgtcagatgtgtataagagacaggttctttcatgtacgaattctgcaaaaggaggcagcgtatatcatgggtgtggatattaaagacctgctgccgtcggacgatgagggaagacttcgcatcatccaggaacaggtacccggaaatcagatttccctggcgcatatcatcggcggcccgcagccgatcatttatcaaaagttgggtctgaatcccgatatcgattatgatggtgcggccatcggcattttgacggtggtaccctatgaatcttcgatcattgcggcggatattgctacaaaagcggcggatatctatttgggctttgttgaccgcttttccggaacactgatcatcaccggagagttggccgaagtgaccaccgccgtggacgagattgtccgctatttccgcgatgaaatgggatttgcggcctgccgcattaccaagcggtgagcgctatcatgaattgaaggacggagcgtatgcgcaaaattatttttattgggcgcagcgaatgcggaaaaacatcgctgacccaggccatgcgcggtgaaacggtattatcgatactcccggtgaatatgccgaaacgaaccgcttgggcggtgcgctggcgacctattcctatgaggctgatgtggtggggctgctcctcagcgcgatcgagccgtattccctgtatcctccctcggttaccgtgctggccaaccgcgaggtgatcggcatcgttactaaaattgatcatcggctggccaacccgaagcgggcggcagaatggctgaaactggccggctgccgtaagattttttacatcagttcctatagcggcgaagggattccggaattgctggaatacctgcgcgaggaaggggacgtgatgccctgggagaaagcaaaagagcagatggacgcattcaaccgcgagggcggaagctacagctctgtggatgagaagatgacggagcaggacgagcttgagaaaaagcgggaatttaaaaccgtggtggtgggcgaggatgttcttggccgcgagatcacggccgatggggaaagcgttgttccttccaaagacgtgccagccaaaacccatgtgcgctttaaaaatgaactgtaaaatctccggacagcaggattgcagtccggagattttgccccattcagacaaaaaacatcccgtcccctgaacgcttcaggggacgggatgcagcttttttggaaaagaacttactgagcagacaccaaacgggcagtatcctgcgcaatcaccagctcttcgttggtggggatcaccataattttgacacgggaatcgtcagtcgaaacaatggcttcctcgccgtgcaccaggtttttgctgtggtcgattttcacgcccatgaattccaagccgctggcgatcttctcgcgcagctcgggggagttttcacccacgccggcagtgaagatcagcacgtcgatgccgttcatggcggcagcagcggagccgatgcgcttgtgggtcttgtagcagaacatatcgatggccagagcggcgcgctcattgccttccgcagcggccttttccagatcgcggaaatcggaagacacgccggacacacccagcacaccggacttcttgtttagaacgttcattacatcttcgatggacatgctgtggttttccatcaggtattcgatgatggaaacgtcgatggagccgcagcgggtgcccatgggcaggccgtccagcggagtgaagcccatggaggtttccatactcttgccgccggcgatagcgtccacggaggagccgttgcccaggtggcaggtgacgatcttcagggtttcaatgggctggcccagaattttggcggcgcgcttggacacataggagtgggacgtgccgtggaaaccgtagcggcggacatgatcgttgacgtaatactcataggggatggcataggtgtaagcgcgggggggcatggtctggtggaacgcagtgtcaaacacggcgaccatgggcacgccgggcatcacttcttcgcaagccttgataccggtgatgttggcggggttgtgcaggggagccagggggatgcactcttcaatggctttcataacatcgtcattgatcaccacggagtgggcgaacttttcgccgccatgtaccacgcgatggcccacggcgtcgatttccttcatggagctgatcacgccgttttcgggatcaaccagggtattcagcacggtctggatggcttcggcatgggtgggcatggccacatccacagcgtccagcttcttcttgccgtcgagctggggcttataggtaaatttgccgtcgataccgatgcgctcacacaggcccttggccaggagctgctccgtttcagggttcagcagctgatatttcagggaagagctgcctgcgttgataaccaaaatgttcatcgttcgatctccttttttctcatgtagcgacgcgggaaacgttgcaaaatgcgccagaatagaataaaataaattacagtattattgtagcccattttatgtatggaaacaagtgttaatttgcagattatacgctgcaggagataaatttttcatgaagattgtcggaattttaacagagttcaatccgtttcacaacggacatgcatggttgttcgcgcagctgcggcacagattgggagatgacgcttgtatcctgtgcctgatgagcggtcagtttgtacagcggggcgaaccggccatgctgcgcaaacacgtgcgggcggaagctgcgctgcgctgcggagcggacctggtaatggaactgccactgactcgggcgctttcttcagcggaagggtttgcgcggggggctgtgtacctgatgcagcgtaccgggtgtgtgacccatctggcctttggaagcgaatgcggtgatgcggcggcgctggaacgggtggcacagtgtctggattcggaactataccatgccgggctgcggcgttttctcaacgagggaatgtcctttgcggcctgccgtcaggcagtggtgcgcgggattctcggcccggcggatgcggcgctgctgtctggcgccaacaacaacctgggggcagaatatctcaaggcagtgcggcagttgggatggtcctgcaatgtgctgacggtaaaacgccgcggcgccgcccatgacagccctgacgcatcggaatactgctccgcttcggcggtgcgccggctcatggcagcgggagactggaaggggatggaaaaggccgtgcctcctgctgctgcagacctttaccgtgccgaatgtgccgcgggccgcggcccggtgactgcggcggcggcagagcgcatgatcctggcccggctgcgcactatggacgcagcggcgtttgcccgtctgccggattgtacagaggggctggaataccgctttctccgcgcggtccgcagcgcatgttccctggaagagctgctggggcaggtgaagaccaaacgttatgcgctttcgcgcctgcggcgcatggcgctgtgcgcctggctaggtgtggaagcgggcgatgccgttcaaatgcctcagtatctgcgccttttgggctgcacggagcgggggcgcgcagcattggggcagatgcgcaggagggcgcagctgccggtgctggtgaagagtgcagatgtgcgctgcctttcggaggatgcgcagcggcagtttttgctggaagcgcgcgctggggagctttatgggctgctgtatccggatctttccagcgcaaaacccggcgcagaatggcgcacagggccggtagtggtgaaagcgctgtaaaaaaagaaaaattttgaggttcaagtggggatttcagggaattgtaaccattttgtaaccattgcgtcactgatttactttctttttgcgcagaagtgccgtattctatagccgagcaacactgtccctgggagggaatcatatgaagaaaataccgattttgacgacgctggctgcaagcctgtgtctgtgtgcgctgtccgcctgcggcggagcgccgcagacacagatgatgaaggctgccgctgagggtgaaggcggcgctgcggtgcgtctcaccagccagcttcacgaaaaagaatataaaagcggtgatgggaaggtacttcttgggaagtattcttacacgctcccggccatggccggggcggccgatgacgacgcatcggccgccgccgttgatgtgttcaacgacgatatggcttccatactggaggaggaatccagcagctgggacgaggcaatgaaagaagtggaagaactgtattcggatttcggttcggacagttggaagagcggcatgcactggatcgatgaaatccactatgaaagctgccagacggataccttggtcagccttcgtttcgagcactatgtattctccggcggcgctcatggttatacttattatacaagttatctttttgcgcagaaggaaggccgggaagtcactttggccgatatgacggacgacgcgcaaacgctgtcccaggctgttacagatgagatcctgcgccagattgaggaaaaggatctgaacatgcagtacggctattgggacgattatgcgatctatgtggctgaatggatggacggctatagtacttattttaacgacgcaggcgaactggaaattatttttccggcctatgatctggcttcttatgcggccggagcgcagacttttgtaatcccgcagagtgtatatgccccttgcctgaatgattatggcaggcttttgctggggatttcctgagaaatgaaaaagtgcaaagccgcgccccggagacgaaacctccggggcgcggcttttttgtgtggcagtggaatctttttccgcgaaccaattattctgtgatgtggacgtggttgttgatgtgatcggaacagtagcagtaatagccggcgcatttggagcagtagcggaactcaaggttgggatattcggtatcggttttgccgcacacagcgcatttgtggtggtatcccttgtctttcatttgttctttgactgcttttttatagtgaatggtttttggagaggcctgatgtgccgcccggccggtggtacggcgcagccagcccagaagtgcttcgccgaaaaagaggaagaaattgagcagggcgacaatggggagcagcgcgctgacgaaattcagctgcgccagggctgcaacgatatcaaaggcgaacaaggccgcatccagccatgccagccatttgattttgaccgggagaatgagcagcagcaccgtggcgtcggggtagagcatggcaaaagcaaaaaacatggacatattgatgtaatatgtgctgcttaacgtccagctgacgccggtgatgagggaggcggccacaactgcgatcagggtcagcacaaggccgccgaaatagtagatgttgaatttggcggtgccccactcccgctccagggtgctgccgataaagtaatagaaaaacagcgaaatcagcagccagaaagggctgaaattcgtcggtacgaaaatgaaggtgaccagacgccagatctcgccgtgcagaagggagttgagattaaaggtcaaaaattggatggagctggcgttgtatcctgtgagcaggtagagcagatagacgaccaccgtgccgatcacaataatcttcatcagattggggatgccgaagccgggatgctgatagcaaaattcatcgattttgcggttgatgcggttcaaaaaaatacacctccgaatactgcggaaaatggacgcagcaaatgtgcggattttccaatcagattaattttacacgaaaacaggctgcgtgtcattaaaaaattgtaaacaagcgaggttttcttgaaaaattttggccgaaggatattttgtgcttcccaaaaatacacaaatatgttatactaacttaacactgcgggcaaacggaagtgtttgcagactcgggaaaatcgtttgaaccaataagagaaagaatccagatcattgactgtacatataaaggagaagttgctatgaaaaacagagttttcacatcggaatctgtgacggagggacatcccgacaagatctgcgaccagatctctgacgccgtgc

SEQ ID NO: 153 - DNA, 27482 bp, Unknown
  16S sequences of unknown bacteria
cttcagtgatgtttgcaatacttgcaaacatcgcagcttgcgctgccccgcgctatgcgcggcttcgatattatgacgtcaggacacgatataacgttagtttgtaattgcacgttatcttaccgtgtccgcgagaatgacgcaaagcgtcattctccgacgcaagcccgacattgcgctatgcgctgaactctaatgtgaaactgagattgaacatggtataacatcagtgtgtaaatgaataaaacgtatgcgtgaccggcggttaaagtggaacaaaccacgatgggagcgtgtacggtatatgcacccgcaatcagtttgcccgtgcgccgcaccgcctgggcagagcttatttttcggataagtctgcctttttgctttttttcggcggcggacgcaaaggaaagaaaggaacggttactataatgaagaaggttgcagttatcatgggaagcgcaagcgatcttgcagtcgccgagaaggcgacagcgcgtcttgcatctctcgggatagagtatgaggcacatgtttattccgcgcaccgcacgcccatcgaggcgcgcgattttgtgcttcacgccgaggaaaacggcttcggcgtaataatcgcgcttgccgggatggcggcgcaccttgcgggagcgcttgcggcggggtgcaccctgcccgttatcggcgtgcccgtgaaatcgtcaaatttgaacggcgttgacgcgcttctctcgaccgtgcagatgccgacggggattcccgtggcgacagtggcgatcgacggagcagccaatgccgctttgctcgccgcgcagatacttgcgctttccgacagtgagctttccgcaaagctgaagaagcttcgagcggaggaaagcgcggcggttcttgagaaggaccgtgagatcgcggcgaagctcaacggctgaaaaaggtaagacaagctgcagcgtgaccgagaaggcgcgctgccgcctcgaatataaggaggatacgaaatggaaaagagaactcagctttacgaaggcaaggcaaaaaaggtttatacgaccgacgatccggagctttacatcgttgattacaaggacgatgcgaccgcgttcaacggactgaaaaagggcacgatcctcggcaagggcgagatcaacaaccgcgtgacgaatcaccttatgaagcttctcgaaaagaacggcattcccacgcattttgtcgaggagctttcttcccgcgaaacggtggtgaagaaggtgaagataatcccccttgaggttatcgtgcgcaatatcgcggcgggaagccttgcaaagagactcggtctcgacgagggagtaaagctttcgtccaccgtcctcgaatactgctacaaggacgacgcgctcggcgatcccatggtcaacgagtatcatatcgcggcgatgaaatgggcgacgaaggaagagatcgcactcatcgcatcgtattctctcagaataaacgaaatacttaccgaatacctgaaggatgcggggatcgagctgatcgatttcaagcttgaattcggcaagacctccgacggcacgatcgtgcttgcggatgagatatcccccgacacctgccgcttctgggatataaaaactcacgaaaaactcgacaaggaccgcttccgccgcgatctcggcggagttgaggacgcatatcatgagatactgcgccgtctcctcggcgagtgacattgatgcacccggggagaaatcgctctccgggggcgttttttccgaaaagcatacgcacgcccggcacgcagccggcgcttaccccacagataaggaaagggcttcaaatggcagaaatcagagaagaatgcggcgttttcggcgtgatcggtccggagatatccgatgtcgcatccaccgcatattacggactcttcgcgctccagcaccgcgggcaggaaagctgcggcattgtcgtgaacgatgacggcatattccgagcgtataaggatgtcgggcttgtgaacgacgtttttaccgcggaggcgatggcggagctcggcatgggcacgatggcggtcggtcacgttcgctacggcacgaccggaagcagaggaagaacgaacgcgcagccgatcgtcgtcaaccatataaagggacgcatggctctcgcgcataacggcaacctcgtcaactccttcgagctgcgcgaggagcttgaaatggcaggctccatattccacacaacgagcgataccgaagtgatatcctatctcatcacgaaggagcgccttgccgcaccgtcgatcgaggaggcggtaaaccgcgcgatgtacaggcttcgcggtgcgtattcgctcgtcataatgtctccgtcgaagttaatcgcggtgcgcgacgagaagggatttcgcccgctctgctacggcagatgcgacgacggacgctatgtcatcgcgtcggaatcgtgtgcgcttgataccgtcggcgcacatttcgtccgcgatctcgagcccggagagatagtggtgttcgacgggaaggacgtccgctcgataaaggatcactgctcggcggcgaaaaagtcgctctgcgttttcgagtatatctactttgcgcgccccgattcgtttatcgaaggggtgagcgttcatgaggcgcggaaacgcgccggacgcttccttgcggacgagcatcccgtcgatgccgatatcgtgatcggcgttcccgattccggaatagacgcggcaatcgggtattccgagagatcgggcatcccttacggaatgggatttatcaagaataaatatatcgggcgcacgttcatttcgcccggtcaggcgtcgcgcgaggataaggtcaagatcaaactcaatccgatagcctcgaccgtccgcggcaaacgcgtgatcatgatcgacgattcgatagtgcgcggcacgacctgcgcgcgtatcgtaaggcttctgcgcgaggctggagctacagaggtgcatatccgcatatcggctccgccctttctaaatccgtgctattacggaacggatatagattcgcgcgatatgctgatcgcgtgccaccatacgatacccgagatcgccgagatagtcggcgcggattcgctcggctacctcagcgtagataacgtggtccgcctggcgggggacgatagatgcggcgatttctgccgcgcctgcttcgacggcgtgtaccctacagacgtgccgtcaagcacacagcgcgacagattcgagcgcaagatatcggaaaaggacaatctgcagtaagaacttcggagggagggggacattttggatataacattttcaccgacttttatcgttttggtcgtaatactttggattcttgccatagcggtggtgcttttttgcatatggatagaccgttcgcccgacggcaagggaaaattcggcgagatccttgtcggttactttctcaaaaagctcggaccggagtataaaatcatgaataacgtgatgcttcggaataacgataaaacagcgcagatagatcataccgttgtttcaccctacggcgtatttgtcatagagacaaaatcgtatagcggaaccgtgtacggtaagcagaaggctaacgagtggacacagaatttgggtggaagaaagcgttacttcatgaatcccatacatcagaattacggtcatataaaagcccttcaaagcataatcggcgatgatgttcccgtttattcgattatcgcattttccggcttcggcaagctgaaaacagagaaaggcgaaactcctgttgtatacttcgtcgaacttcccgacgagattaaaaagcataaggaacgtgtgatcggcaacgaacggtgcggtcggatcgtttcaattatccgcgatgcgaatatttcttcgataaaagcatcaagaagccatgtcgatgaaatacgcagaacggaagaaaaaacggcgagcggtatatgcccgaggtgcggttcaccgcttgtaacccgaagcggcaagcgcggcgaattcatcggatgctcggcttacccgaagtgcagatttacaaaatcacagaagaagtcgaagaattatgttccaaagacacctgaacccgtaacagctaaggcggaagaaaaaacggcgagcggtatatgcccgaggtgcggctcaccgcttgtaacccggaacggcaagcgcggcgagttcatcggatgctcggcttacccaaagtgcagatttacaaaaaacatatgacctccgccgtgcggagataattcattgaaacgaggtgccaaatgaaaagctacagcgaaagctataaagcggcgggagtcgatataaccgccggataccgtgcggtcgagcttatgaaaagccacgtcgcgtccacgatgaccgagggcgcgctttcgggcataggaggcttcggagggctgttcgtcccgccgattgccggaatgaaggagcctgttcttgtctccggcacggacggcgtgggaacgaagctgaagcttgcgttccttgccgaccgccacgataccgtaggcatcgactgcgtcgcaatgtgcgtgaacgacatcatctgcgccggcgccgcgcccatgttcttcctcgattatatcgcgctcgggaagaatgtgcccgagaaggtcgccgatatcgtgtccggcgtcgccgagggctgccgtcaggcgcgatgcgcgctgatcggcggagaaactgcggaaatgcccggcttctatcccgaggatgagtacgatcttgcgggattttctgtcggtatcgttgaccgggcgcagatcgttgacaattcgaaaatgagagcgggcgacgtgcttatcgcgcttccttcgtcgggcgttcactcaaacggcttctcccttgtgcataaggtttttcacacatcggagaaaaatatctttgcggaggtttctcccgacctcggaatgtcggtcggagatgcgctccttaccccgacaaagatctatgtgaaagcggtgcttgagcttcttccgaaggtcgaggtctgcggcatttcgcatatcacgggcggcggattctacgaaaacataccgcgttcaattcccgacggactcggcgcggtgatcgaccgcggcgcggtccgcgtgctgccgatattcgacatgatcgcgcgcacgggcaatatcccggagagggatatgttcaacacctacaatatgggtgtcggaatgagcattgccgtccatgcggaggatgtcgagctcgcacttgagatactccgcagtgccggagaggatgcatatgtgatcggcgagattgccgagagcgaagacaagataacgataaaatgagcgaaaaaataagaattgccgtgcttgtgtccggcggcggcacgaaccttcaggcgctgatcgacgccgagaaaagcgggataataaagtcgggacatatcgtccgcgtgatatcgaacaagcccggcgcttacgcgcttgagcgcgcggcggcggcggggatcccttcggcgaccgtcgtttccgcggggaaggatcggcgcgaattcgagaaggagctgctcgaatgccttgatgaggcgcgcgcgcagatcgtcgttcttgcgggatttatgcgcgtgctttcgccggagttcgtctcgcattttccgaggcggatgataaacgtccatccgtcgctcataccgtcgttctgcggcgacggattttacggactccgcgtccatgaagcggctctcgcatacggcgtcaaggtcacgggtgcaacggtgcatttcgtgaacgaggtcaccgacggcggagagataatcatgcagaaggcggtcgaggtaaaggacggggacacccccgaaatattgcagcagcgggtcatgcgcgaggctgaacatataattctcccgcttgccgttgaaaaaacggcaaaggcaatggcgaacgggtgatacggacggcgcgcggcgcacggtacaccgtgcgctccggcgcaatgaaaagcgcagagaatatgcagaacccagcagcgccggagcgttcagccgcctcggcggctgcgccgcgcggacgcgggaatgaagctgcaccgaaaacggaggagatgtaatgaacatttacgaaaagaaaaatatcggagatatacttgcagaatgcgcgtatcccggacgcgggatcgtcgcgggactttcggaaaacggaagatacgcggcgtttgcgtatttcataatgggacggagcgggaacagccgcaaccgcgtgttcagatcggacggcgagaccgtgacgatatacccgttcgacgaatccaaggtgtcggacccctcgctcataatctacagccccgtgagaaaggtcggcaatcgcctcgtcgttacaaacggcgaccagaccgatacggtgtgcagcttcctcgaaagaggatcgacatttgaggcggcgcttgaaacgagagaattcgagccggacgcgccgaacttcacaccccgcataagcgcaatgcttgaactcggcaaagacttctcctaccggatgagcatactgaaaagcgcggacgaaaacggaagcgcgtgctgccgcttcacctacgttttttccggcgtacccggactcggacatttcatccatacatacgcgggagacggaaacccgctgcccacattctcggcggatcccgaaagagtgaccgtgccggacagcgcggacgagctgttctcctcggtgtgggaaaacctcaatgaagaaaataaaatatccctcgttgtcaggtataccgatctcgaaacgggagagaccgaggagcgcctcgtaaataaaaacgcctgagctttttacgcaccgacccggacgacatacccgatgatgcacggctttgccgtcccggatcggatgcgatttcacatgaaaggaaagctttcgcacggcgaaagcgcaaattcagatatgaacgacagagagaaatacatttcccctttttccacacggtatgcgtcggcacagatgcagcacattttctccgaggatttcaaattccgcacatggagaagactgtggatatcgcttgcaaaggcggagaaaaagctcggtctcgatataaccgacgagcagattgcggagcttgaagcgcaccgcgacgacgtcaatttcgaggtagccgaagagcgcgaacgcgaggtaagacacgacgttatgtcccacgtttacgcatacggtaaacagtgcccgaaggcggaggggataatccacctcggcgcaacatcgtgctacgtcggagataacaccgacgtgataattctgcgcgaagcgtcggagatcatcctcaaaaaggcggcgcaggtcgtgcgcaacctttccgcgttcgcagagaagtacaaggctctgccgtgccttgcatacacgcatcttcagcctgcacagcttacgacggtcggcaagcgcgcgacgctctgggcgtatgagctctgcgacgatatcgacgagcttgaacaccgcctttcgaagctgaagctgctcggctcaaagggcacaacgggaactcaggcaagctttatggagcttttctcgggagacgaggaaaaggtgaaaaagcttgaatcgctgatcgccgaggatacgggctttgacggctgcgtatgcgtgtccggtcagacatattcgagaaaggtggatgcgaatttccttgccactctttcgggatttgcgcagagcgcatataaatttgcgaacgatcttcgcatacttcagtcgtttgaagaggtcgaggagccgttcgaggcgcatcagatcggctcgtccgcgatgccgtacaagagaaatcccatgcgctccgagcgtatctgcgcacttgcgagatacgtcatctgcgattcgctcaaccccgcgtttacttctgcgacgcagtggtttgagcgcacgctcgacgattcggcaaacaagcgcatctccgtggcggaagcgttccttgcggtggattcgatactcaatatatacatcaacgtgacctcgggacttgtggtcaacgggaagatgatcgagcggagagtgaacgccaagcttccgtttatggcgaccgagaatatcatgatggaatcggtgaagcgcggcggcaaccgtcagtcgctacatgaggcgctgcgcacacactccattgcggcggcaacgcgcatgaagaaggagggactcgactgcgacctcatagagcgcatcgccgccgatcccgaattcccgcttacgatcgaggagatacgcgaccaaatcgatccgcgcaagtatataggacgctgcccgtcgcaggtcgacgaattcctgcacgatgtggcgcatccgatcaccgcaaaataccgcgagcatatcgaatccgagcttaaagtctgagagacaccatcttatctgaacgaaaggaagctttcgccgagcggaagccatggaaacggaatgaaggaatttgaactgaaatacggctgcaacccgaatcagaagccctcgcgcatctacatgaaggacggacgcgagctgcccgtggagatactctgcggacgtccgggatacataaactttctcgacgcattcaattcgtggcagcttgtgtcggagataaaaagcgcgctcggacgcgcggcggcgacgtcgttcaagcacgtcagcccgacctcggctgcgatcggggagccgatgagccgcgaactgaagaaggcgtgcttcgcggacgatgtcgagggacttgacgattccgagcttgcgacggcttacgcccgcgcaaggggaaccgaccgctgctcatccttcggagattggatcgcgctttccgacgtctgcgacgtgacgacggcgaagatcatcaagcacgaggtgtccgacggaataatcgcgcccggatatgagccggaggcgctcgagatactccgctcgaagagaaagggcaattacaatatcgtgaagatcgatccgtcatacgttcccgagccgatcgagacgaaggacgtgttcggcgtgaccttcgagcagggacggaacaacttcagaatcgacagggagctgttcaacaatatcgttaccgtgaacaagaacctgcccgaggcggcggtgcgcgacctcataatctctcttataacccttaaatatacgcagtcgaactccgtgtgctttgccgccggaggacaggcgatcggcgtcggcgcgggacagcagtcgcgcatatactgcacgcggctcgcaggctccaaggcggacgtttggcacctgagacagcatccgaaggcgcttgcactcgaattcctcgatacgcttgcaaagccggagcgcgacaacgccgttgacttctacctttcggatgaattcgagaacgatgacctcctctggagaggtatgttctcacgccgtcccgaggtgctgacgagagaggagaagcgtgaatacctcgattcggtaacgggcgtgtcgctcggctcggacgcattcttcccgttcggcgacaatatcgagcgcgcggcgaaaagcggcgtttcctacgtcgcacagcccggcggaagcgtacgcgacgacaacgtcatcgccgcctgcgacagattcggcatgacgatgtgctttaccggcatgagactgttccaccattgaccgaaaggaagtattccatgaatatacttgtagtcggcggcggcggccgcgaacacgcaatcatcaaggctcttaaaaaatcgcccgacgcggataagatatacgcgctcccgggaaacggcggaattgccgcggacgcgcagtgcgtgccgatctgcgcgaaggatatccccgcgatcgtggatttcgcaaagaacaacaccatagactacgccgttgtggcgccggacgatccgcttgtgctcggagcggtcgatgccctcgccgaggcggggataccctcgttcggtccgaccgcggcggcggcgcagatcgaaggctccaaggtgttcgcaaaggagcttatgaagaaatattcgatcccgacggcatcctatgaggtctttgacgatcccgaagcggcgcttgcatatatagaaagcgcgcccgttccggcggtcatcaaggcggacggacttgcgctcggcaagggggtcgtgatcgcgcagacaagggaggaggctgccgaagcggtaaactccatgatgcgcgacagaatattcggcgagagcggcgcaagaatagtgatcgaggaatttctcacgggaccggaggtctctgtgctctccttcaccgacggcaagaccgttgtcccgatggtctcgtctatggatcacaagcgagcgggcgacggtgacctcggtccgaacacgggcggcatgggaaccgttgcgccgaacccgtactatacggaggagatcgcgcgggaatgcatggacacgatctttcttcccacggtgcgcgcgatggctgccgagggcagggaatttcgcggctgcctttatttcgggctgatgctcacccccgacggaccgaaggtgatcgagtacaactgccgcttcggtgatcccgaaacgcaggtcgttctgccgcttctcgagtccgaccttctcgatatcatgagacatacgacaaacggcacgctcgacgaagccgacgtatcgttctcggacggagcggcttgctgcgtcgtccttgcctccgacggatatccgaaaaagtacgaaaccggatttgaaataaagattccgggcgatattcggtctcaggtctacgttgccggagccgtgcttgacggtgatgttctccgcacatcgggcggacgtgtgctcggcgtgagcgccgcggctccgactcttgcggaggcggtggaaaaggcgtatgccgatgccgacagaatagaattcgaaaacaaatacatgcgcagagatataggaaagcgcgcgcttcaggcgaaatgaccgccgcacgatgccgcaggactgttccgcgattcggcgtgcggcgcgcaaagagacgatccacgaagaaaggaagctttcgctcgggcgaaagccacggttgaaaatggtatacagaatatattccgaaaagaaagcgtcggtgtcatcccacgccgccgcactctgcgccgatatacggacgcttctcggcataccggggcttgagaggctccgcgtgcttcaccgctacgacgccgagggaataacgaaggagcttttcgacgaaagcgtaaagacggtgttctccgagcctgtgctcgacgacgtttgcgaagaattgcccgacgccgaccgcgtgtttgcggtcgaataccttcccggtcagttcgatcagcgcgcggacagcgctgcgcagtgcatccgcctcatgtcgcgtggcgaacgcccggagatacgcaccgccgaagtgtatcttctgtacggaaatctcaccgatgacgaattcggcgtgataaagaaatatgtcataaaccccgtcgaggcgcgcgaagcggcgctcggtgttcccgaaacgctccgtatctcgcatcccgaacccgcaccgatcgaaacgctcgacggcttcacctccatggaggacggcggcgcggcggcgtttatcgaaaaatattcgcttgccatggactgcgcggacgtgctcttctgccgcgattacttcgcgtcggagaagcgcgatcccacgatgaccgagatccgcatgatcgacacatattggtcggatcactgccgccataccacgttcctcacgacgatcgattcggtcagattcgaggataaagaagtcggcgatgcctacgaaagataccttgccgcaagacgggagcagggacggacgaaggacatttgccttatggatatcgcaacggcggcgctcagatcgctgaaggcacagggaaagctcccgaagcttgacgaatccgaggagatcaacgcctgcaccgtgaagttcaccgcaaagacggacggcggcgacgaggattggcttctcctcttcaagaacgaaacgcacaatcacccgaccgagatcgagcccttcggcggcgcggcgacctgtatcggcggcgcgatccgcgacccgctttccggacgcgcgtatgtttattccgcgatgcgcgttacgggcgcggcagaccctcgccgcagcgtagccgagacgatccccggcaagctgccgcagcgcaagatcgtgacgacggcggcggacggatacagctcatacggaaatcagatcggactcgccacgggtcaggtccgtgagatataccacgacggctacgccgcaaagagaatggagatcggcgcggtgatcgccgccgctcccgcggaaaacgtgcgccgcgaacgccccgtatgcggcgacgtcgtgatactcgtcggcggacggacgggacgcgacggctgcggcggcgcgaccggatcgtcaaaatctcatacgaagaaatcgctcgaggtctgcggagccgaggttcagaagggaaacgcgccagaggagagaaagctccagcggctcttcgcctcacacgatgccgcacggcttatcaagcgctgcaacgacttcggcgcgggcggtgtctccgttgcgatcggcgagcttgcggacggacttgacataaatctcgatctcgtcacgaaaaagtacgacggactcggcggcaccgagcttgcaatatcggagtcgcaggagagaatggctgtcgtctgcgcaccggaggacgcggagaaattcatcgcccttgccggaaaagaaaatctcgaagcgaccgtcgtcgcccgcgtgaccgataccgatcggcttacgatgacatggcgcggcacgaagatcgtcgatctttcgagggatttcataaactcgaacggtgctccgaagcatatcggcgcagtctgcgccgcgcccggagattttgcgaagaaatccgagggggattttacgtcgcgcatattcggcgtcgcttccgacctcaactcatgctctcagcgcgggcttgcacagcgcttcgattccacgatcggcgcatcgaccgttctcatgcccttcggcggaaagaatcagataactccgaccgaggcgatggtgaaccggatattcgccggagagagaaggacaaagagcgcatcctttatgtcgtggggcttcaatccgttcatcacggagaaaagcccgtaccacggcgcatacctcgcggtggtagaatccgtggcaaagctgatcgcggcgggcgcttcgttcgaggacgtctacctcaccttccaggagtactttgaaaagcccggcacggacgagcgcagatggggcaagccccttgccgctctgctcggcgcgttcgacgcgcagaacgacctcggaatcgcgtcggtcggcggaaaggattcgatgagcggatcgtttgagaagctcgacgttccgcctacgctttgctcgttcgccgtgacgacgggcacggaggacacggttctttctcccgaattcaagggtgcgggacaccgcacggtctggctccgcccgagatacagcggcgcgctgcccgtgaaggagtcgtttatcgccctgatgaacgccttttacgggatgaacgaaaagggcgatatccttgccgcatcgaccgtgaaatactccggctgcgccggcgcggtcatggagatggcgttcggaaattccgtcggattcgactttgccttcaccgatgccgacgctctcttcggctacgcatacggctcgttcgtcgccgagctgcgcgacggtgcctccgtccccgacggcaattgggaatgcatcgagctcggcacgacgtcggacaccgatgcgcttacatatgcggacgaaagcgtgcccctcggcgggcttcttaaagcatacgacagcgtgctcgaggacgtgtttcccgtgaaaactcccgagatcgccgcaccgatctgtgacttttcgcacgccgcatcggagagagtgcgccccgtgcaacatttcgccgcgccccgcgcgctgatcccggtgtttcccggaactaactgcgaatttgacacggcgcaggcgctctcaaaagcgggagccgttcccgaggtgttcgtgataaacaaccttaccgcgcaggggatcgcggacagcgtgtcggaatttgaaagaaagatacgaaattcccagatgatcgttatcccgggcggattctccggcggagacgagcccgagggctccggaaagttcatcacggcattcttcagaaacggcgcggtcgccgatgccgtgaacgagcttctcaaaaaccgcgacggacttgtgtgcggcatctgcaacggctttcaggcgcttataaagctcggacttgtgccgttcggagagatcactcccgcatcggcggatgcgcccacgcttacatataacgtgatcggcaggcatcagtcgggacttgtgcgcacgcgcatcgcgtcgaacaagtcgccgtggctctccgcgaccgagccgggacaggtgtacaccgtggcgatatcccacggagagggacgctttatcgcgtccgacgaaacggtgaagactcttgccgccgccggacagatcgcaactcagtatgccgacgcggagggacacgcctcctacgatatccgttcgaacccgaacggaagcgtatacgcgatcgagggcataacctctcccgacggacgtgtcatcggaaagatgggtcacgtcgagagaagcgctcccggaaactacagaaacgtggacggcgaatacgatatgcatttcttcgaatccggagtgaagtatttcggctgatctttgccgatcccggagcgcattttgcatcacgaaaacgcataaattccgcagacggggctgcctcgattcgtgcgccggagctttcgctgcgctttatataaaaacagatacgaaataaagcgtaaatttgcgctttcgcctcttgcaagttttcgttcggcgtgataaaatagataaaataaaacaatgaacgaaaaaacataaggaaggtggaaaaatggcacattactttgacgaaccgtcccacacgttcagcgaatatctgctgatccccggatatacttcgcccgagtgtatcccggcaaacgtatccctgcgcacgccgcttgtcaaattcagacgcggtgaggaaagcgagataaacctcaatattccgatggtgtccgctatcatgcagtcggtatccggagaggatatggcaatcgcactcgcacgagagggcggaatatcgtttatttacggatcacagtccgtcgaggacgaggcggcaatggttgcgcgcgtaaagggctacaaggcgggctttgtcgtttccgactccaacctgaagccgacggcgactctcgccgacgtgctcgaccttgtcggagagaagggtcattccacaattgcgatcaccgaggacggaaccccgaacggcattctcaagggaatcgttaccggacgcgactaccgcgtcagccgtatgtccaccgatctctgcgtgtccgaattcatgaccccgtttgagaggctcataaccgcccctgcggacaccacgctgaagactgcgaacgatataatctgggagcataagctcaactctctcccgatcgttgacggcgaaggtcatcttctttacctcgttttcagaaaggactattcgcagcataaggagaatccgctcgaggttctcgacgcgaagaaaagataccttgtcggcgccggaatcaacacgctcgattatgagaagcgcgttcccgcgcttgtcgaagcgggcgcggatgtcctctgcattgactcctccgaaggatattcctgctggcagaagcagacgatcgactttatccgcgcaaagtacggtgacagcgtcaaggtcggtgccggaaacgtcgttgaccgcgacggcttcctcttcctcgccgaagcgggtgcggactttgtcaagatcggtatcggcggaggctcgatctgtattacccgtgagcagaagggaataggacgcggacaggcaagcgccgtcatcgaggtcgcggcggcgcgcgacgagtacttcgagaagaccggcgtgtatatcccgatctgctcggacggcggcatcgtccacgactatcacatgacgcttgcgcttgcgatgggcgctgacttcctcatgctcggacgctactttgcgcgctttgacgaaagcccgacgagtaagctcaacgtaaacggcacctatgtcaaagaatattggggcgaaggctcgaaccgcgcccgcaactggcagagatacgacctcggcggaaagtcaaagctttcctttgaagagggcgtggattcctacgtcgtttacgccggctctctccacgacaacgtggagaaaagcctttacaaggtgaaatccaccatgtgcaactgcggagttacaaaccttgccgaccttcgccgtgatgcaaagatgaccctcgtttccgccacgtcgatcgttgaaggcggataccacgacgtaactctcaagacggcgcagcagccgaacagatgatctccgagcgggaagaaccggaaggtttttcccgctttttacctgactttttccgtgtcggcggcgttttgcgcgacatgcgggggggaaagttgtcccaaaggtgcttttgcggatgtaaacaatctataaatttcgacgaaattgaagcaaaggtatagtcaagggcgaaaaactgtgatataataaaaaatacggtatcggatgataacggtttttttgcgcgcgattaccgatatcgacccacagtaagtaaggttatatatatttattttcggaggtttttcaaatggcaaagaagtatgtctatctcttttccgagggaaacgcaacgatgcgtgagctcctcggaggtaaaggcgcgaaccttgccgagatgaccaagatcggtcttccggttccgcagggcttcacgatctctaccgaggcgtgcactcagtactatgaggacggacgccgcatcaacgatgatatccaggctcagatcatggagaacatcgagaagatggagggaatcaccggcaagaagttcggcgatctcaagaatccgcttctcgtttccgtccgctctggtgcccgcgcatccatgcccggaatgatggataccatcctcaacctcggtcttaacgagcaggtcgttaacgctatcgccgagaagtccggcaacccccgttgggcttgggactgctacagaagatttattcagatgttctccgatgtcgttatggaagtcggaaagaagtacttcgagaagctcatcgaccagatgaaggagaagaagggcgttacttccgacgtcgagctcaccgcagacgatctccgcgagcttgcaaatcagttcaaggctgagtacaagaatcagctcggaaccgatttcccggacgatcccaaggttcagctcttcgaggctatcaaggcagttttccgttcatgggacaacccccgcgcaaacatctaccgtatggaccacgatatcccgtactcctggggtaccgcagtcaacgtacagatgatggcattcggcaacatgggcgacacctccggtacaggtgttgcgttcacccgtaaccccgcaaccggcgagaagggcctcatgggcgagttccttatgaacgcacagggcgaggacgtcgttgcaggcgttcgtactcctatgccgatcgagaagatgaaggaagttctccccgaggtttacgagcagttcctcggagtctgcagcaccctcgagaaccactaccgcgatatgcaggacatggagttcaccatcgaggataagaagctctacatgcttcagaccagaaacggtaagcgtaccgctgccgctgctatcaagatcgcatgcgaccttatcgatgagggcatgatctccgaggaggaggctctcatgcagatcgacgcaaagtcgctcgatatgcttctccacccgcagttcgacactgcagcactcaagaaggctaaccccgtcggcaagggtatcgcggcttctcccggcgcagcggctggcaccgtcgtgtttaccgccgaggatgccgttgagcacggcaagaagggcgagaatgtcgttctcgtccgtctcgaaacctctcccgaggacatcgagggaatgaagtattcacagggtattctcaccgtccgcggcggtcagacctcccatgcggcagttgttgcacgcggaatgggaacctgctgcgtttccggatgcggagacatcaagatggacgaggagaacaagcgcttcactctcgctggcaagacctacaccgagggcgatccgatatccctcgacggctcgacgggcaacatttacgattgcctgattccgaccgttccggcagacccgaacagcggttacttcggccgtatcatggagcttgccgacaagtataagagaatgggcgtacgcaccaacgccgacactcccgaggacgctaagcaggcagcagccttcggcgcacagggaatcggactttgccgtaccgagcatatgttcttcgatccttcgagaatcggtgctttccgtgagatgatctgcgccgagaccgttgaggagcgcgaagctgctcttgcaaagatcgaaccgatgcagcagtccgactttgagggactctttgaggctctcggcggttaccccgtaaccatccgcttcctcgatcccccgcttcatgagttcgttcccaccgacgagactgatatcaaggctctcgcagaggtacagggcaagagcgttgagtacatcaagcaggtaatcgcagacctccatgagttcaacccgatgatgggtcaccgcggatgccgcctctccgtaacctaccccgagatcgccgcaatgcagaccagagcgatcatcaaggctgctatcgcagttaaggcacgtcacgccgattggaatatcgttcccgagatcatgatcccgcttgtgggagacgtcaaggagcttaagttcgttaaggacgttgtcgttaagaccgccgatgaagagatcgcggcagcaggcaccgagctcaagtatgaggtaggtaccatgatcgagatcccgcgtgcggctcttaccgccgacgatatcgccaaggaggctgagttcttctgcttcggtacgaacgacctcacccagatgaccttcggcttcagccgcgacgacgcaggaaagttccttccgtcctactactccaacaagatttacgagtccgatccgttcgcacgtctcgacaccaccggtgtcggcagacttatggataccgcagttaagctcggaaagtcgacccgcccgacactccattgcggaatctgcggcgagcacggcggcgacccgtcctcgatcgagttctgcaactccatcggacttgactatgtatcctgctcaccattccgtgtgccgatcgcacgcctcgcagcagcacaggctgctattaaggagcagggaaacaagtaattaattgttccttcctcaaaattgccgatttgacgattgacgaagcgtatgctcataagtatctgaaaacagtttctgatgtgcaccacttcaaaacatcaaattggaaagatgtaaaggtagcaatttatatctaaaccgaatccccgtacttcaaaagaggtacggggattttgaaaagatattatttttaataaaaaagaataattctaaacagatgttttatgaaaaagaaggagtaaaaatggaaaaattatttagctcaatgcaggaaatactctctcctgtaaactgcattgtatatgaaatacctgagtttcaacgtgaatatgcttggggaaaggatcagtggaatgctttgttcgatgatatcgaagctaatgatccgggctattttattggctcaatcatttgcatttccggaaaagcaagcggacaattggagcagcgtgttccccgaaatcacagatcgaccggatatattgggatcactgtataatttgggccatacaaacaatgacgggacgccaagaaaacctcattcgaatccacaagctaattggtttggcgaaaaaactaaaatgtattacggtctgatgccatatctattaggagaataaaacatgagaaaaaatattagatcgaaaaagataattctaattatagtaatgattttattgattgttcttttctttccatatatcaaagccgagtatttaactgcgaaatacggagatgaatttgatgacggatacgagcaaacagggatgataaacggtattgaatatttcagagtcgttgaatataacgatagtaaagctgttgtttgctacattgttgagaatcattcgtcgcttgtcaaaatttggttcgaacgaaatgacgataatgtgtgggaggaagtcagctgggactgtgtttggtcaaaaacgggctctgcggataatttttgttggccatattacagataatcagtgatatcatgaaatgagtctccctgtatttgcgtgattacccaaatgcaaagatgggaataaacggtccactcacatgagaaagattataataatgtgcagtacaataatcggtataattatcctgatgagtattggtagctttatttattataaacatacatatgaagaatcggtaatatatgacgcttcaagcgatataatacaaatatttataaataactctgatgattttgacgaatttgtctccaagttttacggacatcacttgtggagtgattattacaatgatacatatgataaagatttctgccacgataaagaatttaagaaatatttgacagatgaagaatatagctatatagaatgttttaacgataaatatcatcctgccttctggggatcttatcattttggcttttatactaaaactggacaggtgtggttttacaaacaagagtttctttcagatgatgatatattgatgaaaactaaaagggctgaagagtatggagatacgatagagtatctagattctggttggatctgctatatttataattaagtagaatcaagaaacaacattagaggtaagaattccaccatattacaacggacagtacggagtacagacggacaagtcgggatatctgtacatgagaacaagatattacagcccccaatttaagcgtttcatgagcgcagatgttatcgacggcagtatcgccgattctacaacactaaacctgtatgcatatgtaaacggcaatcctatctccttcgtcgatccgtttggacttagtgcggataggggagacaataacagtaaatttgaaatcggctgggagttgaatccgggacaggcagattatattggctggggacttgacggaaaggaaattagtgttcgttattacaactatgtcagatacggatttaatgttaacaaggttgggcaatacgcaatcatcaatggcgctcggtcaaatccggcattgaatcaaggtataaaaggtacaagatatgccttcaaaaatgctgatgtttatccaaatgtttttacctatgttgatccgattacagcaggcaaagaagctttaaaaataaccagcaacggcagtgtaaactgtgggagcgttttaggatatggtaccgttgctttggatgttggaccgggtatatatgacaacatccaggatggcactcgtacacagaagattgctacagacgctgttgttgacaccggggttggtgttggaacgatatgggtttctgctgccgcgggggcttggattggttctgtagttcctggacccggaaatgctattggcgcggcaggtggtttagttgttggcggagttgtatacgttgttacagatgtaattacaatcaacgataagtctttagtagattggggcaaggaaggacttgcctgggttggtgataccgttgttgatatgggatgctggattggcgatactgcttctgatgtaggcagttggatagctaataaacggagtgcaattcgatgattaaaattacaggagctggttttaatggaattagctgatataaaaggttttataaaaagatattctgaatcttatctgtttttatccggtataaaatcattgtcatggatgtacatattcattgggcttataccattaggatatggaataattacgcgtaaatttattgttgcctctatcacagtgataatggtaatttcttacactgctattacgaatatattagtacgaaaaatgacttcgatttcttattatcaaagatttttgctttctggcagttcatccttgtttacatcgttgttttttctaatgctaccatattcattagtggaaactgtgatgtcggatagaatgacacaaatcgtatattctcttcttataggattggcatggatcttagcggtatttctcatttttagttttgaagtatataatatcaaaaagggaaaatatagcaaagcaaaaagcaagaaaaagaacagggcgggaattgcggctttttcttcaatcggagcaattttaggaatctcattaatgaaaattgcatcgaaatggatgacgcaagatgtggcaataaatgtggttattatattaagctatattgcatcagtgttagctgcacttggaataccacatcttttagcagcttattttgttgaaagatatcacatttccggagaatcgcttcctgtttcaccgttttcttttaaaaagatgtctgcaagaaaacgaaaagtgctaaaaatattggttatttgcttgattatatttgtggctgtaattgctatcctggcaaccctgagaaccttgattgataagggtatcctcaaataatgttaaaatctccaagagtataatagttaagaatattgtgggagcagacaaatgagtataactggaaacgaagctgaaccattcaaaacatatgacatagtagttacggtggacagccgacatcgagataatcctgtagcatcatatctatgggtaagcgacaatggaacagttatggaaacacctgctatatactcaggtgataaggttgaagttggaacaagaggtttttggggatttggttttaaaccgcttgcaaatgttgatttgggtggttcatctcccattgcatctgaatatcaatcggttttcaacagattattggaaaaatataagtgaggacgattatgaaatcgagacgatataatttaattattggcgtattcgtaatgtttatatcgaacatcatatactttttctggatgccatatccaaaaggctttttgaaaacggttggaagcaccacatttgtttttgatgttcttacaaatttattgtttttctcgctttattccgtaatgctcattgtagcaatcaacgccataacaaatacaggctgcaagcttcgcacaaaaaaagttgctgccatcctggggatttgtattgccgtacagctcggatgtgacatcacaaagtatattaccggatatttgatgagacagtttgcgctgatatcagatgattttttcactgttgtaagcgttcttgtgctttcacttgtagttatgaagctcttaggagccaaagtaagctataaaaaactttatgcgatttttgcgccgataatgatacttatattgattgtgtatacggtgctcgacgttagatatattcatagtatgtcaaatgttgccgaaaagtatttcggtacgccgtcaaacatcttatcagcattaagtttatcggactcatcttctgtagctgcgacgattttaaaaaatatggaatttatgtatgaaattcggaacgcactcttggatttcgcttcagaagctgctattcttattgcagtctatttttcaatccaaaccaacaaagctaccaattgcaatgcctaccacatcgataaagcacattttatatcaaggatagccgtcatattgctgttttcatttgtgatatccgggcttaagttccttgtgctgccgcaaaattttcttacaacgatccatgtgaataattctgtttcacattcaacagaaccatcatttgactataacagaagctttacaacgattagtcgtgcgataggttatcatgagagaaaggagatttacagaaaaacacacggtatgatatattatggtgataaaaaagtgcttgatattaagatggattatgaatttgaaggaaatccaattgaagtgagaacagtgaaggggatggagataagaatcatatgcaaaaatcaagcaatcgcttatttcaagaatgaaaaaccgtatgtggtatcgtttcaagatattaattggcaaagcaatgatattatactgttagaagtgtgtaaagagcttttgtcggaggggaggcttgactgttttgagtatatttgttcgtatataatgcggtatgattctgattttatacaaccatatctgcgaagatatattgtaagcgattttacatctgaggaactctcacaggtcggtgaaatttctatagattatatcactaaaacagctcagcgtttttataatggcttgtcggcttaatgattatacgctgtctgtcaataaccactttgagtcataaccttcaactaagtacaatggtaaaataaaggcagatacacggaaaaccacaatgtatctgccttctgccaactgtaaataacggctgggtctacggtggctacgcagaaatacaatggtatgctatctcaataatattgcattatctttaatgtatgacaaaaatagccgtttagtacacttaacgcacggttacggctcatacagctacgacgctgaaaacaaccgtatatatgccgacggaacaaagtatgtatacgacacttccgacggaaaaaatcgcgtagcggagagtatagacggagacggaaatataatcatatacgggtacggagcagacggacttgtgtggtctaagagcggcgacgagtacatggtatatcactacgactaccgcggaagtgtggttgcaattactgatatagacggtaatgttaccgcaactgcaaagtatgatgcatacggctatgtaataagcaaaacaggcaccggagaccgtaccgtaggttataacggaagtgatggagttctgacagatcccgatggacttctgtatatgagagctcgctactatagccctgtcttgaaaagatttcttaactgtgatataattgacggtagcattgttatattagtaaatatccgtaatctccgaattttgaaaaaatcaattcaaaattaaaggagattgctatgaaaacaagtgggataaaagaacaattcaaaaacgagtgtcaagtttttgagctgaaatacgagtatcccggttatgcgggctatgagcgatacggatagaaaagaccctgcaagagaaatcttgcagggtctttttgcatgcgttcttgaagatattttgaaatatggcatattgtgtgttgacaatcgtttttttgtgagttatacttattttactttgaggcataataagttaaatttcagacattgtgttccggtatttattcctgtttatgcaagtgaacttgagtaaacacaggaaaacaaagaataaaatttaatctattaggtttgggagactcctttgcgtacgggagaagaatatccgtcgaactattattatgccttttagttattatttgctgaaaggattttttatatggacaatcaggacttacgcaagattcaagacagaataggatatgaatttaagaactttgatttattagagcaagcatttgttcgcaaatcatatgcgagagaaaagggaggtgaacacaacgagatacttgagtttatcggtgacaaagttttagacatgattgctgtgaagttcttgacagataaatacggttattattgccatgagtgcagtgattttgattcgaaaaacgattttgacgagttctgttgtgagcgcactgaagggcaattaacagaactgaaaaaattacttgtaaaaaaagataccctagccgatgtgatcggcagacttcaactaaatcaatacttgataatgggtaaaggcgattcaaaaaacaatgttgggaatgaatcttccgtaaaagaggacttatttgaggcaattatcggtgcggtagcattggatagtgattggaattgggatgaaatcagcagtacagttgaatatatgcttgaaccggaaaaacgcatttcaaaaaatgaagaaaagaattacgttgaactgatccaagaatggtcgttgaaaagatacaacgaattaccggatattcactcggacaattcaaattactacgatgaaacttccttgcttcattatgcaaacgaaataaggtctgttcccaaaagagatccgaatgtacatattataaatgttcaggagtaccccaaaactcattttgtaagcaaactcagattgcgcggtattgataaattatttgtcggatacggctcttccaagaatgctgcccgaaaggatgcttgtgaattagcatatcattatttagacaacaataacttattattttctattcaggatgaaatagaaaatccgagcagagatagagctataaatcagttggaaactcttgcacgcaggggatatttctctattcctacatataaatttgaacaagaatacgataataacggaaaccctgtttggaagtgtgaatgctatattgagaaagtaaaatactattacttctcaacctcatcttcaaagaaagaggctaagaaatcggcggcattcgacatgctattgtatgtattggggtacgaaaaggaggactgaaacaatgtctaaatggtgctttaattatgaaaccggtgattacgaagatatagatcgtgacgggtatagctacacttcgggaggatacacattcaattgggatgacagcgaataccgtcgtgaagaagaggaggaagaacgcaggcagcgtgaagaagaggaggaagaacgcaggcagcgagaagaagaggaggatcgatgccgcgaagacgacgaatggtaaacgataaaaacataattttttgataagccccgtaataatataaagcggcattcgggtttccctttgagaaatttgaaaattacggcatattgcaatgcatgtttttcggcggcgggagatttctatcgccgtgctttacgtgcttgttaatactcgggtgcctcacaagtgaggatgccgtgcgatacctgcatgtcaattccgtgagacagtgcatatcatcggaaagacgttaatgtaatcttgtatatcccaaacgctccctctgtcgcttcctcggcagagggagttttgatttccgccgttttactgccgccgatgacgaaaacaaaaagaaagggaattaacatgaaagcaaaaaaacacggaacagcagttatcttttttgaaacggatttggaaaaatcaacgccttttgacgcagcctcgctgtccgatcttcaaaagcggacactttccgaaatgccaaaagcggaacggaaaaaaataaaggcgggatatggtgcgagtgtcattgatatcggcagcgggggctgcatctgcgacttcaacaccaaaggatacagaccgccggaacatgtcattaagtcgcttgccgaaatgctccttccgaggataaagaaattttatgaggacccgaaaa

SEQ ID NO: 154 - DNA, 1719 bp, Unknown
  16S sequences of unknown bacteria
ccgcggattttcctattcccgccgccgcgccggtcacgacggctgttctgttattaaaacgcatgaaaactatcctttcggagaattattatggataccaatattatagcatattgacaatccccgcgcaatgatgtataatactgtatagcaaaacaataatacgattcaggaaggaaaaatcatgccgataaagggaacgccgacgctcgagtgggtcatggattatcatctcgggcgcggacactccgatgactatctgtcttccccgagaccggtcggaagtatcgccttctgcgccgagggcacagcggattacctcagcctcggaaaaagattcacgctcacgggaggcgacatactgttcataccgcagggcggaacatacatatcagactggaaaactgatggccggctgatcgctgcgcactttctctattcacctcgcgggataaaatatcctgtctctaaggtctccggaaaagaagctctgcttgacagcttcacaagaatgctctccgattggcggattataagagataaaactgacgcttcactgaagctcggtgcggcggagtcggacattcacaatctctcggtcatccttcacatgaccgggacgtggaacattatcatgtcggagataattccggagctcgaagcgattcccgtacccgcacccgaccctcgtgtcgacgccgccatgaactatatatcggcgcatatgtgcgagcggatcacgatatccgacatagcctccgccgtctgcgtctctccgtcgcatcttcacgcgatattcagaaataccctcggcatatcaccgatagaatacaagctgcgtctccagaccgatgaggcgcagcgcctgcttatcgcgcgcccggatctcaccgtcggcgagatatccgaccggctcggtttcgcgtccgacatatacttccgcaaagtcttcaggaaccagacgggaatgtccccgaccgcgttcagaagaacacccaccataatgtaaaagatgaccggcgctttttaccgcgtcggtcatctcttttgttatttggttcacgccatcagcttgaccataacagccttctgagcgtggagtctgttctccgcctcttcaaaaatctccttagcgtgagcctcgaagacgtcggcggtgatctcctctccgcggtgagcgggcaggcagtgctgaaccatcgcgttcttcgcggctgcgtccatgacctcggcgttgatctggtagccgttgaacgcaatacggcgcttctcggcttcgccctcctgacccatcgacgcccagacgtcggtgaagatgacgtcggcgttctgcgccgccttcagcggctcggtcgtcatctcgaacattccgtcatagcctttcgtgaagtcgagaacagtcttgtccggctgatagtcggtcgggcaggcgatcgagaccttcataccgacagtcagtccgccgacgatgagggagttcgccatgttgtttccgtcgccgatatagcacatcttaagtccgtcgaaaccgcccttgaactcgcggacagtaagcaggtcagcgagcacctggcagggatggcagtagtcggtcagaccgttgattatcggaatatcggcatactcggcgagatcctcgacctccttctgagcgaaggtgcggatcatgatgccgtcgaggtaacgggaaagcacgcgcgcggtgtcctgcaccggctc

SEQ ID NO: 155 - DNA, 15430 bp, Unknown
  16S sequences of unknown bacteria
gcccccctccatcccctaaacttttatacaagcatgggcagggcgaatttccttcttttcttcaattctgcgatgtaacagtttatctgaccttagagaacgcgaggcagacattatgaccgccaaaaccgagagagttcgacagtgcaagctctatgtcagccttaaccggcttattcggcgtataatcgaggtcgcactcctcatccggctcgttcaggttgatagtcggcggaacctccccgttcctcagcgcgtaaatcgaagcgatcgactccaccgcgcccgccgcaccgagcatatgcccggtcatcgacttcgtggaactgatatgcaccttcccggcgtcctctccgaacaccttcttgagagccgccgtctcagtcgcgtcattaagcttcgttccggttccgtgcgcgttgaagtaaatcttctcaggcgagacgtcgctgcccttcttagcaagccttatcgccctcgcgacctcctcagccgtcggatccggagccgtgatatgatgcgcgtcacaggtagtgccgtagccgaccacctcagcgagtatctccgccccgcgggcaaccgcgtgctcatactcctcaagcacgagaacccccgcgccctcgcccattacaaaccctccgcgcctcttatcaaaaggcagagacgccgcgtccgggtcagtagccgtggaaagcgcctgcatattgccgaatccagcgaccgcgagcggagtgatagtagcctcgctgccgccgcagatcatagccgtagccgcgccgacctgaatagccctgtaagcctcgcctatcgccgttgcactggtagcgcaggcggtagtatgcgcgatgcacggtcccttggcgccgaaatgaatagccgtgctgcccgccgcgatatttccgatcatcttcggaatgaactgcggagagacgcggcgcgcgccgttcttcagcagattctcgtgctcggagcagaaagtagtgaagccgccgatacccgagccgatgtaaacgccgatttcctccgggtcgaccttgccgatgatcccgctcatcccgaccgcttcctcggcggcacagagagcgtaaattgtgtagagatccgacttgcggacagcgttcttgtcaagtctcgcggagggatcaaaatccttcacctcagcggcgagagtgcatttataatcgggaagctcgaagcgggtgatcttaccgataccgttcttcccagcgtagagagccttttcgaactcgtcaagcgaatttccgatcggggtaacgcaccccgctccggttacgacaactcgattcatatattattgcctttcgtttaggtataagctgaatgatcagcgtttatgattgaattcagatagcgagaccgccgtcgatacgtataacctcgccggtgatataagccgccgcgtccgacgctaaaaacagcgcgagcgacgcgatctcgtccggtcttcccatccttccgaccggtatgcgcttcatgacgttctcgtcggaagcgaacttctcggtcatgtctgtctcgacaaaaccgggagcgatagcgttgaccgttatcccgcgcccggcgaactctctcgcggcggacttcgtcattccgataagtcccgcctttgacgccgagtagttgacctgaccggcgttgccgtttattccggctattgacgacagattgataatcctgccccatctctgtctcgcgagcatcgggcagaccttgcgcatcgtgttgtatgcacccttgaggttgaccgatatgacgtcgtcgaagtcctcttccttcatcatcatgaggagcttgtcgcgggtgattccggcgttgttgacgaggatgtcgatcttaccgagatcattcactacatcgtcgatcgtcttcccgacctcgtcggagttttcgacatggcactgataagccttcgcggttcctccggcatttctgatctcttcgacgacagcgtccgcgctggcggaattgctcgagtagagtatcgcgaccgaggcgccctccgcggcgaactttccggcgattgcctttccgattccgcgcgagccgccggtgacgaccgccactttattctgaagtatcatttattttaattcctccgcgaccgccgcgatctcctccggagtctcggcgtgataggtcttcgcattcggaagtatcttcttgacgaacttggtgagggtctgaccgggaccgatctcgacgaaagcggtaatccccgcctcgctcatattgcgtatcgtctgctcccagagaaccggatgatttatctgtttctccatgagctcccacacgtcctcgccgtacttttccgccgtgcagttcgcgtatacgggtctctcgagcacgccgatgtcctctccgacgaggaattctccgaactcgtgcgccgcctcgtccatgaacggagcgtggaatccgccgctgacagcgagcggaatgactctgccgcccgccgcggtgaagtccgccttggatttttcgagctcatcggtgagtccggcgatcgtgacctggccggggcagttgtagttgaccggatagactccctcgtggaggctgcaaatgcgctcgacctcctcgttagtgagcttcagtacggcgatcattccggtcttcaccttttcggtggtcttcgccatgagctctccgcgcttgcagacgatctcaaagccttcgtcataagtataagccccgccgacagcgagagcgactatctcaccgagcgagaatccggcgagagcgtccgggagaacgcccgccttcatgagcgcgtccgccgcggcgagctcggtcatgtagagacacggctgagtgttctcggtcttcttgaggtcgtcggctgttccggaaaagcacataccgacgataccgggacggatcttctccgccgcgtcgaatatctccttttcgctctcatataaagctttgcccattccgggatactgtgctccctggccggggaacagaaatgctatcttttccatatatctttcaccctaattctcaggttgacttgtttcggtctcagttattttcgcagaacttcgttccagcgagcagcttcccggcgtcgtcgaatatctctttgatgatatcggcggcgggctcgatctttttcaccattccggagacctgcccggcaaggacgcatccggtcttgacgtctccgtcgaccgccgcgcgtctgagcgcgccgacaccgagttcagcgacagactccgcggtggcgtccggcgcgtattccttcgttatgaattcgcggctgaatttgttctttatgcagcggcaggtgtttccgccgaagcgccttccggtcgtgacggtcgagatatccgacgcgtcgagaaccatctgcttgtaattttcatgaactccgcattccgcggcgcagaggaatctcgttccgagctgtacgccttctgcaccgagcatgaaggacgccgcgacgccccttccgtccgcgattccgcccgcggctacgaccggtatctttaccgcgtcgacgacctgcggcacgagagccatcgtcgtgagctcaccgatgtgacctccggactcctgtccctcggcgacgacggcaaaagctccgagcttttccatcctgacagccatcgcgaccgacgcgatgaccggtatcaccttgatcccggcgtccagccacatgggcatgaacttcgtaggcattccggctccggtcgtgacgacctctactttttcctcgatgagtatcgacgcggcctcctcggcggtcgggctctggagcataaggtttacgccgatgggcttgtccgtgagttttctcgcttctctgatctgacctctgaggtagtcgccgcccgccatcgcggaaattatgccgagtccgcctccgttcgatacggcggcggcgagcttaccgtcggcgatccacgccattccgccctggaatatcgggtactctattccgagcccgtctgttattctcgtttttatcatctgtttattatgaccatacctctcgtacaatcttgcagttttgaagcggttttgaaagacggcttgtacgtctttcataattcacgaccctatgtcgtgaaagcctcaaaactgtcttgtctgaaaatttattttcagacttgaaccttactgagccgcctcaatcttctccgcgaggtcggacacaagaacaagctcaggagagacttcgatctgaacgccgaaattgtcttcgatgtccataaggagctcggctatatcgagcgagtccatgccgagctcggtgagcttcgagtcagcggtgatctcggtggggtcgatgtcaagtttttctgcgataagggcgataagtttctctgtaaccattgtaatttcctctttcttatgttataatatattgtgtgagttttttcttaccatctgataaggcacgcggcgtcagcgagccctccgccgaaagcggtgaagaccacgaggtccccgcgcttcagctccccgctcctccagagctcgtcgagagctataggcaggctcgcgctcgaggtgttgccgtacttgtcgatattcacgacaaacttttcatacggtatgccgagccttctcgacgcggcgtcgattatacgcttgttcgcctgatgcggaacgacgtatttcacctcgtccggagagatcgagtttctctcgagaagggtctttatatcgtgaacgatcgcgttcacggcatatttgaaggtctcctgacccgccatgtggatgaccggcttctctggctcgagagccgagaacggcgaatttccggcgtatgtcgggattcgtatgacctcatcgtcgccggtgacgttgaacacggagtcaaagtagctgtcgccctctccgagcacagccgcgccggctccgtcgccgaaaatgacacatgtggatcggtcggaccagtcgacgagcttcgagagcttctcggagctgacgagcaggaccttcttatgtcccctcgcgaaatatcctgccgcggtctcgagaaggaacatgaacgccgagcacgccgcgctgatatcgaacgccatgcaggtcgccccgatccgcttctgcacaaggcaggagagcgacggagacgcgtaatctccgcttacagtcgacgcgatgatgaggtcgagctcttccggcttcaccccggcgttctcaagcgccgccttcgcggctttttccgccatatcggcgcaggtttcggtcgtcgcgacgcggcgttcggcgatgccgaccctctgttttatccattcgtcgtttgtctcgacgtagttcgcgagctcgtcgtttttcactattcgttccggcacggacataccggtgccgagtatacggaaactcatgatctgtgatagccttgccccgcggggcttcctttcagtttcttttctgtctttctttatcagaccaccgctggcgcttcaacaactgtttccatgccttacggtctcgtaaggtaagtgacgcgcggcattcaaaagttacagcgcccgcaaaattatttccggatagaattttctgaaaaagtgtaacctttcgtgaaacggcaaacactaaatatattgaagtatgaaattattatatcaacaccgaagggaggaaacgccgatggacgcgtttggcagcatatataccgagtatttcggacgggtctacggattccttttccggatgtgcagaaatgaggacctcgcggaggagctgacgcaggagacattcttccaggcgttcaagtccttttcgtcctatcgcggcgacagcgagctgttcacatggctcgcggcgatcgcgaagtatactttcttcagatatttgaggaagaataagtgcgccgggatggtcaacctcgaccttatcgcggacaccctctgcgagccggacgagtccggaccagagtcgacggcggcgagaagcgagacgaacgaggcgatacgccacgcgatagcgaatatgccggagaaataccgcgacgtcgtcatgctgcggctgtatgccgagcttccgttctcggagatcgcggagacactcaaaataacagaaaattcggcgaaggtgctgtttcaccgtgccaaaaaaatgctgacggaggagctaaggaatgaatattacgtgtgatatggcgatggatctcatcgcgctctacaacgacggactcgcgagcgatgacagccgccgcgccgtggacgagcatctgaagagctgtcccgagtgctccgcggcgtacgcgtcatactccgccccggcgccgcacgcggtgtccggacagccgaagaaatcggcggaggacctcgagataaagtatatgagcctcgcgagggcgctcagaaaaaatcagctgatctcgaccgcgacgaccctcggcatcgtgatagcgtcgctcgcgatcggcagctacggtatgctgcacctgatcgagagacgccacccgggttctgagttttgataaatattctgtcacagacacatgtccgcaggcgtgcgtctgtgacagtttttctatgagcgcgatctgtgtcgtttgacggcaagagtcagtagtgccgcgaacagcatagccgcgccggcgatataatacgcgggtcttttcccgccggaaaaaggcagcgacggtcgcgcgacgacatccgcgtcatcaggtgtggtgtcgctatctttttctttccggaacgacatatcttcggcggagtatccgaccgatatcagcttcgggtcgtccgactccgtatcgaagctgccggttattgtgaactcgtgcccctcaaggcggtatctgccggacccgagccccctgagcggcagtccgtcggtcactccgcgctcgatgaaatcccctctgtcttcgtcgaactccgacagcttcagtccgccgtttccgattgcctccatgaactcctcctcggtgagaacagggtagcatgagtaggtgaagacacggacgatatcggtaacagatctgcccgtccccgttccgtagggatttatcggatatatcagccctgccgtgacggcgtttccaccggcgccgcacactgcctcatccgtgaggacggcgggtatagtgacgacgacttcttctcctgtgatctcctgaccggatatatccggtacggtgatcgtcagtgtgtctttgtcatctccggattctgccagacagccggtgatttctgattcatcagtcgaaacaacgatgtttccggtgtcaatcctgatcccgtccgcgtgcgttatttcgaatgtcagagggtactccggaaaatccgaaaaggtatccggaagacgcgctgtcagtctgagcgtgatcagatcaccgaacgacgcgtcggcggcgtcgctgtatttgccgttctcgtcgagcttcatctcaagcgtcgggatatcctcttttgtcgatatatcaacatttcccgccgcgtcgcagagaatggcgagcgaaaccgagtcctgtcttgtccccgtcctgtactcgcgtatcagatagtaccccggcaggatatccgtgaagacgccgcgctcggcggtataatcggcgccgatgtacggctccgcgattatcccccgtactgtcatgtcggcgaattctctcgcgccgtcggcgtcgagcgcacagagcgactgatacgggtcatctccgagagtccggagaagctccggatacatatttctcgggacatattccccgtcgacaagatcgagaagccgataagcggcgtaccgcgagccatccgctcctccggttatccggatcgtgacggtcttaagctcgtccgttgtttcgtatgacgcggtttcgtccggagatacttctccggccattatgtcttccgccgtcaaatccgtgaagtcatccgtgatggcggacgcgccggtcatcatacagagcgccgtcagcgcggcggcggcaagggtcactgttttccgcatattgcatcatcctttcataaatagcggttccacacgcgaatattgacatttatgacaggatttattcgcgccccgacgcggacatcacgataaaaaacgccggatgataccgaacaaaaagagagcttccgatacttataaatatgaaccacgaaaggagaagcggatggacaccggaaaaattataaacgaagagctgatggcaaagaccttcctctacgcgagaaagcgcctcgggaacgacgtcgacgcggaagaactcgcgggggacatacttctgtccgcgctcgagggtctgcgccgcgcggatgaacgcggggagaagatagtttcattttacagctggtactggcgactcgcgtcgaaccagacgaatatgttcctgcgcctgaaatacgacggctgtgtccggctcgacgacgttccggagcctttcgtcccggacggcacagtggacagactgatacgtgaggaagagcaaactgccctctggtcggcgttgtccgtcctgtcaaggagtctgcgtgaggtgatggttctcagatacctcgcgggtatgaccgaacgcgagatatccgaaagtctcgggatacccggcggaactgtcagacgccgcctccacgacgccgccgtcttccttcgcggtgagcttgtcccggaaccggagacacagtccgaaataaaaacgaagaaaggaacacgtacaatggaaaagaccggaagaagcgcgttcgcccccgcagaggtgatgtggtgcggcagaggaagcgcgccagattactacagcacaacacaggacctcatgacaaagcagatactcgtgatctgccgcgagagaccgcacaccgtgcgggagatatccgacgaaatcgccgtcgcgccggtgtatttcgaggaaaagttagattttctcaaagagaaccggttcataaaggagacctcgcgcgggaagtatctgaccgacttcgtgatgctgccgatgcaggcggaaattgatatgtcagaccggctcgccgacatatattcagggctcgcgccggagatacgcgacgcgatactcggggttctgccggagatacgctcgcttgatttctacggaaacgactttccggagggacgtctgatgtggcttatgtatgtctgggcgtgccagtcgttctcggcgtcggcggtcggtctgttccgccgcgggaaggacgttccggcgtcgaacggcaagaagtggcggtatgagggaatcttcacccttccggacgaaaagctcgtctttcacgagcgccggtcggtcaactggagcaatatgcacacgaatttccgcgacagaaagtattcccgcctgaccttcgcgaatctttatcagatagagccgtttccggacagaagctctttcatcggtgccgagcacgtctcgctcctgacgcgtctttccgaagacccgggcgccgcgctgagtgagagcgaaaaatacacggcggcggagctcgtcggcgcgggatttctcgaaaagaccggaaaaggtctcaagccggctctcccggtcatggcgtttgagacgagcaagaaaatcatcggcatcctcggcgaggcggtgtcgccgctcatcccggagtacgaaagcaaggccgcgaaggcgggcgacgagattatcctcccgcacatccgccgcgacctttacgaggagtacgtgaatttcatcatgcagaacgccttcttcccgtattcctacgtgatgttcgagtgtctgaaatctccggaggattatcatctcgaaatcccggaggactacgcgaaaagcgccctgtcgaccgcgatatactattcggtgtgagattgccgcgcatactttgccgtgaagagtctcgtgtatgcggttgacaaaattctccggacgcggtataatcagtatatgcagcggctacagccgcttcaaataagttccgaacggagaattcacaatgttcagtgacaaaataatcgccctccgcacctcgaagggtctctcacaggaaagattcgcggaaaggctcggtatgtcccgtcaggctgttcagcgctgggagaacggcacggcgttcccggacctcgagaatctgatgcgcatcgcgaagaccttcggggtctctctcgactggctcggtgacctttcgtccgtgcagtccgccgacgctctgagacggcaggacccgctcgttccgagctatgacgacctcgacctctgggagtcttacgcgccggatatcctgaccgacctcgacgagttccgcgacgagggacatgacgtctcggacatagccgacgtcgcccgcgcggtcagcgccatgaagaacggggagacgaaggaagctctcgccgacacgctgttccgccatatgtacggctcaccgatccgcgaggattacggatacgacgagccggacgacctccacgagatacgcctgcgccgcccagagggcgtgaagctcgctttttcgccgacgccggatgacggtgctctccgagaaaaaaatagtcggcgcatggcgcggaagggtcgcgggctgccttctcgggaagcccgtcgagtgcataatgaccgatgagctgcacgatatgctgaagcggagcaggaacttccctctgcgcaggtatataacgtcgacagacgtcgcggacccgcgctactcgtcgaaccgcttcaccttcgatcgtccgtggcagtgctggggcgacactctgaccgacggtttccccggcgacgacgacacgaattatccggtcatagctctgagaatcgtcgatgagtacggtctgaatttcacgtccggaaacgtcgcgagatggtggaaggacaacataagcataagatacgtcgcgaccgcggagcgtgtcgctctccgcaacataatggcgggctatatgccgccggagtccgcgaagtacaagaatcctttccgcgagtggataggcgcgcagatacgcggcgactatttcggttacataaatccgggagatcctgagaccgcggcgggaatggcttggcgcgacgcgcggatatcgcatacaaagaacggcatatacggcgagatgttctcggcggcgatggtcgcgggcgcgttccttctcgacgatccggcggagattgtccggtgcgggctgtcgcagataccggcgacatcgagactttacgagcgtatcgcgggagttctcgaagatttccggaacggcgtcggcgaggaggaattcacgaagggtttcttcaagcgcaacgacgagttcagaaagcacgacgcggtccacacgatcgcgaacgcggaactcgtcgcggcgtccctgctctactgcggcggagactacggaaagagcatatgcttcgcggtgcagaacggctttgacaccgattgcaacggcgcgacggtcggttcgattgtcggcgcgatgcgcggagcgtccggaataccggaagagtggaccgcgccgttaaaggacaaagtacacacgccgttctatagtggcggagtcatcacaaccgacgatatggcggacgcagtgatgaaacatatcgccatgaagcgcggcgagtgccggtgacatagcaatcataaaagggtctgcccgcgggcgggctcttttttgtcttttctcagaaaacacttgaaaaccaccgcgccgtatgttataataataaggaataaatttgaaaggaaccgccgcgtgaaaataaagtttaacagtcccggaaaaacaatagcggaagctctcgccgacgcgggtcttataacgcctgagctcccatgcggaggaaatggtctctgcggcaagtgccgtgtgccagcgaaaggcgccctcgagccgcccggagaatccgaaagaaagctgctagcggacgccgcgccggcagacggatacagtatcaggctcgcctgtctcgcggtgatgagcggtgaggcagagataatcgtcgacattcctgaaatcagagccggacgacccgcgccggataaattgtcagaaaagccggaaattctcgccgcgctcgatatcggcacgaccaatatagaggctgaattcttcgacatgagcggaacccgcctgtccggcgcggtcatcccgaacccgcagagaagcttcggtgcggacgtcatctcccgcataggcgccgacgcggagcatcacgtcgagctcgtgtcggaactgcggcgcgcgatagcggagttgttcagttcatccgccggtaaagtcgtcagagcggtcgccgtcgggaacacgacaatgcttcactttttcgctgaccgcaatgtatccggaatgggggcgtatccgttcacgccggagacgctgttcggcgaggagatcactataccggagataccggactgtgtgttttaccttcctggatgcgtttctgctttcgtcggcgcggacgttgtctgctcgctgctcgaggcggctccggagaaggatgagagaattattatcgctgacctcggaacgaacggcgagattatgctatataacaaaggaaggattttgtgcgcgtcgaccgccgcgggacccgcgcttgagggcgcggagatatcctgcggtatgcgcgccgtcgatggagccgtcgaaaatgtcacgtggaacggtaagaatttcgtctgtcatgtgataggtggcggagaggcaagaggtatatgcggcagcgggctcatttcggcggcagcggcaattcttgacgccggcgtcatggacacgagcggttacatagaatccccggtaactctcgcccccggcgtcacattgacagaggaggacatacgcgccctccagctcgcgaagagcgcaatccgcgccggtattgacactctcgaaaaacattgtcccggaaaaacgacccgcgtctgtctcgccggaggtttcgggagcggcatcgacatcgggctctgcgagcgtatcggtctcctgcctgaatacgacgacgtgcggtacgatatcctcggcaacgcgtccctgaaaggcgcggcgcggatactgaccggcggaacagaaaaatatgacgctctcgtaaaaaacgcggagcttgtccctctcgccgaagatcctgtgtttaccgaatcatatattgaaaatatgcttttcccagaaaaaaaatactgacagaaaggaaacaataaaatgccaacaataacttacctcggacagatgtgctgtctcatcgagaccccgaccatccgcgtcgtcaccgacccgtatctctctgattcggtcgacggaccgctcggtcacaggaaatatccggcgccgtgcaccctcgccgatctctcgccagacgtaatcgtgatctcccacccgcacggagaccacctcgacaagaagactctcgagccgttctaccgtctgagaatgcgctcattcactctcgtccccgcgccgtccggaaagatcatagagtcgatcggcggacacccgaccttgatgcgcgcccccgcacccgcggaatggggagagccgttcgagctcgccggagtgaagataacaccgattccctgcgcgcacaccgagctgcaccgcgacgaaaacggcgactttgctgaactctcatacctgatcgaggcagatgggaaaaagatcttcttcggcggcgacatgagtatgtacgccggtcttggggaagcgctccgtgacgcgaagccagacgtgatgttccttccagtgaacggcagtgactggttcaggacgtcccggaatatcatcggcaacctcgactcgaacgaggcggctgacttgtccgtcagatgcggcgcgaaggcgttcattcccggtcatcatgacctctacgcctcgaacggctgcccggacagctgggtaatcgactccgcgaagcgcttcggcgcgccgctgacaattctgaaatgcggcgagagcctgaatatctgaagggacagaaaaatgcctgagctctgggacttatacgataaaaacagaaacctgaccggacgagatcacatccgcggcgaaataatacctgacggatgctatcacctcgtcgttcatgtctggataaaaagccccgacggaagatttctcgtctcacagcgcgcggctgacagaaagtcgcatcccatgatgtgggagacgaccggcggctcggtcctcaaaggcgagacaagccttgaaggcgcgctgagagagacaaaggaagaactcggaatcgaccttgacccgtcgcgtgggagactcgttttcagcgaggtccgcggctatgtgaacggtgagcgttacgcggatatcctcgacgtatggctcttcgaacacgacggcggggcggaacttgaattggcaactacaaaagaagtaaacgccgccgccctcctcgaccgtgacgggattcaaaagctcttcgacgaggaaaagttcgtcggtacgctcgattatttcttcaccagaatagccgactaaatccaaagcggagatgaaaaacatccccgctttttattatctgagccgtccgagtatctccgctgtatccctcgcgtcgtcctcggtgttgaaccaaccgaagctcgcgcggacagcgccgtttttcgtgccgagttttctgtgcgcgagcggcgcgcagtggtatccgctccggacagcgacgccgttcctgtcgagatatccgccgatatccgacggcgagtagcccgaaatgtcgaaaagcagtatcccgcccggatgtccgtcgccatagaaagtcacacgcccgccgagcctttcgcggagcccgcttttcagtatctccgcgagccttgactcgtgctcccgtatatccgccgtcccgaccgacgcaacgaactcaatcccggcgagaagccccgctatgcacggaaccgcgagcgttcccgcctcatacctttccggcggctcatccggcattccgggagacagtgaatcgacgccgctcccgccctcgataaagctgtttttcagcgcgacgccttccccgagaatcatcatcccggttccctgaggaccgtacagtcccttgtgtcccggcatacaaaggacatcgatattgtcccgtctcgtgtcgatatcagtatgccccgccgcctgcgacgcgtcgacgacgaagagtatcccgcgctcgcggcagagccgcccgatctcccgcaccggcatcctgactccgcatatgttcgacgcggcggtcgacaccagcatcccgcatttcgcggtgtgcgcgagcttcgagcggatcgaggcgagtatctccgcggcgcgctcttccccgtccggcatttcggcgtgtgaatcgaagatcagaacgttctcccccgccctgtccgccgctgcgagcgcgggtcttctcacagagttgtgctcaaggtcgcttataagtatgctcccgccggtatacccgcattttatcgccatattgagcgcagcggtcgcgttgcaggtgaacacgaccctttccggcgccgagccgaacatctcagccgcggcggcacggccgagctgatccggcagcacacaaccctgccgg

SEQ ID NO: 156 - DNA, 7034 bp, Unknown
  16S sequences of unknown bacteria
ggactgtacgctcccaccgataaaaacaagaaaaagagcgacatgaaaaagcgcaaggagatcatcgaggcggcggagcccgtggcggtggtttccgtgcatcagaataaatttcccttgtcgtcgcgaaagggcgggcaggtctttttccgaaacgacagcgcgcaggggaaggcgctcgccgcatctattcaggaagaattcaacgcgctctcgggcggcgggctttcggcgctgaaaggcgattattatatcctcaactgcaccgattatccctccgtcatcgcggaatgcggttttttgtccaatcccgaagaggacgcgcttctaaacacgcaggaataccaaaaaaaggtagcgtacgccctctataaaggcatcgtcgctttcatcgcgcacaacgtcgcgggttgaaacgaggatcatatcttatatagaaaataaaagcgaagccgaaaggcttctctttcttttttccaccctttcgattttattgaattttgcgccgcggtgtggtataatgaaagggtattatggtaaaattcaacgaagtaatggaagaggaaaaggcgcgcaggctcaatcccgtcgtgctcgcgttcatcggggacgccgcctattcgctctatatacgcgaaaaactggtgtttgcgagcgattacaagacgggaacgctgcaaaaactctcttcggcgagcgtatccgccaaagggcaggcggcgcttctcaaaaatatcgaagcaaaattcaccgacacggagcgggaaatctttctgcgcggccgcaacgccaaaaaaccgaccaagagcaagaacgcgaccgtcgccgagtacaatctctccacggggttcgaggcggtcgtcggctatctgtatctcacgggcgcgtacgcgcggctggacgatcttctttcggaggaacaagatgaagtacgagggtaaaaacgccgttctggaacttttaaagacggacaagacgatcgacaaaatactcctccgcaaaaacgcgcaggacgcgttgggccgcattttcgcggaggcgcgcgcaaagggcgtccgcgtgcagttcgccgacgaaaaggcgctcgatcgggagagcgaaacggggcggcaccagggcgtcatcgcctacgccaccgatttcgtctatgcggactttgacgaacttctcgcccccgcggatacgccgcggctggttatcgtctgcgacggcattgaggacgtgcacaatctcggcagtatcctccgcgtggcggagtgcgtcggcgcatcgggcgtcgtcattcccaaaaacaagagcgcgcaggtcaacgagagcgtcatgcgcatttccgagggcgcggcgaatcatatcaagatcgtgcgcgtgccgggcgtcaactacgccgtggacgaactgaaaaagaacggctactgggtctatgcgctcgaagccgcgggcgaagatatttacgcttccgacctgacgggcgacgtcgccctcgtcatcggcggcgaggacagcggcgtgggcgcgctcacgcaaaagaagtgcgataaactcgtatcgctgcccatgttcggaaaaataaattccctcaacgcttccgtcgccctcggcgtcgctgcgtacgaggtcgtaaggcagagaaaatgtccgacgaagaactgatccgcctcgcgcagtcgggggacgcgaccgcgaccgaaacactgttgcagcgctataaaaacgcggtcaagagcgtggcgcgcagtttctttctggaaggcggcgaaacggaagacctcattcaggaaggcatgtgcggtctgtacaccgccgtgcagaacttccgcccgggcaaaatgagttttaaaaacttcgcgtttctgtgcatttaccgccgcatcgtcagcgctgtcaggagcgcgacgcggcaaaagcacgaccctttgaacaagtccgtttccctgaccgacaactttaccgaggaacgcatcatttccgatctcgatcccgaggagatgctcatcggcaacgaatcgcgcaaagagttgatggagagcatgaaaacatacctttcggacggcgaaatggaatgtatccgcctgtatatcgaggggcacagcctgacggagatcgcctcgcgcacgggacggagcgaaaagagcgcggacaacgcggtgcagcgcgccaagaaaaaaattgcgaaaaaactggaagaggagcgttgaaatggcatatcttgccctttacaggactttccgcccgacccgtttaaacgaattggtgcggcaggaacatatcgtcaaaattctgacgaatcagatagaaacggggcgcgtgggtcacgcgtacctcttttgcgggccgcgcggcacgggaaagacgagcaccgccaaaattttcgcgcgtgccatcaactgcgagcatcccgtaggcggttcgccctgcggcgagtgcgaagcgtgcaaggcgctcgccgacccttccaatctcgacgtcaccgagatcgacgccgcctccaacaacggagtgaacgagatgcgcgacttgcgggaaaaggtgcagtatccgcccgtttcctgccgctataaagtctatatcgtcgacgaagtgcatatgctctccgattcggcgttcaacgccctcttaaagacgctggaagagccgccaaagcacgcggtctttatcctcgccaccaccgagccgcacaaactgcccgccaccattctctcccgctgtatgcgtttcgacttcaaactcattccgcagagcgatctcgaggagcacctcaaaaacgtgctgcgcgccgtcggcaaggaatacgaggaagaggcggtcgcggcgatcgcgcgcgcgggcgcggggagcgtgcgcgacagtttgtcggttgccgatatgtgcatatcgtacagcaagggcaaactgacctatgcggacgtgaatgaggtcttgggcagcgccgatttctatgaaattgccaaactcggcggcgcgctcttgcacggcgacgcgggcgaggcgctcacgcttgccgaacaggttatttccgcgggcaagggcgtgggcgttctggcgaaagatattctggtgttcttaaacaacgtttccattgccaaagcgtgcaagaacgccaattccatactcaattttcccaaggagatgttcgatcagatcgtagagatcgcggaggactgcgagggaaagcgcgttttgcgctgctgcgagatctttgcgtctttggaaaacgaactgaaatattcctcgtcgccgcgcattcttttggaaacggcgatcgtcaaggcgggcatgcccgaaacggataacgacgtatccgcattggaaagcaggatcgcggcgctggaagcaaaactgaaaaatctctccgcgctcccgcgcacggaaatttccgcgccgtccgcagcgccgaaagtgcggctcgaagtcatcgaggaagaatcgccctcgttcgatacgccctttacggcggaagagccgcccgcagacctcttttccgcgagaaaacctgcggcggagagcgtcaacgcgttggcggaagacaagcggaaaaacgctttcggctacttcatgcgcacgctgcgcacgtcctcgcgcaacggcgtgctgttcaccatgtgtcaggatctcgaacacgcgtttgagggggataaattcgtgctcacggcaaaaaacgaagtcatttaccgttcgttgagccgcgaacagcaccgcaagaccatcggtgaagcgttggaaaagatcggcattaccgatttcgatatccgtatgcaggggcagaaaatcgacggtttcgaagaggacgtcgcgcgcctgaaaagcgcgtttccaaacaccgatatagaagaaagataaaaatttgcgaaataggagaatcatatggcaggatttaaaggcggcatgggcggcggtaacatgcaaaatctcatgaaacaggcgcagaaaatgcaggagcagatgcaggaaatgcaaaaggctctggacgattgggagatcgtgggcacgagcggcggcgaggcggtcgtcgtgtacatgaacgcgaaaaagatcatcgacggcatcgagatcgatccgaaagccgtcgatcccgaagacgtggaaatgctcgaagatctcgtcatggcggcgatcatggacggctataaaaaggcggacgccgtttacgaagaaaaaatgggcccgttcgcgggtatgggcggcatgggaggacttctgtaatccatgcaggtttttatcgagccgatcggaaggctcatcaacgaattttccaaacttcccggcgtgggaaaaaagagcgcgcagcgctacgcctataagatcatcggcatgaccgagagcgaggcgcaggagtttgccgccgccattctcaacgtcaaaaaaaaggtgaaatactgcaagatctgcggcaatttcaccgaagaagaagtttgcgacatctgtaaagagcgcgacggcaaaatcatctgcgtcgtcaaggagccgaaagacgtcatcgcgttggaaaaactgcgcgaatttaagggcgtgtatcacgtgctgcacggcgtcatcaaccccatggagggcatcggccccaatgacatccgcctgcgcgaacttctggcgcgcgtgggcgaggggggcgtggaagaggtcattctcgccaccaatcccgacgtggaaggggacgcgaccgcgctttatatcgccaaaattttaaagcctctgggcgtgaaagtcacccgcctcgcgcacggtattcccatcggttcggagatcgaatacaccgacgacgtcacgctgtcgcgcgcgttcatcgagcgcaaagaagtatgattacgaatgattggaaggcggaagccgcggcccgcctgcaacgcaaaaatagaattttgttttcgcccaaagacgcgtttttgagaggacttgcaagacgttgcgccgaacagacgcataagactgtcgtgctgtgggcattcagtttttccgaagagatcgtagaggatctcaaacggatttatccgctcgaaacgcgcccgcaggaaactttggaggcggcgcgtttatgggcggcaggaaagatcaaaatgcctcgcgccaaagcggcgattctcgcttgtcacgctttggcgaatgagcagaatgcggaaggcggggcgttttgccatgccctggggcaggcatgttctacggtgcataccgcggggcatgcgatgggactgtgcgtatatgaattgaccgcgcttatacataagtacggtttggatcattgtgatgccgcgatagaagatcgtcggcgcgcgtatgaggagcgtttgctgcatttccgcaacgcggactgcgaagacgcggaatgggcgaattttctgaaataatgtatttttcttatgcgccggagcgcttaagaaatgaatgagaggtattgatcatgctgaaaatttccgttctgggctgcggccgctgggggtcgttcattgcctggtatctggcgagcaaaaagggctacgacgtctattcctgggggccggaagaggattattcctatcaggtcttgaagtcgacgggcaaaaacgagtacgtcgctctcgatccccgcatcacgctcacctgcgatctggaacaggcggtcggtcacgcggatatcgtcatcatttccatcagttcgcagggcgtgcgcggctttatcgacaagataaaagcattcaacgtgtcggataagacctttgtgctctgcatgaagggcatcgaggtggaaacgggcgaacggctttcggagatcctcgtcgaaaaaggcatttccaaagataagatcgcggtttgggtaggcccgggacacattcaggatttcacggcgggcattcccaactgcatggtcatcgacagccataacgtggaattgaaaaagtttctcgccgacaacttcaagagcgatctcatccgcttttattacggaaacgatatcgtcggtacggagatcggcgcggcggcgaagaacgtgatgggcattgccgcgggcgttctcgacggcggcggcgtttccacgctgaaaggccctctgatgtcgcgcggcgcgcgcgaggtggcgcggctcatcaaggcgatgggcggaaacgaactttccgcgtacgggctcgcgcatctgggcgattacgaaacgacgctcttttcccgccattctcacaaccgtatgtacggcgagatgctcgtcaagggtgaaaagtttcagaaactcgccgagggcgtcatgaccgccgcggcgatgaaaaaactgggcgaaaaatacaatgtggaactccccattaccgatgcggtgtacgaggtgtgtttccacgataaagcgatggacggttcctgcatggacatgatcttgaaattgttctcgcgggatacgaaattcgagttttgatatgaaattattattcaagcagcgctttttttcctggttcgacagttacgacgtttactacgaagacgggaccgtggcgtatacggtaaagggcgaactttcctgggggcattgcctgcgcatttacgattcgcggggtgcttgcgtcggcacggtgcaggaaaaagttttgacctttctgcccaagttcgaaatgtacgagggcgagcgatatgtgggcatggtctgccgtaaatggtcgtttctgcggcccaaatatcgtatcgagtgctgcggctggaacgtcgaaggggattttttgcagtgggattatacgctcgtcggtacttcgggcgtcgtcgcgcgcgtatggaaagagatcttgaactggacggatacttacgtgctcgacgtcgcggatcccgccgacgcgctccgcgttctcatgttcacgctcgccgtggacgcggaaaagtgttcgaaaaactgatgctttattttttttcgagcagcggaagatattcgttccagcggtattcgcggatgggcatgggcttttcgttatcgaaatagagcaccagcgcgggccgtatcctgccccacttgtccacgaaatcgtagtgcacgaggtgaccttccgagatcagccgttttgccttggcgtgataattgaaatacatagtttcag

SEQ ID NO: 157 - DNA, 32759 bp, Unknown
  16S sequences of unknown bacteria
attttgttacaaaacttaacataaaaatacgggactacatagccggaaagcaaaatttgtacctgaacgatataaattatctgtccggacttataggccttgacaactggttcagccttgaaaattggtatctctataaatacgcctgcgccgttgacaaaatcccggatttggcattttcaatcgcaaagattattaaatccacactgggcaagaacaaaaagagcgttatactcgatttggataacaccctttggggcggcattataggcgacgacggtgttgaaggcattgccataggcaacgaacagcctgcgggaatgagctataccgaattccaaagctatcttaaaaatttgcgcagcttgggcattgttttaaatgtttcgtccaaaaacgaagaagacattgcaaaacagggctttacaaagagaaccgaagcacctttaaattacgaggacttcctatactttaaggcaaactggaaccctaagagcgtaaatataagctctattataaaggatatgaacatcggcgaggacgcctttgtatttatagatgacaaccctgcggaaagagaaatcgtaaaacagcagttacctaaaattcgggtgccggatgtaaaaagcccggaggaatacatcaaagctattgatcgtgccggctattttgaaataaccacatttaccgatgatgacaaaaagcgcaacgagcagtacaaaacaagggcaaaagcacgggctgcaatggcagaatttaccgactatgcctcatatcttaaaagccttgaaatgacaggtgaaatcggcaatttctccatggctcatatagagagaatcacacagcttatcaataaatccaatcagtttaactttacaacaagaagatataccacatccgaggttgaggaagtaatcaacaataaggacaaatatatttcctgctatgctaaattgattgacaaattcggcgacaacggcataactacctgtatgattgcctcggtaaacggagatgttgccaacattgacctttgggttatgtcctgccgtgttttaaagcgtgatttggaactgcgggtattcgattatcttgttgagcaatgtaaaaaacgcggtattaaaaccattgaggccgcttacctgcctactgccaaaaacgcattggttaaaaatcagtatgaggaaatcggcttaaaatgcgtgcttgattctccggagaaaaagttgtatacttttgatgttacccggaattatgaaaacaaaaataaagttattgatatgaaagaggtttaataatgacaagagatgctatttatgaaaaattgacagttattttcagagatatttttgatgacgaagatattgaaatcaacgacaacacaaccgcacgggatattgaagactgggacagccttgaacaaatcaatcttcttgttgcaatggaaaacgaattcggtattaaaattcctcttgcggaagtaagcaagcttgaaaatgtaggccaaatggttgatttggttgcaaaacttatcggttaataacttttaagggcggtttacccgccctttttgttgcacttttttaaattaaatgctatacttttaatataaaatttacactgcgaggttaaaatgaacagttacaaatttgccgacctttccgtcggtatgagcgaagaatttacggttacaataaccgaagaaatgatggataaatttattgatataaccggggatgtaagccctattcatgtaaatgccgactacgccaaggaacacggctttaaaacaagggtgtgccacggtatgctgtttggcagtatgttttctacccttgccggggtttatctgccgggggaacactgccttttgcacagtgtggaaacaaagttttcaagccctgtgtatccgggggacatattaaaagtaagcggtaaaatagccgaaataaatgacacatttaaggttgtaaccgtaaagggtacaatcacaaaccaagacggcaaaaaggtttgcaaggcaaatattcaactgggggtacgccggtaatgtacacatatttaataacaggggccaccagtgacataggtcttgaacttataaaaaccgttgccaaaaacggtgacaggtttattcttcggggttttggcggcagtgaaaaaatcgagggattttgcagagaaaatcacattgatttcgactattattccgttgacctttcaaaccccggcgacacagaaagatttgtaacccggcttgacgaaagcggcgttatcccaacccactttgttcatttgccggctttaagggttgtaaacacaaaattcaaaaactttgatgaagagcgctttttagccgatgtaaacgtgcaaattttaagcgccgttaaaatctgcaaggttattttgcccaaaatggcaaaggcaaaattcggcagggttttatttatggcaacaagctatgttttggcaaacccgcctaaaaatacggcggcttatgttattgccaaaaacggcattgtaggccttatgaaaagccttgcggcggactatgtttcaaacggcataaccgtaaacagcgtaagccccagtatgattgaaacaaaatttttaagcgaaacaagccatattattgttgaggccgcagcagcagctcaccctatgaaaaggaacgcaaaacctgatgatgtagtgcctgcaatggcgtttttgttaagcgaagaggcaagatttataacgggagttaatttgccgattacaggaggcagtattattgaataatataaaaagagttcccctttacgaaaaagaacttgtagtaaatttcttaaacgaaaattggggcagtgttcacccccttgtaaacaaccgggagctgtttaattactattatgttgacggcgatatgacaaacttttatgtttggcaggaaaacggcgaagttttggctgtttgcggctatatcaaatgcagtgaggaagaaaaaagcgacatttggatttccatttggtgccggaaaaaaggcgcaaacggtgtaggcttacagcttatgggagcaatgaaagagctgaccggtgcaagggttatgtcctgcaataatatcagacccaatacaatggtgttctatacttttttaggctaccacccggataaattagaccactactatcgacttgccgatttgccaaactacaaaatggcggttgtaaataataaaataattccccggtgcaaaaaaaagcccgatgtttggcttgaaaaacttgccgatataaaccgggtaaaagcggtatttgaaatcccccatggcctaaaaccgcagaaagattattggtatataaacaagcgctattttaactacccacactataaatatgatgtttacggggtgcacgatggcggttctgttccctgccttgttgtgtttagagtgaacgaaagcgacgagggcaaggttttgcgtttggttgattacataggaaaaccggaggactttgttctgttaaacggatttatagacgatttaattgcggaatgcggccgggagtactgtgatatgtacagctttggggtaaaaggtgaggacgcaggatttgtgaaaagacacggtgatgaaaacattataccgaactatctcaatccccttttgcaaaaaaatatagattattatttctttacaacagaccggcagggctttactatgtttaaggccgacggcgaccaggacaggaaaaatttgggataaaaacacctcttacaaggcaagtgtcttgtaagaggttattttttcactttttattttgtaaattcggctttatatttttctcccggaatttaagcaatgtgtagagaattataacatcaataggtatcattgccagatttttgaaaattcgcagaggcaccataactttataagctttgccgtacattattgagagccacaatggggtcaaagtgagatttatcaaaaatgttattatcactcttgtaattataactctttttagcgttacgggctttttgtaaagtgcaaaaccgaaaataaggccgtccaacatttcatttattgtaaaaccgataaaaaaccggccatcgggcttaattatccattttaatatatccaatatgccgccggcaaacattgccaaaacaggcccgtacaaatagccggttaccgcatgggtaagtgacgaaaaacctatttgcaaaaactgatttatatgtattgtaagcataccgagaatgggatttagcgctcccaaaagagaggctcctatcaaagagtgaatgtttttcatctcttttgaggcattttttaagtattctttcatttttcgtccccctgattatttaaaatatgtattattttttccttggttgtcattcggtttaatacttccaacattgcctttttggaaagcctattaggaatattaagacttttcataagtttttctctgatttttgcggaattttcaccgccggacagccccagttcatataaatccgcatacgtcatatccgacttacgaacagtttctccggcggacacgccggcgtctttaagacattttaatataatttcccggtctatcccctctacacccaaaagcccttcttttgagggtttgtcctttcggctttcctttccctgtatccgtggcacatacacatttgttatttggctgtcacggcagacattttgcagataatttcttattttaaagcctgcataatcggaatcggttattaaaattataccgttttcccttcccaaggtttttaaaagctctttcttttcactgtctttgtaaacagaaaaaccgtttacgggaattatgatcccgtcaataatgctgtcaagttttatggcgtcatacttgccctctacaacaacgatttgagaaacatgaagttttttcatcatctgtttcctttcgctattatttgtaccgtcagcacgtacataagttgctttttgtcggcagccgaatttttaagggcaatgtcggtttccataagcatctttaaaatttcttcaagggctttttcggaaaaatgccggctgttgctcatagccttttgatagcggtagggcttggcatttttttcaaaatccttgcccaccccggtatagcttatcccctttgcctgtgcaagtttacagcggtgcatatccgcaaaacttgttgccagtgcgccgagaattgctatttcatcggtgcgcaaataaaacagattattcaatttttcaaccgctttttccgggcgcttgcggcaaatcagatctatcatatcaaaaacagaggcttctacggttttaacccctactctgtccacgatttccccggtaacttccgtgtaatttgatgcggcgcagtacttgtccgtttcatttatcaaaagccccatatccttgccgatattatccgcaatttttcttgctatttcttttgaaattgccgtgttgtttgccttacagcgggctattacggtttcctccatataacgccggtcgatttcaggcacaaagcagaagatgccgttacttttagctgcctcaaacaaactttcatattttttcgcctttatctttttatcgtcgtcgtaagaaaaaatcaatgccaggtgattataatcggtattttttacaatatcggttatattttttatgtcatcatcttttaaatttgtaagggcgccggagacaatcacaagcctttctccgaaaaaactcggtgtggaaagtatgtcgcctatatcctgccagtcagctttttcggcctcaatataggttgtaccctcttgatctattccgtttttttcacaaattttttcgataattcttctgttttcatcacagacaaagccatcctttgccaaaacaagccagacattttttaggtttttgtcggttattttatatcccgctgccaaagtttgtaatatcctccacaattctatacttaccgttttttacatttatttttaccgtaagattactgtacaattcataagcgccgctactttttgccgcctccgactgatttttaagcacagggtaaaagaagtaaatgttatccgccaaaatatcgtcggtagcctccgagccgaagaaataaaaatcggtattttcggtttggctgtagccgtcaccgtgaccgaaagcaaatgtgacctcggaaatatttacaagataatcctttctaacctttgtactgcgccccgcaagtgtgaaaaagccaaaattcaattcctcatcttccaaaatatacactctatccgaaagatttgcggtatttgccgtatcggcctctttgggtacgcaataaataacaccgtcaaaataagaaattttttgattttgcaaaatcccggacaattttgtatccttaatattttcgcttaaaataagatatttttctctatttgactgtaatataaatgatgtttctctgccggaatcaaaagcggtaactgttaccgtgtttgcgttctttaaattataacatacaaaacacagtaatgtaaccataaatatgtaaatttttctctcaggtgattttttaaactgtaaaagaattacagcggctatcacagcacaggaaaaaatcaaaaatcttatcttatccgtagaaatgtcaacgaatgcaaaagaaaaatgtttttctataaaatttgtggcaaacaacagcaaatctataaacaatttattgattttaactgcagtaaatcttgaaataacatttattatagggattttcccgattataagggtaaaaaatgaaagaacgcagacaacagtgataaccggcgacagcagcaaattaaaaatcggtgccaaaaggcttgtttccattcctaatattgccataaacgggcttgtaaaaatcgctgcaaatgcggaaattatcaatgccgttaaaattttaccgaatcccttttgatttgcaatatccgctgcggtaacaaccccgaagtaggcgctgtatgataaaagcaaacttgcatttatcgccgagtatggattgaaaaataatgtaacgccgattataaaagctaaaaccgtgtagttatctgtttcaagaagtagatttctgcctaaaagataggaaatcgtaagcacccctgcccttattaccgatggtgtaaaaccgataatacccataaagataaaaataaacaagcacaagataacatttttaatctttttacttacaggcaaaaaggacattaaaagacccattgcccgggaaataatgcctatgtgtaaacctgaaaccactaatgcgtgggctatgccgcttaccttaaaagattgttttatgtcaccgccaagttcttctttttcgccaaggcctattgcctttacaatttgcagataacggccggtgtatagtttttgccggctttcttccagtatgctttttaaatcggccaacagcaaacaagacctgccgcctaaattgtcggcaagccgtatgctatcggctttaaaatatccgtaaatgccttttgaataataataacttttatttgtctttggagaaaattttgtaaaattccctgtggcagttatatagtctccgctttcaaattcttcgtcaatgtaaatattgactttgaaatttttaaatttttcaccgtttttctcctttatgcttaccgtaaaacagggtacggcggcagttctgcttacagtttccacacggcccacaatggaaacattatcttccgccacaaacttttcgaccctattttcgataaagccgttataagcggacaaatatgccaaggccgtacaaacacttacaaaagataaaagcagttgctttgtatatctgtcaacggtgattttatgaaaaaagacgaatacagcaaaagatgccaaagtcgtgtataaagccgaccttggcatcgtaattgcaatatacaaccccatcaaagccgaaaaggcaattattgctaaagtccttttcaacttatttttagcccggaggccaacccatattgcgctttgcaagcatgtgcatatggaaatgctgcacagtttggccgcctacaacgccgcagttggctacaattctgtaaccatcgtcaaggtgttcttgctttgcgattttagctgccgcaagaaccattttgcctgcaatttcgtagttatcatccgttatccgtgccgggctttcgatgtgagcctttgggaaaatgataacatgaaaaggtgcctgtgggtcaatgtccttaatggcaattaaatcatcggtttcatagacaaccgttgagggaatttcacccttgatgattttacaaaaaatgcaatcgtccatttaggtatctcctttcaaaattttaaatttacaaaacgaattaaattttaaatgttacggcacaatttataaaatcgtgccgtgttgcctttaaaagtcaaattataacatattcttgataatttccggaacctgttttacagcctcgtcaacaagagtgatgtcctttgcgcctgccatagcaaaatcaggtttaccgccgcctgaaccgcctgttacggcagccacagcctttgcaaccgcaccggctttaaccccccgtgcaactgcatctttgccgcagcttacggcgattgaaactttaccgtcgttttcaccgcagataaccgcaatgttcttttcgtctttttcttttattgttgtgcaaatccgacggagagcgtctgccggtgttttttcaagtttagcggcatatactttaaaaccgtttatctcaacgacattcttttcaagccggtcaatcttgcccatggcaatttcgtttttaagctcttcgttttctttctgcaatgccttgtattcgtcaacctgctgtgcggctttaactgcaagctcggattcgttattgagtttcaaaacctttgaggcatcagcgataagctgctctttctctttcaaaagttccaaaacaccaaggcttgaaactgcctcaattcttcttacgcctgcggcaacacttgattcggaaacaatcttgaacaaaccgatgtttgcggtgttgcttacatgagtaccgccgcaaagttctgttgaggcatcacccatttttacaactcttacttcactgccgtatttttcgccaaacaatgcaatagcgcctgagttctttgcttcttcaagacccataatctgtgttgtaacagggatagcctgcatgattacggaatttactatatattcaactttttcgatttcttccgctgtcatagcgctgaaatgcgtaaagtcaaatcttactcttgtgctgtcaacaagctgacctgcctggtgaacatgagtacccaaaacttctctcaatgccgcctgcaaaaggtgtgcggatgagtggttcgcctgtgtgagttttcttgtctttgcatcaactgcgcaagttgcactgtcgcctacttttataatgccgttttcaagtgtgcatgtgtgaacatacaagcccttacctgtctttttaacacctgtaacaaccaaagttgcgccgtttacaacaattttaccgtcatctgcaacctggccgcctgcctctgcatagaaaggtgttttatccaaaacaaccaaaatatcttccttaggttcttcgtctacggaaacggcatctacaaactcgtcctcataggcgattgcaagaatctttgaatcgcttacaagtgattcataaccaacgaaatctgttgaatcaactgtcaatgtcttaaacaaatcgtcggcccagcttatattatggttctttttgcgtgcctctcttgctctgtcggcttgttctttcaacttccgacggaaaccttcttcatcaacttcaatattgtgttcttccaaaatttcctttgtaaggtcaaatgggaagccgaatgtatcgttaagtttaaaagcctcaaaacctgagagaactctgtcctttgcctctgtggctgtcttttcgatattgtctataagagttgaaagtcttgaaataccaaggtcgattgtctttgaaaatctctcttcttctgtgaggataacctttttgatataatctctgttttcgttcaactcagggtaagcgtccatgctctcgttgataaccgtatctgcaagctccgaaaggaacattcccttaatgcctatcattctgccgtggcgtgcggctcttctcaaaagacggcggagaacatagcctctgccctcgttactcggaagaacaccgtcggaaatcataaatacggtacttcttacatggtcggtgataacacgaacggaaatatcctttttatcatctgtcttgtacttataatcggcaatcttttcaacctctttgataacattggcaatgctgtcgatttcaaacatgttgtcaacaccctgcatgatgcaagcaagtctttcaagacccatacctgtatcaatgttaccgtggagcattttttcgtagtgacctttgccgtcggaaatgaactgtgtgaaaacaaggttccagatttcaatatatctgtcgcagtcacagcccgggccacaatccggtttgccgcagccgtatttttcgccacggtcaaagtaaatttctgaacaagggccgcaaggacctgaacctatctcccagaagttatcatctctgcccaaacggcgaatgtgtgacggatcaacgcctctgtggtgttcccaaatatcccatgcctcgtcatcgtcttcaaaaaccgttacatacaaaagatcggtagggatttcaagaacctgtgtcaaaaattcccaagcccattttgttgcgtcctctttgaagtaatcgccgaatgagaagtcgcccagcatttcaaagaatgtgccatggcgagccgtgatacctactctttcaatatcaggtgttcttatacatttttggcaggttgttgcacggttgttaggcatttttgcctgacccaaaaagtattttttcagcggagccatacctgagttaatcaaaagcaagctgttatcgtcctgtggaacaagagaaaaagagccaagtcttgtgtgatctctgtcccgatagaatgagaggaacttttctctcaaatcatttacggaagtccatttcataaaataatcacctctaaatattttaacaaaaattgtgaaacaaaaaatcccataagcaaatattgcttatgggacgatttactaaccgtggtaccacccaaattatacggcacagccgtatcacttgaaaatgcgttaacgccgcactgcggacagcttatttcgctgtcggcaaaagggtggctttcaatattgcctttaaaaccttgcacctgccggtttctctctttgaaaagacaattatttgtattcccttttatagccgtttcactatacaaggatattttacttattttcttacgatttgtcaaccgttaatcggtattttcttcaaataatttcatatagtatagattatcgcatattgttttaaaaatcggtgcggcgcttacactgctctctcccccgtcataaatacatatacacaccgtgtacttagggttgtcccgcgggtaaaagccgcagtaccaagatgtgtatatttcctctccggcattatttctcttacctgtttgagccgttcccgtcttgcctgcccccgttaaattattcggttttgctctgcctcttgcgccgttttcgttgacggctttaagcatttccgtcactttttttgccgtatcggccgaaattattctttttgaataccggctgtaaagatttgttttttgtttttgggtgttcttatcataaatacccatggcgatttgcggccgaatatacacaccgccattggctatcatattcatatatgcggcgatatgcacaggggttacggaaaatcccccttgaccaaaacatgtttgtgccagcactccggagttatttatctccgaccatgacgggaaatccccggctgacgtacgatattcttggcacagttccaaatttttaccgaagtttgcaagacaagcggcgtttttaaatccctcggctttgttttcaataaaagcgtcaataaaataacagttacatgaaaccgttaaagcctgctccatattcacctgcccatggggcagattgttggcgcagtgataaatatgtccgtttatttcggtatagcctttgcagtcgtaaattgcccggctgtcaaagccgttttccagcaaaattgccgcccaaagaggctttataacactgcccggccgataggcggacagagctttatttaccattggagaattatcggaactgagataattttctatatttgtggcgtcatagcacggggcggaaaccattgcttttattttgcctgtttgagtttcaagtattactatactgccgttttttatattttcttttgcaactgcctcggccatacgctgtatgcccttttctatggttaaggacaaaacatcttctttgtgagaaagcacggtttccacatcgccgtaaatttctccgttgccgtcaacattaaattctatggaaaattgttgccctttatcctttaaaagtgtatttaatgccttttctaaaccggcaacgccgttgccgtcccggtcggtatatcctataagattttgcgcagcattatttgcggaatatctttttgtggtaacataaattttccgccggtcggtgggtttatcaaggcttacaagaacattttgtgtattttctatacttttaagaaatttttccctgtccgccggttgaatattttctattattttatttatatcggtttcaccggttataagtgcaaaggtttgattttcggtatcggttaatttgttaaaatcacaatcggttatacttgccctgcctgcggacacatcaacggtttttatatcttgccgccgtgccaaagtgctgtaatcatcgcagacaatacccaccattttaagctctataacaaaggcaaaggccacaaaagcgcacataataatcattaaatttttctcttttataaaatcaccgccctgcttaattattggcagtaaaattttaaataatcttattttaatttcaaaaattaaatgctataattagtttacgatattctgttttaaaatggaggcagttatgttcaaaaaattttcggacaatatttatattcagccggcggacggctacaccgacagacccaatgtgggatacataaaaggcgaaaaatacgctcttttgtttgaatccggcaattcacgggcaaatgcaaatcttctccgtgatgatttggaaaaacaagggcttaaacagccggatattgtggcaatatcccactggcactgggatcactctttcggtttacacgcttggaatgtgccgactattgccggcaaaaaaacaaacgaaaaattgcgagaagttcggctttgggaatgggatgacgcttcaatggcaaaacgtgttgaaacaaaagaggacattgttttttgcaatgaaatgataaagcgagaataccccgacagaagtcaaatcaaggttgtgccggcggatattgaatttaccgacacaatgaaaattgaccttgggggcatagaatgtattttaatgcacgccaaaggcccacattccgatgaccgggttatatgctatataccgaaagagaaatttatatttttgggcgacagcaacggaaaagatttatacggtaagccttggcattttgatatagaacatgaagaagattttatgaaagaagtttcggctattccttatgacaaagaagttgttcgggaatatttagcttttcttgataatttggattttgaaaattgtatcggcggccatgcggatataatgacaaaagaagaattataccggtctttaaaataattattaaaaggatttaagcatcgcacaaaaagccctgtaagcaaaaattactaagcttacagggcgatttttatattttaaatattttcaaatgtttgataaaccatgcggtcgctgaaaaaatcgtcaaatgtaaatttaccaaatacaggcgtgtcaacggtgtatgtaaaaatgttgccgtcttggtcaaagccggtcatctctttataggtgtagcccaccgttgcaataacataatcatttgtcattccttgaatggtagccgaaagaattttaccatcattgtctattttaaatgtgttttttcttatttccttggtgtttaaatctatacaatattttgtagtgtcccagtcgcttatatcattgttaaatacactgttgtcaacgacaaccatatcgtcacaaatccggcgaatatacgaatttttaccgccaaaaggaatatccatatactcctcaacttgtccgtcctcggataaaaggcaaagtttttgttcctcataatttaaaaagtaaatttgatttttgttttcaaaaacatccccttttcccttaaatccaaatataggtttgcccatatttccgtcttgtgcggcaaggtaaacttttactgtgcccatatcgtattcggctatcaaaaatttgttatttataacgccgcttaatatttgccccggctgaaatgtcaaaatcttgcttactttgcccgtatctatatctatttttacaagctgactttccatttcaactgctccgttggtatcggatgcggattcaagctcacaataaatcgagttttctcctgtaattataatatgttgtaacggcataagtaaatcggacatatcaaattcgactatttttttaccatcaccgccggacaatgacattgttcttacacttggcggaattgtatcattattgcccatagtcacaacaactattttatcgttaagtttggcgagaaaagcgcagccgttgcgaggtacaacataacttgtacattcctcactgttgtggttgcaccccagctgagagcaaagatacgaagatgtaacgctgaccgggtcgagaaattttatattgtaagaaccgtcgccgttaccctcgaaaatatatgaaccttgttcgtcataagttcgccattccggcactaacatattcggatttgtaagtgtgtcctcatagaatacgttattgtcacttgatgtggttgtatccgaactattgttatcgctgttttttacacatccaatagacaaaatgcaaattgcacatataagcaaacttaataattttttcatatgacctcccgaatttaacagaatttcatttataactattgtaccgtaggcaaaattgtaagatcttaataatcactgcatttcatcaacatatgtgtattccggcacgctgttcatataattttcttttgatataaaagccattctatactgtttacccggcattccaacaagattaccctgtgtatcataatagcttgctgtgtccaaaaactcatttacaactattaaatactcgtcatcagtttcggcggcgattgacggtgcgccgttcatttcaatatcgccgtactgggtaaatgatgttgtaggtatatggatattcataggtttgttgtattcaaaactgaaaaagtcctgtactatattttctccgatctcatcttcattgtaatagaacagaacgccgtcatttgttgcggttattataccgccaactccgtgatttggccgtaaatcttcacagagtaaagtgctttcccctgttgtcaaatcgtatttggtaagtgttttttcgtttgcatttaccacataggcacaatcaccgttatacattcttgggcatctgctgggggttgcaaaaacagtttccaattcttttgtatcaagattatattttaatactaccgttccggcttgtgacagggattccatttcaggtttccagtcccagtattctatatataattctcgtttttcgccgttccgcgccacaattttaggcccaatcaaatctaattcatcggataaaatttcgtcccctgtttcaatatcatagcatttcaaataagttttgttcactgttttgccgttattttcttcgactgtttccataatcatatatatttcgttttcgccgaaagcacaatgaccggtaaaactttccgacggtttaaatcttcgcaccactcgtctgttttcaccgtttaagtccatcacttctattcttgccaaggcctcgtcgccgtatctgtcataataataacttccataccctccgtaatatataacataaagtttgtcaccataaggtgtaggtgaagcagttcctgcgtatggggataaataagatgtacatgtttcgtcactgtgggtgcactcggcacggttgcaaaaaaatatatccgtatgtgttttaaaatccacatatttaatattctgtacaccgtttgctcctacttttctataatacataccgttttcattactcttgccaatacacatataatcgttcaatacaccgatttctgaattcggagtatctgtattactgtctaattgatttgctttcgatgtgcaacccgataaaatgcagcataatgctattaaaaaaatatatattattcttttcataattactcccttatatgttaagaaaggcaacctttcgattgcctctcacttttcaaatcaatttccgcttatccaaatagaacttgtacttgtcgtccatttaagctgtgctccatctgccgtaccgctgtcatttaagaatagtcccttttgagtaagatatacacgataacggccgttattgttgttacgaattgcaatcctcttaactttataatatcatacaatacaggtgtatttcaagttacataaatagcaaagtgtaacaatgttacacattcataaaagtgtaacgaatattatcaagtcattgacttaaatacaaaataggtataaaatataagtaagaaaatacttatttttacgggggagtttatgcccaaaaaagcagatgcaaagaaagcttatttagatgcattaaataaattattggataattacacatataaagaaatatatgtgaatatgatagcagataaaacatcttttgcaagaaaaacattttatgacaaattttccggcaaagatgatttgataaaatatgccgttgaatgtgcatatgacgatgccaaaaatatgagtaagaacggctttgcaaaccaaaacgactttttaaattgcatatgtgccaatcctttatttaaaaaaatgctcaaagatgatgaaagcaaatataaattatatataataatgcaacgcgtacttgaagaaaaaattaaattaagcgttgatgccgataatcaccccgaattaaattccttgtccacaataacaagcttcgcctctaccggggcggcgatgtatgtattatccgggtattataaagaagatgacacagcaatctctcatttttttgctcggctgaacgattactggtcttatttgtacaaaaacataaataagaattgatatataaggaggaaattttatgaattcttctattcttacagttaacgaactgaccaaaaaatactattcaaagtcagttaatttatttaataaaaaaacgagtgcaaataaagccctggacaaggtaagtttttcgttgtctccggggctttatggtttattggggccaaacggagccggaaaaagtaccctgataaatattatcaccgggtctttaaagcggagcggcggcagtgtaaagtggaacgatatttcaatcacaaggctggggaaaaaataccgcaaaattttgggatttatgccacagcaacaaactttgtacaattcttttaccggcaggcaatttttgctttatatgtgtgcccttaaacagataaaaaaacaggaagcccggggtgaagttgagcgtgttgcccggcgtgtaaatttaaccgaccggttagacaaaaggcttgacgagtattccggcggtatgaaacaaagacttttggcggcaggggccacattgggcaagccgaaattgataatttttgacgaacctaccgccggccttgacccaaaagagcgtgtccgtttaagaggatatatgaaagagctttcggaaaatgccattgttattaccgcaacccatgttgtaagcgatgtggaaacggtggcagacgaaattttacttttaaaggagggtcatttacaggataaagggtctgttccctaccttattgacaagtacgcccccggggaaaacctggaacaggtgtatcttaatattttcggagaggagggcaaacattgagactttttctctacgagcttaaaaaaatcttcggtaaaaaagaatttattatatatattacattattattatgtgtcaatatttttcttctttggttttacacacagccaaacagcaaaacaccgccgccatctgcctaccgcaaacttaccgcagaacttgcgaatgtacctgccgccgaccgtgccgaatatatacaaaacgaatttgacaggatttccggcattttaaaaattgacggacttgtaaaaagttacggtagaaattctaagggatttcgtgatgcggtaaacggcgaatacaaagatgtgtttttaaaataccgtgatatttatgcctccggcaattatgtaaaatacgccgacagtatgtacacggaatactactttttaaaggactgcgccgccgaggcggaaatggccgccgggtacgaagattttttgactgatattcaaaataaagcggacaggttatcgcaaatttctatttttaacaaggatggcggttacgatattttaaatatacaggccaccgcaaaggcataccgtgatatgtccggcattgatatagattacagcccgcaaaaagggcttgtaactgcgataaactttaaatacagtgatgttgtactgatttttgcaatgattttgcttgcgtcttttatcgtacgagatgaaaaagacaacggtatgttataccttatacgcacaacggcaaacggcaaaattaacacggccgccgcaaaagccgccgccatggcagttgctctttttataactgttacactgctgtatattgtaaatttactgtactgtaattttacattcggattgggcaatttaacacgaacaatacagtccgtaccataccttatgcgcagcacaatgaaaataaatgttgcacaatatttgcttatatttattttcaccaaatgggtggcggcatttatatgcggttcttggatattatttgcaatgtttattacaaaaaatgtgtttaccggttatgccctatccttggcaatgccctttgcaaacctgcttatacgcaatgccataagcgcaacaagcaaatataacgccgtaaaatatgcaaatttaataagctttttacagaccaatgaaattttaggcggatatcgaaatatttattggtttaataagcctgtaaggctgtttttggtggaaataatcgcatcggttatatttatggttttcttcttggcgctttttttgctttctttcgagcttagcagacagtccaaatcaggaacaagaaaattgaagcttccgttcaaacccaaggcaaaacccacaacggttttcagacaggaaaattacaaaatgcttgttatgaacggcggagcttttgtgttgcggttgtttttcggctttcaaatttatacagcatatacagcggaaaattatattactgccgaagaaatgttttacgccaagtatatgaaagaaatcaccgggccatatgatgaacaggcaagagattatttgacagagcaatcaaaaaaattctctgatatttataaagctaataagctgttgcaaaccggttttataaacagccaagagtatgatatgatagcctacgcagactacggtttaaagatagagtacgatgttttccggaaggttctgtccaaagtaagcgaccttaaacgcaaccccggggcacagcttgtctacgaaaccggatacaacaagttctttgattttgaagacattttagatttgaaagactatatgataacggttttggttattaccctgctgtttgccggtatgtttaacattgaaaaatcaaccggaatgaacaaggttataaaagccaccccattgggaatggaatacacggccaaatcaaagatgaaaaccgctttttattgggatattgttgtaacagcagccggaattttgcccagattttggcaaataggcaccgggtatggctttgtgggcttatttgtaccggcattgagccttgaaaaacttaaaaatttacctgtatttgtacccattgtcggagtgatggttttgatgatcctggcaagatttgcggtgacatttacactgtcggcggcagttttggctgtatctcaaaaaaccgaaacctacctttcatctgttatgttctcgctgttattgcttgaatttcctaccctactatattatttaaatgtaaagtgggcaaagtggttcacgctttatgcgcctttccatatcattggcagtttggaggaacctacggcaatttttgtggcatttgcttactcgttaatagccggaataatcatttacaaagtatatgattatttgataaccgaatacggcgtaacattataaacttaaatttatatttaataacggcaccgaaaatttgaaattctcggtgccgttattttttattttgcaacaaaattatatattttaaaccttataactcatcataagaaacctttttatatgcgttgccgtcaaggtctttaaaaatgatttcatcatctgttataacaatatagctgtgtgcgctgttttccttaggaatggaaaccgaacccggatttatgtatgtgcaaaggtcggttttttcgcaagcgggtatatgtgtatgaccgtgtaaaagaatatcacccttttttaacataggcaaatttttcaaattgaaattgtgaccatgggtgatgaaaaccattttatcacgccagtacaaaaaggcataatccgcgagtatggggaactttaaaaccatctgatcaacttccgtatcacagttgccccttacgcaaaggatttcatctttaatgtcattgagcatttcaataacctttttaggggcgtattcctccggcaggtcatttctcgggccgtgatacaaaatatcacccaacaaaatcaatttatcggcattttctttcttataacagtccaaaaatttacggcaatataacgcagagccatgaatatcggacgcaacaaccaacttcatatatgtatctccttttagaattgttttaattttactgcctacattttaccacattgccaatgtattgtaaagaattgtattataatattgacagttctttttagatagtttaaaatttacttataacataaaatgtgaggcaaatgctatgacaaactcaaaattaaaatccgctgttgaggccgcatacaaaatgtgtgacgccttggagaaaagcgaccggtgggataagagcaacaccgctgccgcaagggaaattttcagaggagaactttttcattttcttttaaatttaagtttttatgacggaaaaataaccgccggggaatccgattttataaaagaatatttaggctttgactacaatataaaagaaatgcgtgaatacgccattgccaacagaatttacggcacaaattacgcaaatcaagtgccgtacacctttaaggcatttgtcaaagcgtcaaaagacccgaaaacatgccaaactttaataaacttataccgttttttaggcacggaatttttaaagtgtgacggcataaccgacggcgaggtatttaatcttaatctttactgtgaaaatttgactaattttgcaaacggtcggtatgttgacgatgttaatttgacattgagcgattataaaaacgactccaaaaaggtaagtctgcctaacaacagcccaaggggtgaaggtttcggcggcaatttccctgttgctggcaaatcaaaggccgaaaaagccgagaacaataaaaaggaggagccggaaaaaaccaccgaagaacttttggcggaattaaatgagcttgttggtcttgaacaagttaaagaagatgtaaacagccttataaatcttgttaaaatacgcaaaatcagacaagagagaggaatgtctaccccggccatgagccttcacatggtattttacggcaatccaggcacaggcaaaaccacaatagcaagattgcttgcaaaaatatataaatcaatggggctgttgtcaaaaggacatttgacggaagttgatcgctccggccttgtaggcggctatgtgggacagacagctttgaaagttcgggaagttgtggaaaaagccaagggcggcgtactttttattgacgaggcttattcacttaccgtaaacagaagcgccacagactatggttttgaggccgttgacactctgcttaaatacatggaggacaaccgtgacgatttaattgtcattgttgccggctacaccgagcctatggaagaatttttacaatccaacccggggcttaaatcccgttttaataaatacatcttctttaacgactacacaccggaagaattgcttgccattttggaaatgcgagcaggcaaaaacggcatgacaataagccctgaggcaaaaaaatacgccggtgaatttttcacaaaaaggtgtgaaaacaaaccggaaaactacgccaacgcaagagatgtgagaaacttctttgaaaaggctcttgtaaaccaggcaaacaggcttgccagccttgaaaaaatagaggacgaccggctgtcacttcttgaactttcggattttgaaaaaatcgaactttgattgatttaaagccaaacaaaagcctatgcaaggcaaacgccctgcataggcttttatatttaatttatatgtgttccataagtttctttttgtcaataatttctatttccttgcgagaaacctttactatgccctctgtttcaaaatactttaacattcttgaaacaacctctctggcacttcctaaatattttgcaatatccatgtgggaatatctgattatagggccgtgctttacaagttcgtcatacaagaatatagcaagtcttttatcaaaactgaaaaacaatatctgttgcattgtccacatagcgtctgaaaagcgcatagccttcattttattggaatagttttctatatatatgttgttttttctcaatttagaaaatgttgatgtaggcaagagcaatgcctctgtatcagcctctgcgtcaatataaacatcaaatgttatatcgtccataacacaagaagctgacataatgcaaacttctccatcgcctaagcggtaaagggttacttccttgccgtcctcactcattatataaattcgcagataacctttttcgataaacaaaacgccggcgcacctgttgcccgagctgtgaatattctgtcccgctttgtaacttacactgccggatgttgaggccacatactccttttcatcatcggagagattttgccaaaaatcccggtgctgtgtagccagaaactcataaatttcgtcgtgattcatttcctgtacctccgtatcagaactgatttgtaattgtaagcatattcatctttttaagctgttgctgctctttttttgtaaaagtaagcctttctttaagcacatcatcatgccgcataggcgtaagactgactatgcacttaaaagcacaaggcaccaagtcggttgaagatataccgcatatcaaaccgtttgtgccgttgcgatattccagcggattaaaaatatacaaaaggtcttcttcaagagcgttgtattgattttgcagagaaaaccttataagcatatcgctgtaagtaaccgtaccggtgtagtaaatttccgtagaataaccgttttcggttgtaattgtaattgtaaagtctgccgggcaaacactgccgccgttttcgttgcggatatttattacaccctctttaacatccgagaatctgccgtcacgataatagaaatacaacctatttgctttaaagaaagaacttgttcccccaagagcactgcccacttctattttgggctttacttcatagttaataagtctttcaggcaaaacctccaatgccgaggcaatttcaaataacgtgggaatgtcaacggttatctcccctttttcgtactttgaaacgcatgctttacttttgtgaatggcatccgcaagctgttggatgctcattttttttccttttcttatagtgcgtattctgccgcctacaaattcattgatgcctccataattgacacctcgcttttttgtttactataaattgacatttaattgataagacatcaaaattttattttctgattttaaaataccacagtttggcagatttgtcaactgataataaacctttttataaatgtgtcacatttgaattgattttacattttttgatttttcggtcaacatctgttagaatttaaatcaagttaaccgaacaggttcaaaacttttaagaatgaggatattaaaaatgagtgttcagtattttacaaacggcaacatcatggatgttgtaaatgaaaaaataatcaaaggttccattatcgttgaggacggtgttatcaaggaaatcggcgaaaacatcgcctgcccggatggtgccgaagttatagatttcggcggaaattatgtttctcctggtcttttcaactgccatgttcacacggttctctccactgaaacaggcccggacggcagaaagaaaattgcagaagccacaatcggcggcatcgaaaactgcaaaaagtacctccgttccggcgttacatatgtaagagatgtaggcggtgcagaatacattgatattgatttgagagatgctatcaattccggtaaaatcgaaggtcctgaaatggttgtttccggcaaggttatttgtatgacaggcggccacggttggacaagcggccgtgagacagacggcgttgacgatgcaagaaaagccgcccgtgagcagcttcgtgccggtgcagattggattaaaattatggctaccggcggcgttatgacaaaaggtgttgagcctggttcacctcaacttacagaggaagaaatgagagccgccattgaagaagcccacaaggtaaacgcaaaaacagctacccacgcacagggcatggagggcattaaaaacgcattgagagcaggcatagattctatcgaacacggtttctacatggacgactggtgctttgactggatgaaagaacacggcacagtttatgtacctacccttgcggctatgtactggatttatgtaaaccctgacaaggtttccgactttgttataagaaaagttaaaggcgcatttgacgcccacaaggaaacattcagaaatgcctacaaagcaggcgttaagattgcccttggcacagacgcaggcacaccttttaacgagcatgacatgacagcttacgaaatgattttgatgacacaggccggtatgtcaaactgggacgctatcaagacaggtactatcaattctgccgagctttgcagcgttgccgatacacacggcacaatcgaaacaggtaaaaaagccaactttaccgtttacggcggcaaccctatcgaagatattcagtctgttatggactgccgtatgacggttatcggcggcaaggttaaatttgcaaaataatatcggttatcttttcttattgctttttgtcaataaattaaaacctattttacatattgcacattactaaaacctcaaaatataccaaaagaaagacagctcttgattattcgagagttgtttttcttttatttttatcaattattatcaaatattattgactgcaattaaatattactatataatatagataaaagcaaagttatttttaggcttatttcataattggaggccgctttatgttaaaggacaaacttaaaaacaattactttattgcaatggttattgcctttggaattattgcactttgtacaggcaaactacatggactcatactttatgtcggtatgactgctccgattataacagcaagcaccaaacggagcaaaaatacaaagctttccttagtattacttacttttgtaatttttgcaggtgttgcctattattttaaatcttacgatctgtttattttatcagccgcaccccatttagttactgcttttaagatacaatttattcattagcttcttacttatactctcaaccaatcccctttttggggattggtttttatttgtgaaaaatgtttgacattttatataattcgattgacaaattatataacttggtgtacaattttagccgtaagaaggagatgagaaaaagatgagcaagtcagtttacagcattgttcttgacgatgaaatcataaatcaaatagatatattgagcaatcggcaaggaacaagccgttcaaatatgataaacagaatacttgcacggcatgtaagcgtgcctacggcggaaaccatggtaaacgatgtttttaagtacattgacgaatttattcaaagaaactcgtcccttgcggttcagcctttgggttccggctcgcttataaatatgcgctccgctttaaagtacaagtacaaacccacaataaagtacactgttgaactttttgaaaacggcgattaccgggggcagatgaaagttacaatgagaagtcaaaatgtgaccttgataaatattttaagtgactttttcaatgcttgggcggcaagcgaagtaaagcacaacggcgtttatcggcaggaatttgatatttccgacggcagatacacaaggcttttgaggaaaattcctcacacaggctatcgggagtacggaaacctgattgcaaagtacgccgacttgatggacaggtgtatgaagacctattttgaggattacgccacctctcctactcttgcaaagcgaaatacagaaaagctgtatgttgccaatattacgaaagacatagtcaatttataaggagtgatttttatgaatacaaataagctcacacaaaaatcggctgaagttttacagaatgcccaaagcgttgctgtaagctattcaaatcagactttacagccggagcatcttttgttgtcactgcttacggggcaggacagccttaacggacagttgtttacaaaaatgggtattgatgtaaataacttctgcgatgatttgaaaagaaaaattgccgctttgccgaaagtttcgggacagagagaggcagataagatatatatttcttccgaaaccgacagagccttaaacgacgccgagcagaccgccgcacaaatgggtgacgaatatgtatcggttgaacaccttacactgggtattattcacactgccacaggcaatgtaaaagaactgtttaggatatttaacataaccgaggacaaatttttaaaggttttgcaggaagtcagaggcaacacaagggttacatcggataacccggaaagcacctatgatgttctttcaaaatacggtcaggacttggttgcccttgcaaaggcgcaaaagcttgaccctgttatcggcagggacagcgaaataagaaatgttatccgtattctttcaaggaaaacaaagaacaaccctgttttaatcggtgaacctggcgtaggtaaaacagccattgccgagggtcttgcacagcgtattgtaaaaggcgatgtgccggctaaccttaaagaccgcagaatattcagccttgatatgggttctcttgttgccggtgccaaatacagaggcgaatttgaagagagactaaagagcgttttggcagaggttaaaaagagcgagggcgaaataatcctgttcattgatgagctgcacaccattgtaggcgcaggtaaaaccgacggtgcaatggacgcaggcaacctgcttaaacctatgcttgccagaggtgagctgcactgtataggtgccacaactcttgacgaatacaggaagtacattgaaaaagacccggctcttgaaagacgtttccagcctgtacaggttgacgaaccgacagttgaagatacaatctcgattttgagaggtatcaaggagagatacgaggtttaccacggggttaaaatccacgataacgccttaattgccgccgcagttttgtctaacagatatatcaccgacagatttttgccggataaagccatagacctggttgatgaggcctgtgccttgataaaaacagagcttgactcctcacctgcggaaatggacgatttgcaaagaaaaattatgcagcttgaaattgaagaggcggctttgaaacacgaaaccgataatctttcaaaggacagacttgaagctttgcaaaaagaacttgccgaaatgcgtgacaagtataaggaaatgaaagcccgttgggaaaacgagaagaattccattaacaaggttcaaaaactccgtgaggaaatcgaacatgtaaatgccgatatggaaaaagccgagcgagaatacgaccttaacaaggccgccgagctgaaatacggcaaattgccggagttgcagaaacaacttgcggaacaagaaaaaattgccgatgaggcgaaggattcttcactgcttcacgatgcggtaaccgacgaagaaatagcaagaataatctcccgttggacaggtatcccggtttcaaagcttgttgagggtgaaagagaaaaactccttaaccttgagagcatactccacaagagagttatcggtcaggatgaggctgtaacaaaagtaagcgaagccatactccgttcaagggccggcatacgggatgaaaagagacctatcggttcattcctgttcttaggtcctaccggtgtaggtaaaacagagcttgccaagagccttgcggaatgtttgtttgacgatgaaaagaacataatcaggattgatatgtccgaatacatggagaaattctccgttagccgtttgatcggtgcgcctccgggatatgtaggttacgaggagggcggtcagcttacagaggcagtaagaagaaaaccttattctgttgtcctctttgatgaaattgaaaaagcccacccggatgtgttcaacatcttgttacaggtattggacgacggcagaattaccgacagccaaggcagaacggttgactttaagaacacgattataattcttacatccaacttgggttcacagtacattcttgacggcatcgaaaacggcgagataacccaagaagctaaggacaaagtaaataatctgttgaagtcctcattcagacctgaatttttgaacagacttgatgagattgtattctacaaaccgttgagcaagagcgaaatcggcggcgttgttgacctgcttattaaaaaccttaaagttcgtttggaagaaaaacagcttgatgttgttattacagacagcgctaaacagtttattatcgacaacggctacgatgaagtttacggtgcaagaccccttaagagatttatacaagccaatgttgaaacccttcttgccaaacggattatccgtgataacccgaaagccggcacggtttataccgttgacagcgacggtcagcagcttataatcaaataatttttcacaacgctcgatgctttttacggcatcgggcgtttttttatttatttttcttccctattgatacataataattcttattataaaagggaagattaaatggcagaaataagaaaaacaaaaaacggaggatttgtccgctttttcttgtatctgtatttaaaatttgataaaatattgattgtaaaacgatagtatttgaggtaagtaaataatgataaaagaacttatacacgacccggaatttttatccgtaaaatccgttgatgcaacccttgatgatatatccgtcgccgaggatttatcagacacaataacagctcacaaagacgaatgtgtgggtatggcggcaaatatgataggcgtacagaaaaacattataatatatgacaacggcaaggattttcaggtaatgtttaacccggttataatcctaaaaaagatgccctatcaaacaaaagagggctgtctttcccttttgggacttccccgtccgtgtacaagatacaaatatataaaggttgagtattgcgagctttcttataaaaggggcaaccctgttttagtgcataagataggcacttttaaagactttactgcccagataatacagcatgaaatagaccactgcaacggtattttaatataagtaaaacataaataagctcccgactgtgccgggagcttatttgcaatttgttattaaagaactttgcttaaaaattcctttgttcttgggttttgcggattatcaaaaacctgctccggtgttccctcttcagcaattacaccgccgtcgaaaaacaacaccctgtcgcttacttcacgggcaaagcccatttcgtgagtaaccgttacaatagtcataccctcttctgcaagctgtttgataacttccaaaacctcgcctaccatttcagggtcaagagcagatgtaggttcgtcaaaaagcattacatcaggctccattgcaagggcacgaacaatggcaagacgctgtttctgaccgccggaaagacgacgggggtattcgtttgccttgtccaaaaggcctactctttcaagaagtttatcggccatttcacttgcttcttcctttgttttctttttaagcattacaggtgcaagtgtgatattttccttaacggtaagatgcggaaaaacattaaagtgctggaaaaccatacccattttctgacggtggatatttatatcggttttttcgtttgtaatatcaacgccctcaaaaataatcttgccggaatccggtttttcaagcatattcaagcagcgcaaaaatgtactcttaccgccgccggatggtccgattatggaaataacctcgcctttttttatgtgttcgcttacgccttttaaaacttccaaatcaccgaatgatttatgtaaattttcaaccttaatcacttactcttaacctcttttcataaatgcttacaatcttagaaagacccaatgtcaataccaagtagaaagaaccgctgattataagggattcaatctgcaagaatgttgcgccgccaacaagattggcctgtgttgtaatttcaccgataaagaatgtagccgcaagggatgtttcctttatcattgaaacaagttcgttaccaagggcaggcaaaatatttttaattgcctgaggagccacaactttccacattgtctgtcttgtattaagacccaagcaacgggcggcctctgtctgacccgggtcaactgcggcgataccggcacggataatctctgcaacataaccggcactgttcaataccaagcctatcagaacacaggcatacttgtcaagatcaaatgcgggaaatgccttcggaagaaggaaaacaaagaagtacaactgcaaaagcaaaggtgtgccacggacaacttcaacatatattgtagccaatatatttaacggttttattttgccgatatgaaattcacttaatttaagcaacgctataagcgagccgattatcataccgaagaaaactgttacaaccgatagtttaatagtcataagtatgccggaaatataagcggatttatattttacaagcaactttacaacattttgaaaaatttcacttaaagtcaatttaatacctccgtaaagattaggtgctgggcagatacttgcccagtaccgaatttttaactgctttatatttctttaaaattattcgtttgtcacgcccaattcagcggctttatctgtgtactcctggcgaacctgcggccaatcggtgttggcaaccatatctgcgatagcctctgaaatagcgtcgcccaaagtaacatctttcttgtttacaagagcaacctggccttctgatgaataatctaatctaaacttggccattacaagacccggatagttcttcataagcaatgtgcctgtttcgcttgttgtggcaagggcgtcaactctgccgtctgccaagtaaagagcaccgtctgttatctttgtaacatattccttttcgatagagccgggtactgtatcgccgtttggcaactgtgcggaaatcaagttatcctgcaatgatgaaagctgcacggcaatctttgcgccgtcaaagctttcggctgttgtgaatttgtcaagatctttttcgttaatcaaaaaaccctggtagcttgcgtcacttgtttctgttttgccgtagaaacctgtgatatagaagttttcttttctgtcatctgttgctgagtagccgttaagtgaaaagtcaacagaacctgcctgaaccgcagcctgacatgtttttaaatccatctcttcgattttgaggttgatttctttgtcatactttttgctgagatagtctgcaacatactgtgcaacataaatgtcggaacccataatttcgcctgtattagggtctttaaattcattcggtgcaaagtccgggctgatggctactgtgatctcacctttatttattacatcatcaagtgatgtatctactgtctgttttgaaccgcaggcaaccattgatgtcgccattaaagcggtgagcaaaaatgcaataatctttttcataatcttcctcgcttatatctttgtcgaatgtaaattcggctttatttatttcgta

SEQ ID NO: 158 - DNA, 7033 bp, Unknown
  16S sequences of unknown bacteria
ctccagccgcaaagcagggccagagctgagcggagcatcgaaaaagcaaaggaagacttgatccgtctgcagtccggctatcaggctcgctatcctgacagcggagcgagcgcaggcatcgaagaccgcaagtggtatgcggcgcgtaaagaccgtatctggatggatgatctgcaagcgacacgaaagaagcttgatgagcagacacatcgctatgaagagatcttcaagaacgaatttgtgcttacgatcctcaaatcatgtgaacgggccaaggatgagctgcgtgagatcaacatcgagctggccaagctcaatttctcttcgacctatcagtttgcggtcgattatgtcaaagacggctctgaatatatgcagatcatccgctatgcgcgttatctggatgaacgtgagcagctgggcggcacggccggccagggaatgctggatctcgatgattctcatgcagaagaaggaatcgctcagcttgaacaggaccttcggcgcatcatcaaccgcgtcatcgagaaaaacagcgaagagacgatcgcccgctttgccgattaccgcaattacatgacgtatgagatcctgatcaccaacgaggtgctggatcatgccaagctttcccgccagacgggctataactccggcgcagaagtgcagatcccatatctgcttatcctgacctcggcgctgctgatgatctataaccagaggaccaattccaccaggctcgtgttcatcgatgagccgtttgccaagatggatccgggcaatgtgaagatcatgctcgaattcatgcggcgccagcggctgcagctgatcttctgctcgccggacaagaccgagacgatcggtgacgaatgcgaggtcatcctgcctgtgctgcgtatccgccctgacatcatgcgcatgggcgtcatccagttccatgcgccaaagaggacatgatgaagatgaaacaaaatgattatgtcaacgcgatcctgacgcagctggccgaatcctatcgcaggagccgcaaggacgatggcaccaacgtgatcaaccggcggaccgcgctcaagcccgaaaagctctatcgcgcatatcggcagaatgatggtgatccgatggagatcgaagcgctcaacgaagcggcccgacgatgcgctcaggccgggttcatccattatgagatgccgcgttacagcaatgagatcgatacgatgtatctggtagacgcgcagatcgaaacgatcgaagcttatctgaaggagcattacggctatcgttctaaacatgagcgcatgaacggcgtttgggcggtcgtacatcgttatgaagggaaaagtccggcggcggatgagctgtgcggggaattgcggaacagcctcgaacataaccgcgtcccagccaatgcggaacagaaagaagatatcctgcgcgcgctcgtattcatcgagaataacgatgttccgctctatctgcgcgaagtctcgcagatgatttatgggaccacgaaatactttgaagagaagacgtgcgacgccgtctgccgcaaattgcgcacgcattaccaacggccatgcggccatgatgaaatgctcagcgagatcctggaagattttcagatctatcctgaacagcagcgcatctgtctcaagggcggcatcaccatccaaaagggcggacagcgtatcgcaatcggcgcttttcccggcggcattgaattcgcggccgatgaattagcagacatcgaagcgatccatgtggatgcgcagcgcttcatcaccgtggaaaacaagactgcctattaccgctgcacgggaaaggatgcggtcttcttttaccttggcggctacgcgaatcgtacacagcgcgattttctgaagcgggtgtatctggatcatccgcagctgtcattctgtcatttcggcgatatcgatgccggcggcttttatatccatgacaatctgtgcgccttgaccggcatcccgttcatgctctggcatatgtccgttcaggatctgcaggatccttgctttgccggctgtcttctgccgttgaccacgcaggatcgcagaaggctgaacaagctggcgcagcatgcggtctatcacgatacggtgacgtatatgcttgagcgaggggtcaagctggaacaggagatcgtcagttattatctgtacaaaacggaccggttcggacatgccagcgaatgaagaaacatgaaaagcaagatatcatctgtttgagcaaagcaggcaatctcagaaagcgatcatcatatacttgaatggtgattttatgcgcagattgtctgcttttggtttatgtctgctgctctgtgtgaatgcagtgccgatacaggcggaagcgtcatcggaagcctattgtgtgatggctgaagatgggcgggtgctgatgggggaaaacctgcatcagacacagagcgtggcgagcatttcgaagatcatgacggccgtggtggcgctggagcatggccttttggaggaggagctggaagccggtgaggagatcaagctggcggccggctccagcatctatctgaagcagggagagaagatgtcgctgcaggatctgctgtatgggctgatgctgcgcagcggcaatgatgcggccatggtgatcgcgtgtgagctggccggggatgtcgagaccttcgtgggctggatgaacgataaggcggatgagctcgggatggcagacagcctgttccgcaatcccagcggcctggacgaggaggatggcggcaatctctcttcgccctatgacatggcgctgctcatgcgtcatgcgatgaccctgccgctctttcgcgctatcgtctcctgtgagacataccgcaatgccaaaggacaggtgtgggtgaacaagaaccggctgctggaagattatgcttatacgaccggcggaaagaccggatatacgaagcaggccggccgcacgctggtcagcagcgcggaaaaagaagggctggaagtctttgccgtcaccttccgcatgggcgatgactttgcctttcatgcgcagtgctatgacgaggtgtttgcgaactatgacgatgtgctcatcctgcggccgggatcgtatgtgatcgatgggaagcgctatctggtcgatgaagagcttcggctctgcctgaaacagggagagacatatcaggcagaagagtttctggaagatgggcaatactgcatcgagaccgtggtgaacgatgaggtgcgccggtatgcctatgcgcaggagggcgcatgaacagggtctggctgatctgcctgtgcgcggggctgatcttcgcgatgggcaatggcggcacgcaagcggtcaacgatctgttcatgaacatcggcaaggatacctttgactttgtcgtcccgctcttatgcgtgacctgtttctggaatgggatcctgaatgtcgcaaaggacagtggtctgctgcggcatgccgagcggctctttcatccgctgctttcccgcctgttcccggatgtgcgcaatccggaagcgctgggctacatcgtgaccaatgtcgtcgtgaacatgttcggcctgggctcggccgcgacgccggcggggctgaaggcgatgcagctgctgcaagaggagaatccgaagaaggacacggcatcccggccgatggtcacttttctggtgctcaacacggccggcgtgacactgctctctacctccatcatcgccatccgggccgccttccgtgcgcaggatgtcatgggcttcctcccctatgcggtgttggccacggcctgtgcgtcgatcgtcggcctgctggtggatcgatggtggaactaccgtggataagtggatattgcccttggtcgtgctcgcggtgctggcttgggcgctcgcgcatcgcgtcaacgcgtaccagagcttcgtgaacggcgtgaaggaagggctcgatctgttcgtcagcgtctatccggccatgctcgcgatgctgctgatggtgaacgtgctggacatgagcacgctgatggagcgggcaagcgccttcttcagctcgctgtttcccgcagtgcccgcatcggtgtggccgatggtctttttccgcccgatctccggcaatgcctcgctggccatccttcattcgatcttcaccaaggacggggtggactcgctggccggattcatcggcagcatcctgcagggcgcgacggatacgacgttttatgtgattgcgctgtatttcggcagcgtcggcgtgcgcaagatcagaagcgcgctgggcatcgggctgatcgctgatgcggccggcatgatcacggccatcgtgctggggctgatgttctatggcggataagctgaaatttctgtgttgatttgcccttcactttcgcgaaaatccttttcaaaataagcggttttgtgtaaaatacaaaggaatcggaaatgacaggggagggcgaatgcatggaacgactgcagaaggtgatcgcggccagcggcatcacatccagacgcaaggccgaacagtatatcgtggaaggccgggtaaaggtaaacggagaagtcgtggaccgtctgggcgcacaggtgaagaaaggcgatatcatcgaggtggatggcgaacagatcatccgggagaataaggtgtattatctcatgaacaagccgaagcgcacgctttgcgcgtccagcgacgaccgcggccggcagacggtcatcgatctgatggactgcgaagagcgcgtattctcggtgggacgtctggattatgacaccagcggcgcgctgatcatcaccaatgacggtgaatttgccaatcagatcgtgcatccccgctatcatctgccaaagacgtacaatctgaccatcaacggcatcctcagcccaagggacatgaaggcgctcaaggagggcatcgtgctcgatgacggctataagacgatgccatgcaagttcaagatcacagaaaaggacacgaagaagaatcagtgcagctttgatctgaccatctatgagggcaagaaccggcagatcaagcggatgatggaggcactgggctattcggtgcgccgcctgcaccgcaagcagatcgcctttctgggctgcagcgatctgagccagggagaataccgcgtgctcaaaccgcatgaggtgaagatgctccgggcgctggccatcaagggcaagatcaccaatctgaggtagcatctcatgcagcagtattttgtccaaacgcgtctgcagcttggccagccgctcttgctggatgcgggccagagccatcatatccttcatgtcatgcgcatgaaggagggtgatgtgatcgcgctctgtgatgagcagcagatgatgctggcgcggatcagcgtccatgagcgcagcgtgcaggcgctgccttatgagctggtcgatgtctgcaacgacatgccggcagaagtgacgctgatcatgagcttgatccgcggcgagcgctttgagctcgtgctgcagaaagcggcggagctgggctgtgcccgcgtgatcccgctgcagacgcgctactgcgtcgcgcgggtgcccaaggaaaaagccggcaagaagctggagcgctggaacgccatcagcagcgaggcctgtgaacagagccgccgtctttcgcgcatgaaggtgtgcgcgccgatcaccttggacgatctgccgcaggtcaaaagcgatctgaacctgatcgcatatgaacatgcggaccatcgagcgcagcggctgtcctttgcacttcgccagtcgtccttcgcttcgctgagcatcatgatcggctgcgagggcggctttgccccggaggaagtggcgctgagcgaacaggacggatttgcctgcgtatcgcttggaccgcggatcctgcgcgccgagacggcagcgatcgccgtgctggcgcagatcggatatgaactggaatcgaggggaatggaatgaaggacatcttcaccgtgctgggaaagaagaacggcaagaatgccgtttcgctttcttcgttaaaaaaagatatccgggagctggaatcgttcctggaagatcatcatgtagaatgccggatcaaggatgatgaggatctgatcaaatggtctgccgtgcgcactgcgctcgaacagaaggatcagctggatgacgtgctgtatcgctcgctggacagcatgcaggactatatgcacacgctgcaatatgaggacatcaaccgcctgctcatgctggatatccatcaggtgagcgatgcgctgcatcacttcgacagcaatggcacggccatctgcatgccttgtttcgacgaggaattcaaccgccgctacctctgctcgccggccatgttcacttacccgcagtatcagcgcctgcttcgcggctatcagccttatctgcgctgggggatgtatggagacgcgccttatgcgaatggattcgggctgtgcgagtgtctgtatgaggatcgcgccagcggacggatcgtcctgtatctgcgcaaggccaaccggctgtatctgatggaaagcgctcaggtgatcgagacgctgtgccttgaggtgaaggctgtggatcagatggatgatgcgctgttatccgcgttggctgagtcgttctgcgcgctggatgtgcagcggatcgtggagctgctgagcagctgctcctggatgaaggaccgccagagccgcaagctgcagaagcttgcccagtaaacgggaaagaaaatgaaaaagctgcgtcatgcagtgcttttcgtgtataatagacgttagagaccatcaaggaaaggaagggaagggctgattcagcctgcttgtacatgacaacctttgcgatcgcaacgctggggtgcaaggtgaatacatatgagtcgcagaattatctggaatgcctgaaagaggccggatacacggaagtggacttccgggaaaaagccgatatctatgtgatcaacacctgcagcgtcaccaataccgcggcggcgaagagccgccagaagatccatcaggcgcgccgccagaaccctgcggcgctcgtcgctgtggtcggctgctatgcacagg

SEQ ID NO: 159 - DNA, 2819 bp, Unknown
  16S sequences of unknown bacteria
aaaatacattcccttctcttttcccagagtatttgccccgcggtgcacagcctcgccgccgcagtgcctttcagcactgcaggaagcccttaagctgcaaacttaagtcctccgttcaccccttgacagcaaaacgacatacgggacatttgtatgttttcattttagtgaatattgtcaataaggcatcgaaaaaagcggagaatattgtggaacaatgaatacattctaaaaaaacatattgtattttattgatttagttggattataatgtataacgcaacgtaaaagttcgccatttttttgctaaaattgcgggccggcccaaatttcggagcggcccgcttcctgttttgtaaattatttctcaaaaagtcaaaatagttccagaaattgcctccttaaaaccggcgcgcggcacggcggctttcatacaccggaagccgttcgatacacttgcgtttttgttctatctgcggatgcacataaaggctgagggtcaggttgaccgaagcatgccccagcagggcactgactgtcttgcagtccgcgccgtcctcaatacagagcgtagcaaacgtatgccgcaggccgtggaaccgaagcatcggcagattgttgcgttccaaaaagcgtttataaaaagtgcggtaggttttcggctccaggcacttccggtcgccagaaagcacataggtttcaggatcgctgcaatgcagttcgcgcagcaacggcacaagaaagctggccagcggcacatcccgcgccgcgctgcgggtttttggcgcggtgatgaccacgctgcttttggcagcgccggtccattctttgtaaaaaatgcgctgcacggttttgcgtacatgtactattcggcctttcagatcgatatctttccactgcagtgcgcatagttctccaatacgcagccccgtatataagctaatcaagatgccggcgctccggcaattcccctcgctgagcgctgcgcacacaagacgcttctgctcggacgccgtcagaacatccatgcgcggcagtgccgtgccggggcagcgcagggaaatatcctgcgggggaaggtgataataccggcgcgctgcgcgcaggctgccttttacaacgttggccagatctttcaccgtctttccagacaggcctccactcccgtccagccggccctgccgcagccagaaaagcaccgtttcctgcagcttctcctcagtcaattcttccagcgtatattctcccagtgctggaagaatatggttcattaccgctacggaatagtttgcccaagtggattctttcacacctcctctgatccgaaccaaccattcttgtaaccagtcccgatatttgacatcacaacctgtcattctaactgcctccctttccttccgattcctaccccgtctttttcaccgaagaatctgtgcgttaagtttgcagcttaagggctgcaaagcagcggttctcctgaatgaaacgcaggattgctttcggggcaaatactctgggaaaagagaagggaatgtattttttatgaacagtaatgcaattgctgccaagaaaaaagttgactccgcgttcatgaaaaaaggcgtatttatcgccatcatgtccggtgtcacctacggtctgtacaccggcttcttgacgctgggtatggcaagaggcatttggggtgctgactggtacggcgcaaatacctccggcctgtctgtgttcgccattacttatgtgctggctgctctgggctccggtgtaaacgataccatcagtggtatctggatgctgattaagtgcggcatcatgggcgagctgggcgactgggtgcgctgcctgaagaccaagcccggcgtggtgatgatcatctgcgcactgatcggcggccctatcgcttccacctgctacgttgccgctttgcagatggccggcaccatcatcgtgcctttcgctgcactgaatgcggccatcggtgccatcatcggacgttttgtctttaagcagaagctgtcccctgtcatggttggcggcatcattctgtgcctgatctgcgccactgtcatcggcggtacatcgtttgatggcttcggcggtactactatggtcggtatcctgctggcgctggtgtgcgctctgggctggggtattgaaggcgcggtcgccggttttggcaccactctgatcgagtacaacatcggtatcaccatccgccaggttacctccggtgtggccaacatgatcattgtgctgcccctgctgtgcatgatcgacggcaacggtctgaatgctttcggcctgctgtctaccgctttcaccgacagctccgtgatcttctttgtcatttccggtctgtttgctggtttgtcctacggcttctggtacaagggcgcttccatgtgcggcgctgctctgggcatgacctgcaacggtgcgtatgcattctgggctcctttctttacctgggttgtctgcggcctgttcggcggcattgaggggtatgccctgtccgccattcagtggatcttcgcggccatcatgatcatcggtatcgccatggtcggcgacattaacccgctgagtgtgttcaagaagaaggaggcttaaatcatgagacctttgtattattccatgctgctgctgttcaaggacggcaaagagcgctgcgtcaacgatgtgatcaatgagctgaaaccggaatacaacggcttcaaaatgctcaagttccctgctgtgcaggagggtctgatgactgcgcagcagaacggtcttctggatgaaacccgttttgatctggatgaagagggcaagctgcg

(The sequence listing continues in the following parts.)

1. A method of predicting the quantity of a metabolite in the blood of a subject, the method comprising:
accessing a computer readable medium storing a library of trained machine learning procedures, each being associated with a different metabolite;
searching said library for a trained machine learning procedure associated with the metabolite;
feeding said selected procedure with amount of a plurality of microbes of a microbiome of the subject; and
receiving from said selected procedure an output indicative of the quantity of the metabolite in the blood.

2. The method of claim 1, further comprising measuring the amount of microbes of said microbiome of the subject prior to said analyzing.

3. The method according to claim 1, wherein said microbiome is a fecal microbiome.

4. The method according to claim 1, wherein said plurality of microbes comprises more than 20 microbes.

5. The method according to claim 1, wherein said metabolite is set forth in Table 2.

6. The method according to claim 1, wherein said metabolite is other than glucose and other than cholesterol.

7. (canceled)

8. The method according to claim 1, wherein at least some of said trained machine learning procedures in said library comprises a set of decision trees.

9. (canceled)

10. The method according to claim 1, wherein said selected machine learning procedure comprises a set of decision trees, each decision tree comprises a plurality of nodes associated with a respective plurality of decision rules, each decision rule relating to at least one microbe of said microbiome, and wherein a number of decision rules relating to microbes listed in Table 1 is larger than a number of decision rules relating to other microbes of said microbiome.

11. A method of predicting the quantity of a metabolite set forth in Table 1, the method comprising:
accessing a computer readable medium storing a trained machine learning procedure associated with the metabolite;
feeding said trained procedure with an amount of N of the corresponding microbes set forth in Table 1, said N being at most 50; and
receiving from said procedure an output indicative of the quantity of the metabolite in the blood, thereby predicting the quantity of the metabolite in the blood.

12. The method of claim 11, further comprising measuring the amount of microbes of said fecal microbiome of the subject prior to said analyzing.

13. (canceled)

14. A method of predicting the quantity of a metabolite in the blood of a subject that consumes a diet of a plurality of food types, the method comprising:
accessing a computer readable medium storing a library of trained machine learning procedures, each being associated with a different metabolite;
searching said library for a trained machine learning procedure associated with the metabolite;
feeding said selected procedure with a frequency of consumption of at least 5 of said food types over at least one month and/or a daily mean consumption of at least 5 of said food types; and
receiving from said selected procedure an output indicative of the quantity of the metabolite in the blood.

15. The method of claim 14, wherein said metabolite is set forth in Table 4.

16-17. (canceled)

18. The method according to claim 14, wherein at least some of said trained machine learning procedures in said library comprises a set of decision trees.

19. (canceled)

20. The method according to claim 14, wherein said selected machine learning procedure comprises a set of decision trees, each decision tree comprises a plurality of nodes associated with a respective plurality of decision rules, each decision rule relating to at least one food type, and wherein a number of decision rules relating to food types listed in Table 3 is larger than a number of decision rules relating to other food types.

21-23. (canceled)

24. The method according to claim 1, further comprising corroborating the quantity of the metabolite by measuring the amount of said metabolite in a blood sample of the subject.

25. A method of diagnosing a disease of a subject comprising predicting the quantity of at least one metabolite which is indicative of the disease, wherein said predicting is carried out according to claim 1, thereby diagnosing the disease.

26. The method of claim 25, wherein the disease is selected from the group consisting of a metabolic disease, a cardiovascular disease and kidney disease.

27-31. (canceled)

32. A method of providing dietary advice to a subject, the method comprising predicting the quantity of a metabolite in the blood by carrying out the method according to claim 14, wherein when said metabolite is above or below the recommended quantity of said metabolite, recommending consumption of at least one food type that alters the quantity of said metabolite.

33. The method of claim 32, wherein said metabolite is set forth in Table 4.

34. The method of claim 33, wherein said food type is the corresponding food type set forth in Table 4.

35-36. (canceled)
